United States Patent Application Publication US 2014/0057251 A1 - sequence listing, part 118

SEQ ID NO: 219613 - DNA, 6522 bp, Cannabis indica
taagtaacaggttagagctttttttatttgccttcaaagattgtacattaacctttgaaagcaataggtaatataatattattaatacactgtgtactatattatttattaaactcttattttgagcagtaaatgaacggatctatctgtatgatacttatacaaataaaaacattaaatgatctcctcacaaagagaaaatatgtaaaggtcttctcgacaatcatcaagtatgtcaaagtgatggacgagatgaatgtggcatcaacaaagtgcatctcgcatatcacgagaaataaggcatgacttacacatagaggaaagccaagctcgatcaacttagttagcacaagatatacaatttgaaaaagtttacttaccagaagaggaatcattcatctaaacctcaccctcttagcgatcaacaagaagaattaatttattccagtgtttcacgaggatgtttgcattcagtatatgctagttagttagcgtattctttgaggggcaaaatgttaagttttgctcggttaaaatatgataaagatccagatcataagataatagttattcatttcaataactaattgtaaactgttccaacctatttgtagatatatgaagcataaggaatgcccacgtttgataactatattttagataagaatgagataattgctatcataatcatataaatagcaaccctcatattgtagaaggcacaaccaattttttgacttagagaaattctgtcaaattatattttgtaaataataaatcctgaaataagaataactcgtggagtatgtagattttaactataaaactacgtaaaaattccttatcttttttttttaatattaatatccttaaagtatttacactactacaaaagccactattcccgacggtcctaaaaatatttttttggggaccaccgcaaaaaaacttaagtgagtgtttaaaattatctggagaaattaggtattcttgacggttttaaatactcatgatgtattcccgacaatttttaagcgtgccttataaattataatttttttaaaggggaattgccgacgattaaaaactgtggcctacactataggctaggagtgcacaaaatatacgtcaaaccattcaacccggccaacccaacccattttttgtagtaaagggttatgctaagagtaggccatggctcattgagttgaaaaatgataggccatataattatgggttggttatgggttggacacattttaactctatacaacccaaaccaacccatttcttgaaagatgttccaaatttgagacaactttcatacataaaatatatattacattcacaaaatatatacaaatatatattttacgttttcatacataaataaattatattgggataaccttagaacatgaattaaccaaaacacatcactaacatgtagtctatagttaccttactacttctaccaacaagcctaatgtgagaatcaatcactattattaactttgttactcatacaatgataccactactatcttagttttttttaaagcactatattacacgcacacacacatatatatgtatcgtttttttgtgtatgcactaggttgaataattttatcctgtttgtaacataaatattaaagtttaaaatattcatcttaacccaatgaacccaacccaacccaccccctatattattgtactaagtagggttgggttgtacaataaaaaaaattgaatggtttatagtttatccaaaccgcaatcattgggttggcctattaaaatacctctaacccagccaacccaccccatgtgcactcctactataggcaacagtttttaagcatgccttaaaaattgtaatttttttaaaggagaactgtcgatggttaaaaactgtggtctatactataggccatatttttaaaccgtgccctatagtataggccacggtttaaaatcgttgcctatagtgttataggccacaatttttaaccgtcagtgttgacctcaaaaagtgatctactgacagcggggttggatgaatctgatgtttgccacgtattacacaacaagaacagtaaagtaaataaggcacgaatttttatagaggttcgattcccttagttagcgggtaatgacctactcctcttttgattatattgatacctagagataatactatttagatcactatagatgagatttgatatagctctctgtaagattacaaagcatggatcaagtaggcaagtgtctattgagagaatggtatagccttagaggcatgtgagagaggaagagagaaggccctattgggcgtgtacaagagagggagagaagagagattaggttttcagacttagagtgatttggaggctagaattagacttagattttctaggttagagttaaggcctttatataggaaaccctaaaccctaatttacaactgaaaccttagatttttacatattaaattgattaaatacaaaagactaaattgcccatataacgggttgaggctattttagcaacccaacccaactagatcagcttttaaaatttcaacccattcacattatttttattacacaacccaacccaacccaaatattacgggttgggttgggttgggttgaaaaccttatttcacataaagaaaattagatgttaatataatcaaatacatacctaacataaaagaaatataaatttcaaacataagcaaaatcatccaaaagttacaatattacactcatccaaatttcaaaatcaaaatataagtcttaaaattcatttaaagttgtcattacaaacttaaaataaaattgaaaatttccataaagtaaattaatcaacaatgtccattgtcttctctttcgatggggatcctttgaccataaatttattatctacaattcaaaaataatattagtaacaatatataaaataaataaaaaaacaatagaaatatgtagccaaaataaaaaatcaatagcataaatagccaaaaaaattagtagcaacttattttttttttgacataaatatgaaaattagtagcaaaattagtgaaaattttatatcatctcacacacgaaatcaagacaacaaaaaattataagaataaatacaatgtaaaggaatctgaaaaagtattaataaaaatttgttatattgatctcggtagtcaatataataatataatcacaataatatattcatttatattcaaagactacaaaataaatcaacaaaaatatttataataaatttaataaactcatagctatatttgacattaaatatatatacatacaaattacaaatatacaatacattcattatatctgaaaataaaagaaaagagacaaaagagagtgagagactacctactgagaatggctctgacgggtggtgcaactggcggtgtgactagaaggagtttgtgggtttggtgtggtggaagaatggctttgtctgctagtgggtctgtctgcagtggctgacagcaactcatggtgtgactggcagggttcgatgacgcgggatggtggaaatgtggtggttgacggcttgcttggggctggttaggatctggtgttagtggtggatcttgagttttagagagagagtgagggagcagagagatagagactagagagtgtgtcatttttctttagagtttcatttcaaaatatgggtgagtgtaatgtgtttagattaggtagaatattgattcacgtatttcttatgatagaaaagaattgtaatatatattatatttttttattgttaatatattataagaattcaggttgggttgggttacatgggttacataaggtccaacccaatttcgacccatataagtcgacccactatttttttaacccatctctattcgacccaatatttttataaccttttcgacccagtttcgggttggtttgggcgggttggtcggcccaacccgtgtgtagccctaatataaagtagatattttctatcagtttattgggctgttaagggcccaatttttaaatagcttgctgtccacgtatcgggctctacatagagtcctgctaggtcaatcctggctgcccatacacctataagggacatttttctagccatgaattgcaagatatggtctggccgaccatgcaaattctgcaggttgaggtctggccgaccatgctcctactaggacctggcaggttactgtcagctttacaaagaggatgccagcttttggatgtggaggccaaccttttccaagtggaggacaactttgcacacctttcccttgcagaggtcagattttcttggtcgaatggaagctccctcggtctgaaagtcactttctagccggccagcttgtgcccagaccctggccggcctataggctcaccctaaccggcctatagtcttctcttagtcggctagggatgttggtacaacttcttgagggctagcttcactcctttcggttgcggcttgacgattttgcttctcttgcccacattgagattttgtggccttagatttgacggtatggcttgccaggtattttcggtgtaaatcgttgggcaaacttttggcccatattgtggtctagtataagggtcttttcccgtgttggggtcactaatgaaggagattctctctgctgcccagattggtgataaaattgccttatcagctcagtagtctaatgagaccgattgtcaattgcctcttgttgagcccttaaaattttagtctgtctatccatccatttgggaaagagcctcttttggtgctcgaatgtttcattcatggctgcccgagtgtttggcttatcgtgatgaagtgtatttggatgattttgaatttgagatactggctctctcaaattgcgcagttcggtatcatcatcaatcgccacccgaggctcactaattgaaggctccctgatgcccgggctagtttttccagcagagtaggtataggtagttccactatttcctggagtaacgccagttcttggggtagtgttggttggaataatttctgcgggattccttggatttgtaggagttttgacatttggatttgtaaccatccaatcacttgtaccatttggattaccttttcttgtagtcacatccatcttcaggtcttgagttcagctctcaatgaaagtaccaaaatattgatttctcttttggccaacgacactaggtctttaaagtgattgaggataattaaattcaaatagaacacgaataatatagagcaaaataagaacacaaaaatattacataggttcggccccttaataatggtaataacctactcccattacatttgtattgacttgtgggatgagaagcaaggaaaacttgatctctcttgaaagtatttatagagaatttagcaacgtaagtgctcttctaaaagtctgatttcagatccctgaatagtgaaatgactccactactcaaagagaattattacattaattaggtttcccaaaattaataaagcataaatcagaaaacttactactttcctaatttacatcaattacacatggaaatctcatgaaaataggcattttatttatattcaaaagaggaaagtaattttgctgatctgatcttcgcgtttacccgagacggaacacacaaggcctaaattgttgatgttgttcaggcgaaacagttcatcatgcacgacacatttactttagtcatcaaactacagttatttaataggtcatttcctctgggcaacatttcgaggatggtatcctccgtctaagtctcaaaaatagtccacgtgtcacccaggaaagagccacatcattcgtataaattttgagataacatttataaaaagaaagtcacacttacagctcacaattttgtaggtacaaaagcaaaaattcctaggttggttgaagatcttttttaggaaagtttactgtgggttgtggacgtgtccagtccgtgtataagctgcccaatatgagtatatcatctattaatactcatattggctaccaggttttctatctctttcatatctttaaatttcattattattttgtgagaaaagagtgtctttgttttattgaagagagtgagtttcgactctaactcattatttatgtctttgttattgtcttgagtctgtaattaagtctataaaagaagaagaacaacagtgttaccttcgggagaaggttctacaagatttcgagagatatctttttaagttaccttgggaggaagcaagcactcttcaagcaaatcgaagcgagtttgaacacttgaagttttaacaagattcatttgagaagtatcaagatttcagcacataataagagagagtctatttatgcataagtcaactactttgtatttttgagatctatttaatgaatcttatctctgggcatgaccccgtgaactagtaacaatctgcaagcattgttgataccacatataaaaa

SEQ ID NO: 219614 - DNA, 2451 bp, Cannabis indica
tgggaaaagctttgtttttttttttttgtttagtccttaattttttgctttacaccgaatgtctctttgtttaacatcataacaaaagtaagcacgctttgtctaataattccatttgtttccccataaaacacaatataagatctcatcaataatattaatatatataaatattatattatatatatatatgacccacatcatcaacactatgatctcaacatcacatgtgtactctctatactttttttttttctaattattaacaaaactttgtaaaaagaaatttgacttaagcctagcttggtggtatctctatattactattagttgactaaattaaatgatataaatcttattatttaatttaattgttcaattagaagattttcagtgaagtgttataaatataatgtatattattttttagctagcttatgcttataaaatttaactccaataataataatacataatgtggtctaataaatttcacataagttaaaagttttattaaatttagtacaaaaatagtatgaactaaaaataatttcacaccataataaatattattttttttatttactattttaatgtaaaataacctttttatattttagctatatatttaataagatttttatataatttcaatgaaaaaaattaatatttttgttaatttttttacaatttcctattaagaaaaataccctataatgcgttgaaatacaattacaaaattcaagtcaaatataacattaaatattcattttcttagccaaatttagtatgtaattcgttgaagatggtcttaatatactaattaattcatttattgattaattgaattttcactcaattaattaattaagattaagaaaaaaataacataattaataagagctcttgaagttgtgaggttcaagagcctttctctccttgcttttttcatttttaatgtttaaaaaataaataattctataactacatttataaaattataattattagggatatctttaaatacaattcaaaaaattaaaaggttggccttgatactcattaatgttaagtgttaagatttgtgaatacataatggaatgtctttaattatacaattaatacttataatgggagaaaagaagaagtgtcataaaagaaagataaaaaaaaactaataataggtataattagcatttagcactaatattgtaaatgaatggaataaatattatattaataatatttgctttctttgaaggaaacaatggattattacaaggatgggcaatgtatttatacatgatctatatatttgtgtactcatgatgattataattgtaaaggtaatagtagtgaatatagttatgataatgggatgaataatgaatatagtacacatatatataataatttgacttttgcttttatatacctagacattatgaattgcacttatataaatacccaaacatatataatcatcacaaaaatattccctttgttgctcactacactatagatctcatcatttatttattttatgatgatctgatttttttcatcacatgttaaccaattaattaattaattagtcttgtgatcagatgatcaacctttgttaattaaattaattaagcacatccttattgcaagttctccaataattatattagaaaggatacatggaattatttgtataatttgagtgaattttcgtaacaaaaaaagttctacaatggtggggaacaaaatccaatctattctttcaaaaaaatagtatcacatcactttgtaatgtatatatagtatttgggtatacacactacaacattaaggaccaatagcggcgggcccctcggccgctattggtccccaatctggccgctaaagggcaatagcggcggacctcggccgctattggcccgccgctattgcttggccgctattactagtattagcggccaaaaacaggatccgccgctattgtacatatcattattcttgtaaataattggtgaacataaattattttcttatgtcattttgcaaattaacttatttttttcgtttctaatagtaattttgtaataataattttagattggaatgaatatctaggaagtcatttcttaaagaattatggaaatgaaatgaaattattattatgcaaaaggactaaaaaaatgagtattttttccggatatcctaaccattattcttaatactaaaaataaaaaaatttacactaaaaaattaaaaagaaaaattacaaaatacattaatacggaaaaaaaaatatatttttactctttcagcaaaaataataaactattttttcggttgtttaatagttatattatagttgtcatgaggttgttcttttggttgtttttggttattttatagtttatttataagtatcgtaagattgatttctcgttgttttct

SEQ ID NO: 219615 - DNA, 4964 bp, Cannabis indica
aataaacatagtcctcgtgggtttgacccgtacttacttttatactgaaaaattgaaagtattggaaaaaaaaaatagtaaatttgatgcggcatacaacacgcatcacatccttgttaatttttgaaaaattcctaataatttacaatgctgaaaatagaatttattatattccaatttactacgcgcgcttaaaaaaattcaaacgtcttctcggcattgtaaactatttaaaatttacaaggatgatattgtaagcataacacacatcaccataaaaaaatattccgtatatgttttcgggcacggaagttacttaagaggttgactgtaacactcctctaaatttaaaagagaattactaaaagataccactagtgactagcaccattcttagtgtcatatagttattatgtagttaaataggggatttcatacttataaaataaattttaagaactatcactaattaatcgtaggtgccaccaatgtaaaattatgaatatagcaatgctcaatttaaaaccatgttattggcaaatgaaaatggcagaataatttcttttcttccttttccccatggctaggagggggctcgagccaacgtacttttcacatcccaataacccagctccagtaaaatggatacctcaagtggcactttcatacaatatgtcattgaaagtctttaaattaaatagcacatttaacattaggctaaataaaacacaagtgtttaaacaacataaaagtgactacaaaagttacatccaacatttctgagaatcacacaagtctcgcctcagcctacgattttgactctgtatgcggaaggtgcaaggctaaagtagccggggggtgacaacaaaattttccacaaaacattgtctgtctcatgcaaaagctatctatatacttaaattaaggtccaagttggatgtaaactatcccaggacagttttgagtttatgcatgcggaccactgctatttaatttgtgcgattttgtaatcgacctcagcttttcgtagctatcaacgcaagcatgagagtagtccgacatggcacggaaaaactcaggcaatcgagttttcaggccctgaagtgacttctctctcacctggagacaatgtctctggtgagcttcaacttcctcatctaatctcttcttcaagctctcaactgcaaactgtctttcccatatgggatcctttgcatttgcatcgtcacctctttcggtatctgtttcttcagggcccctccgctgtgtgtacttctgatgccattcctcaaatgcctgacgtttgcgaatatactccttccgagtctcctcgcatttctcctttagcttcatttcttcatcctgatgttgtattattgtctttataacggcagcgaaggatgaaatggcagatttggcaagttcatctggaagcttttcgatcaagtcatgccattgatggagaagcgcttgaatcgggggactttggactcttggcggagatgagattttctcttttaagctgctttcaataggaatgagattcaactttaaccaactgttaagagcttgaatgtattgtttttgatgagtcacaagcttttcgaattgcaagttccagtcttggacaacattaaaaagttggatggtacgttcatggtggtgcttggttgtttcttttggagcattagcaaggtcaagagccttcaaatctaaaacaatcttcagctgaccatcgtggtgagtgcacatagtatcccacattttcgccatcctgtacagcagacatcggacacatttatggacatgatcgaaatcaaaaactataaattggttttgctaaggtttcagtcttcacaactcacccattagcgagaccaacaagcttggggtataactgctcatcccgtaaccgattaacttctgaaactgtggaatccatggactgcatgtcaacaatatatctggtgtgcaaatgactaacagccgctttagttttctccaaagattcagcactggcaccacgtttcttctgcttgttgagaatagcaacctttctttgatattctagcttcattaactcgccttgctatcaatcgaaataagattcatagatacaaaatctcagccagcattcagataatagttatatgaggttgaagcaaagtccaaataatagacaataaaaagagtaacaacggataaggagaagagaagcgataagcattattaccttaacttcatcatagagtttcttttcccaagccaacaacttatccaaaactgtggcatgactttcatactcttctgaatcaaaatcatctttcccaccatctccatggggtactaccacctttgaatgacctattccatgtaatcactcgcataaccctcgcagaatgatctatatgtcctgaaaaacacaaaacataatctcatctaacgctctcgttatttctcatatataatatatatatatatatacatattgtctaattagattttttttcaaacttgtcaagttattataaattttggtacatgttaatgtttcggagcacgatggcatatgtcaacgttcggaggcacgttttagtatatggacaatcaccatgttagacatcgattagtaaatggacttggacataagtaatttaatccaacaatcttaatagtttggtagaaaattttaatggagagaaaacttccggggaaagaatcctaattatatatataggtgtgtgtgtgtttcttcaacctcattacattgcaaaatcttgtgatcatatacaaatacagtgattgttgtaagagaaacttgaggtaagattcaccaaaagttcccatgacaaaccaaaagctataaatgaagaaaaagaagaagcataaactacctcgattgtctgcgaaattggagtgatagtgtaatcgagtggcttcgagcattttggagacctcctgagcaccctcagaggcctttaagaaatgatcatcaatcttgcctaatacctctagcaagctcacactcgaagccgaagccgaagccgcttttacagctctcctaaaaatccgccggagccgtatgagaatgctcaatctgattaggcgaaaccaactccactgtcccatgtggcttatcctcctccaccttcttctccggcgtcttcggttcaacctcattctcatcaatcctaactcccccatcgttcagattctcatcagcttcgtcaaaatccatagtcacatcatgctcctcattctcaaccccattttcattctctgcacccaatgagccaggcatattctctacattgaaaaagtaatcccaggccatacctttagactccggcatgggcggaaccgatttcatcaactccggtgtacgtggcggcgaagaagacgaagacggctgcgccgccactttctggccaacatttctcggaccccgcgctctgtgtataacttggttccgctcttcatcctcctcttcttcttcttcttcctcatcctcatcttcttcagcaatggcgatggagtgatttttgcgtcctggtttccgatgcatagttgggatctcgggcaagctcgtagctcgcttaagttgtgggcttggagagaaattgggaagaggaggcggcggagggggaaggttgtcgagcggaggaggaggaggcggcggtggttccgaagtattttccatatcctgttgatggtgactggggtgaagctgtggcggcggctcttcagtttcaccgtgtgcataatcgcttaaagcggcaccggtgttcttcaaagctacggcgtacccagaatggccggcggcaaaagcgtttctagcaacaacggcatctttcatcaagattttccgctccttacatctcgaaacagattcctcattctctatcctagactgcgcacaacccattttcaactaaaaaaaaaaaaaaaaaaaacaaagtagttttcactaaactaaacaaaacaaaaataataacccttttcgacatcaaatcaaaacaaaacaaaacccaagaaaaagaaaaaagcttaaaagctttgagaagtggggtttggtagtgattggtgtacaacaaaaatagacaagttgaaacctagagactgggttttcatttttttgggggtaggtggggtatgcctaaaaggtggtggcgtgactttctttcactgaagaagaagacatgggtgttttgagttggagtggggttggtgcttgttgtttgagctcagattagtaaaagtataatgcattgcatttacagaagagagagaaagagagcagagaacagagatagtgccaaagctcgtactcagagatgatgagagtgagtgagtggagtttgtgtgactcgctgagtatagaaatgtaaaggtactcgcttgcttttgttacgaggtgtcttaatcaatattttaaataacggtcacatttttttgaggctctctctatacggtatgttttggtattggaccgttctcttctctaattcattttattctgattttttacattattatttttgcttttcttttttgaaacaaattattatttttgtttaaacattagtaattattaggtatttatttcataaatatacaaaaataataaattttttacatttttatgaatttgctctatttttttacagttttacagatttttatttaccaaaatacattatttttttgttgtttttgaaaaaaaaatattattttgatgttattgatacgagaaagtaatgtgatttatttttataattataaaaaatgttatttttaagttgtttgaataatattattttaacgttattattacgggatagcaacgagagcacatttttttgttgaaaaaaaagtaaaaacttataaaaaaataaggaatttttacactaaatacctaaattgatacttttttttacatttatacggatgtttgatgattttaa

SEQ ID NO: 219616 - DNA, 4740 bp, Cannabis indica
aaaaaaaactaaaaaattaaaataaaattaacatacgtgacttggcacgtaacatctatctagtcttaaaaaatatgaaaataaaagtaaaaattaaaacaaataaagttaaatgaatataaaatgttataaaaacaaaaaaattgactaaatttaagagcataattctgtgttaattataaaaatccattttgttatttaagaatatctaataatggtaaaataataattgatcataatgtatggttagaagagtaatacaaatattcttttaattaaattcgttcaaggaatcaagatccatgatgaaaaatcccaccttaaactatttatattctatataattaatatgaatcaaagtataggtgaggcaagaaagaaacactaagagcgaatttctcgatgtccaactcattttgggtccccaaatgaaaggatgatatatctcttcccactatgaatggataggaattttgtttcaaaaggtgaatatttttatcgcatatttttaattttgtttgtgtttatgtttttttttttttttctctttcaaataaattaaaacggcatgaaaaaatgtctccataattaggtcaatgcctgaagatatggagagggtgatactttaattattttatgttattttaaaagtgtagagaggattttagtttttatatgaatagtttgttgccttttacggaaaaaaaaaagaaaaagaatagctagttggatatgaagaacatttgaatttattgatgttgtttttatttaacataataattcaatagttacaaataaaatatgaagattgctatcattttttcaattaaaataataaattaagaaaatacaactttcagtacataattgagacaatctattaaaatatattagataaaactttccaacttaaaataaaagttatacataattattaattttatcattaaaaataatattgaactattatgcaattgatcgtaacgatcataacttgtgattaataaaaaacataaataagtattaacttctactaagtgccaacagaagccaataagggtaacttagtggtgagagaagtatgagaaaaaagagagatcatgaattcaaattcaagacctttaagctattaaattattaattgattgtaaaatactattacgctacactccaaaaaaaaaaagtagtcaacagtgaaagttctatacaaagtatgcaataaattatatcagctcaaatgatttcatttatactaacagaagtaaatatagggtaaaattgactgccaatagaagacttacacgtatagcaagtacataatagaaaaaaatgaatgttcctaatatacccttgtatatttatctcttgacacctcctctcaagtgaaagggagatgaagtccctatgagattgtcaatcaagtattcaaattaagaatgggtgagatccttcattaaacaatcaactagaaggcacataacgaatctcaagttccttttgcagtaccttatctcttacaaaatgcacattcaacttgatacgcttgtgctcatattatcacaccatattaccatagctgctgggaatttgaacttgaattcttctaacaatttttgaagccacgaatttttagctgccaactgagctaatcctcaatattctccctcaaacgaatggcagcagaaaggacttcagtcaacaacaaaaataaataagggaacaaaaggtcaccttgcctaattctcctagtggaaacaaaactattagagatacaactattaataaggagcttaaaagaaacaacttaataagaatagacacaaacctagaaggaaaaccaaaattatggaagattgcttcaatagaaccccattcaatacgatcaaaagctttctgcatatcaagcttcaaagcagcccaaccatatttccccttcttcctatgatttatagcattaaaaatttcattagcaatgagaatgttgtaaaaaattaaatgacccgaaagaaacacactttgattatgagaaattagagagtttagcataagttttattatattagacaagaccattgctaccactttataaagagttgagcagagactaataggtttaaagtcatgaatttttgaaacattctttctttttttaggggggggggggattaggaaaatgacagtatcattgtttcgtcataactcacaatcacttatttagttagcgtaaaaaatactatcttgttttatttatttttaaataaatcacttgaaatattacattgaaaccaaatattacttaaatacttaaatttttaaattttatagttgtttacttagatttttggaaactaaatattttagaactaaagaaataatataattctgaaatgaaactgtggagattttttacgtagttcgggtgttaattaagcttagtccatgagttagtttattagcctcttaaagtgtttttgatgtgtttacagtatttttgtaggaaaccctaactctgtactctaactcatgaaataatctcaaacaatatctatcgcatccctaaatagggagtttagctcataatcaaatccataattaaactagacacaaataaaaatataagaaattaagaaaaaagaaggaaactagatggaggattgtcacggatcacccacgtttgctccaagcatattcttcttgtatttttagggttctatttttatctcttcataatttgcaaccccttttcattaaataaaattttttagcctaaaaatgagaaaagacaaagttctccttgtagccttatcgcgacgactgtagaaagttgaattcaaggctttttgtagccatctcaccacaaacataagtcgtgctcgctgcgaccacaaatattagtcgcgaacaacttaaggaaattctactttgccctctctcagtaaaatatgcataaatttcacatacaaactccaaatgagctgattcaacatgcattggaaagctaaaaaagagatctaagactttacgttttgaatgtttccaaaatctgatcaaaacatagtcaaattcaggcttgaagttttagctttattttcttgcaacactttctctattttatagatcactgtttcccgaaatttgaccaatttatacattctaagtgtcaaacttgaaatcaaagaaaaaaaaacgtaattctagtccaaaaataacaaagatgaaaaacaactataaaaagtgacccaaaaattaggctaaaaatagcctaacagttagcacacttttaaaaaaaatcttgggaaaaacggtctatcgttttctaaatggtatgccatttctatgaaaaatggtttgtcatttagaaaacggaacaccaaaaacaaggcaagggcaaactcccattttcacggctctaaaacacgcataactctttactcgtttatccgattttagaattctagttttgttctcttagttaaatgattttttgtcttaaaagttaatttaaaaatcttaatatcatttttgtgaaataatttgttgcacaagttaccgggccaaaattcgcacttaaaactttttaagtatagacttgaaaatcactgtacaagactagaaaatataaataagccttcatgaagtcttgtcttgagtttcttgaggcgtggaattcattttgggtcacttttgagaatttagtaaaattaccattttgcccttcaagttaattttgccttagaagaatttaattaatcttcaattgtgctacaaaataaataaattattagtgacaaataataattaaatatttgctaatcatcaaaataaggagacttaagagtttgagtcaacaatctctccctttttggtgatatcaaatatttgattattttgaaaggaaaaaggaaataaaattgaaacaatatatgtaaagaccgcctaagaataacactatggattattaaatagggtttaattatgaaattaaattattaattatagtattacatattggtaaaattatttaattgcatatatatattaaaaatgttatttgtgtaaatttcttaattttggtgtttgtgttcggaagctgtggaaagcgactttgggcctttagagagtcgtattttgtgtgttatcgcattttattattttcgggacatcattattagttttgatagtatcggatattagtcgggatatttttatgaccaaagtgcccttagaaacctttctttggtaactatttaaggggtaagggctcaatttttgggttcccagcacagaaccggtcgaccggttggtacccaggaaccgagcttccggttgggaaccggtctgccggttggagatttttcccgaaccctagtttttcccgttaatacgtaaattagggtgtttgcatcttatttatcgatagggttatctttagtttcaattttaaacccctgatgagtgttttagcctgtctctcattgagttttgaacgttatagtttagggtcctgtaaagcgtcgagcagcgttttcactcaggctgatcggcacacttagcacggaacgaggtaaggtagcataataatgtacatatgctttgtttatactactaacaccaattatttatgtaatcttaagagtgttagtatagtgtaggatatcaatgtggttacggtgttaccaacacgagtaccagggggtacgtcatgcatgtggtacaacacttagtaattcccgggagtac

SEQ ID NO: 219617 - DNA, 2599 bp, Cannabis indica
ctagaggagtcgaggatgaaagtccgaagtttgcaagacaggcctattcaggaggcagagcagagctctgttatccgtccagtgcctctgtctcgctcggcggttgctttggtcctagaacgcctggttactgtggaatcacaatcaggcatgtttcgaggggtagaagataaagtttcttccttggtaatgcagctgcaactactgagagctttcattaaagatttacaaaagctcagatttgatagcgaacttgaaaaggcttgggtggaggaggcacaactaatcaatgctcgatcactgaacgacgtcaatacattcttgcaagatgcagcagatcagcggagatggctcgctatcgtcactgattatcgatttcttagacgcaagttggataagattattactaatgttgacaaagagatctctcatctccttgaaacaaaacaaaggtatggttttagttttatcaagagagaaagagattccttcctagatgtggtgactacgccttctgtgattcgtacccaggacaatgatctgtctgttgaattggagaatacatgtaaacaattggaagaagaagaggcaactaatgttgccattaatatgagaaaaacttgccttgagtttttgaggaaattagcttctgaagtcatgccttccatgaagacagaaaggagaattaaggaagcgtttgaacatctcaaattatgcaaagaagtgtacacgattaaggtgatgaaagaatcatgctttgcagttggtttggaagatgacatactgaaacttttgaaaatgatcagtgatactaatcaatacggctcagtcatttctattgttggtatgaaaggagttggtaagacaactatcgtgaaagaactcttaaaccataattctactatcaaaaaatttcatgctcgtcactttgtttatgttccggaagagacgagtaatgtttccctactccgcaatgtgggaaatcagatcctccatacccaaaatgaaaggagtgatgatgaatactggatcaacaagttgcaaggttacttaaatcgtgatgagaagccacacctcctagttctcgacaacttggggtccaaagaagcttgggatatactcaaacctgctgtggtctcagatggaaacgctagacctattattttgatcaccactcgtcacaaagtcgtagcttctcatgtgaattcgaatttgagcagtatccgccagcttcggctaagaaccagagaagagagctgggatttttttacacaaatagtctcgtgtccttctaatgatgaagatggtgaagatgtcaagcttgcgaaaaaggtggtgttgaaggctggaggtcttccccttgctatcttacgtcttggatatttattgtcagggaaggaagtcactaaggaggagttgtctgtggtgctgcagcgtgtaactcaaggtcagaatcaaacaccatggatggccgttaaggacaccattaaagaagacttgccatttcaaccagatcttgaaaattgtctctcctactttgaactgttcccgagggactttgaaatttcagcaaggagactagttgctttatgggtggctcgaggattgacacaaagtgataacaccagtggagtgagaactcaggaaaaagatgcctacaattatcttctggagttaattggccgtaacatcattcaaatagtcgaaaaaaagctcaatgggaaagttttgacatgccgatttcctggcattttaagagaactctggctggccagcagaacaaacaacactgcagctcactcctggtccttgtgtggaactatggagcagaaacttgcctatcgattcgatgatgaagacactggtttcagtcggagaattcatcgtctggaccactcaaatcttttgccggaggaaagttctcctctctctattatgttctttgatacccgcgaaggagatcagcctggtttagatatacgaaacttcctatgcaaagccattaaaacagggcgcttacttgacttagttgttcttgatctcgaacatgtctacaagcctcaattgcccgacatcatagcaaatctaaagaagcttacatatctaggcctaagatggactgaagtagagaagctccccaaaaccataggccaattgtcgaatctccaaactctggacctaaagcatactcaagtgcaaaagcttcctagctccatatggaaactgaagaagcttcgaaacctgcatttgaacgggagttgtcgaatcaaatacatgcctccaccaaacaatcttcataagttatctggcgtacttgtggatcatgaaggtggggcattgatggatggtcttccaaagttagttaaccttcgaaagctgcggctaacgatccaatcgacactgcaagaaggtttgtcaagacacattgaacaactgactaacttaagatctttgagtctgagatccattaatgaaagcagccaactccaggagctatacgtgccacatttgaataatcttacacatctttcaagcctaacattggcaggaaagatacgaagatcatctgtcatgtttgatctaccacgaagcctcactg

SEQ ID NO: 219618 - DNA, 4006 bp, Cannabis indica
ttttcatgtaaaaatttcaataattttttggtgaaattttcaacaaaaaaagatgctttgcccactaaaaataatagttaaatcagtattatttttattttaatatagaaaaaacaattgtagaagaacttcctctctcatcaccctagcttattataattcatagcaaaaaccaaaatgagtgctaacaattttcttatatataataattagtaaatgtagccttttattatacattttttaaaaaaattatattgcacaaaataaagtataataataattgtaatttatgatctaataactaattcaaccaaatttaattcaattacaaaaaattgcaactaattaagcaaaattcattatttacttatcttataataattaagtaagatttgattgaataataaaaatattttattccactattgttatttgtatttttatacagaagacacgtggcataattagagtcaaagatgtgttaacctcccagattaatagagatgaccatcaaggttcctcacggagatgcattgctagtgtaggaagggttttatggatacttgatggggagaactattctcagcccaagtaacgtctccgggacacggaaggaccatattcgtccccaactccaagacatcctagaacacagtttggttgcctgactactaagtgaagacttctacggactagtcgcaaatcttagctactgcactaaggcaaatggccacgtcagcttcatatggaaatcgaactacagaaggttatacctttttctgatccaggatcagatcttgtaccccatgccaggctatggttgtgcgcctacgtaccttaagacatgccttttgcctaacggcttgtttagagagtaaattgtaaaggaaaaacctttgagcaacacctgtccctaattcaaacggtaggaggcattacctttggacaccgcacgatcaagaaggttctctaaggctgaacggtcaaatctatagttgtattctctttcccttgcaatgggctgtggtacgaaatcctagatgggtaaagggaatacccttacccacatgtaagcctataaatacccccacttcttatgtacaaagggtgaacaaatttgatactagctgaaccattgcaaaaaattccaacaagctttctttttcttcaagagaaacaaaaggaatgcaaagctagggttcatattgtaaacacttgtattatccaaatacttgcccaaagggccaatacaattgactcgtggactagggattattaacgcccgaaccacgtaaaaattatttgtatattatttgttatttctttctttcttaagctctttattattagttttcaaaaatctcgataaatattttggtgcttacattaagagctgaagaaagtttgctagccatcacaccacctcaaccatggtgttcactcagaagaacgtaggcgaaaaaactcctataaatacagttatgaaggaggcagactctctcgcccctagtctccaaccaggcggcgtaggagaaggtattgaatgttgaaaactgggagaagatgttgaaaacttacatgatggcgtcaacgatgactaaaaccctgaagatagggaagacgaggaggacaacgatggttacatgaatgacgggtattaaaaagattgttattattatgaccatgacccaaacctgctgcgagtgactaaagaattagaagctacttagacggagttagcggagcagaaaaactcactgagaaattgaagagaatgatggagcgtcttcaagataagtttcaggacctggcaaagtttgacgatgaccctttagttgaagttatggctgaagagcgtgctcttaggaaaatcgaggtcgaaacctcgaatccttgtaaggataaaggtaaaggtaaggtaggtgaacccacacaaaagtctgctcttaaatctcctcaaaaagacatgaatctggctagccaaccctctaagatgcaaaaggccaccggtgcttttgagcctggatgcccttctgctcctagaggcaaaactgtaccaaaagggcaaaacacaaaagtacctaagcgcaaagggcaaaaaaagcccctagtgattctatcaaccaggataaaaggatgactgaagggaattttgaagacagctggtccaccgtagacctttatcagcgattggatgccaagtgcgaaaggtacaaaagtgaaaaaagtgagccacgtggaggtgaactcgaaaatcacttaagtgacaaaatgtgaggacgcaatcttcccaaaagtgacacgaaaaggctagaagagtagatggtagctctaatcatgttagccaagaagcagagtggggccctctcaaatttagaggatgaggacccaaaaccctgcattaggaggatcgcaaagaccccactcttggaaaactttaaaatgccacacattgagttgtacgaaggaaggatagatccacggacacacttggcaaaatacaacaagatgatgcaagtggcacgtgtgagcgatgatgccaagtgcttgtgtttttccctgacattgagcaagtccacagaagactggtggaagcatgtggctcttgaatcgttggatagttggaaagacttacattcagccttccgcaaacagttcatttccatgcgtgatctggacatggaggttggctttctcaccaatgtcaagaagcaacaaaatgatgagaatgcatgaagcataaggaactcatagaaaatgtatttaagaggggtagaagaaagggaaacgtgtgtgttggtgcagtctcccccacaacgtcccagaatgatgagcttacccatcaccttcacagaggatgatgctagaaatgtacatttcccccacaatgatcccttagtaaacatcatcttcaaatttgcattccaggcaataaggctcacggaagttgacttgactccttaccccattcagttgcaaggtttcaacagagacgcctaaatgcctatggggaaaattcagttgtcaataaccctcaaaggagaaaacaatgcaagtgcttttaagaactctacttttgtagtggtggattgcccaacacatacaacacaatactaggacggccaacccaaatagattttgggccagtaactttcatcaagcatctatgcatgaagttcccctgcaataatggatatattggcatagttaaaggtgataaaaaaagtgcaaggaattgttacaatgtctcgacacgagctgtgttcatagtctgggaagaggcacccattgatcctagaatggaggctcaggtggaaactgaggccatttgggaggattttgaagacgagttagatcccagagatagaaagaactttaaagccaattgaagaggttgaagaggtgagcatcatcgatgtggaccccataaaaaccatcaatctgggaagaaacctactccatccataaaagagaacattgtgaacacattcaaaaagaaccaagatatgctagcatggagccattctgacatgactggaattgatcgtaatactatttgacaagccttgaacattcgagaggatgccacacaagtctgccagaaatgaaggcccttggatccaataagggcagaagtagtgaaagcgaaagttgataagttgaccaccaatgacttcctctgagaagcattgaccatgtctggctcgttaaccctgttttggttcctaaacccaacgacacatggagggtgttcatcgactttatggacctaaacaaggcttgcctaaaagattgctttctgcttccgcggatagatcaaatggtggatgccacctctaggtacaagttgttgaacttcatggatgcctactccgaatataaccaaattaagatgcatgtcgtatatgaggaacacactagcttccaaaccgacaaaggcatttattgttataaggtgatgctgtgtaaagcccgcttagttaatttggaaattagcagttgttta

SEQ ID NO: 219619 - DNA, 2627 bp, Cannabis indica
tgtcatattgaactattttagtattatctccaagtagtaactttaagatatataccttaccttgtggcattttctatctctaaatacattcctaagacctttctagcagcccccatatccttcatctcaaattctcctttcaaaaccttcttgagcttgtcaaacttgctagaatctgttcccattattagcatatcatcgacataaatcagcaagtcgatgtagagctttcaatatcagcaacacataaataagtgtcaaacacttttgagtgtttctcattcctagatttatgtagagagtagaaaacactgttgtaatagcttttcattttgctttgtgttttctttcttggacaaatttatcttttacttctctgttaaccaatgtattctatacatatcggggtgataagacaatgacctctatctcttttttataaaaaaaaaaaaattctaagggactgttttactccatagatgactttttcagcaagcaaaccagttccattccttcagattccaccttgaatccttcggtttgtgtcatgtaaatggtctcttctattctatcatttaagaacgcggtcttcacatccatttactttatctcccaatcatattggacagctagagccaacatcatccttatggtcttcatctcgattacgggtggaaaaatcttccagtagtcaataccctcaagttgtgtgaagccctttgccacaagtcttgccttatacctcttcggacatgtaggagcaatgccatctttaagcttgtatatccatttacaacttacaagcttctgattttttggttataacaccaaaatccaagtgtcattcttcttcaaagaatccatctcctcatccatatcttgctgccatttttgaccttgttgctctctatagcttcttggtttaacactcttagaaccattcataacagctaaaacatataatgtctgcttcagcatgtattataggagaagatatgggacatttgttcttggagtgcatttttattcgactatcatggattaatctgctggaggaatttgaactaatttgggttatactgatcagcaaacaaaaacaaaattatggagaattgcgattttggcaacaatttcggttgtgtggttggaaagaaatgctagaatctttgaaggggccaaaagttctgtgtcaaatgtgtgcaagaaagttaagttttggacagctacttggatctttaaaaccaatcactttgaggaattgtctttttcagatttaagtagaaaatggaaatcattgacttagtggaattgaatatgttattgcatgttggctgttacaggatttgtttgattttggctataattttgtaactatggttttcctctgccacaagtgagggttatcaatacattacgagtaggggctagtctaagacaatggcccctttcacttttgaaaaaaaaaaaagattatcatccaaatccttttcctgagactcttcatatttgatctgcgtgttcgtcaaattgatcaacctggtcaaagttttcttgtgatatttccacccgattcagtcatcaaacatctaactttgtttagcaaaatacaattcatgcacaacttgtcaaattcattattaacaaactcaagaccattattggttctaaggtttttaattttcaaattagtttggttcaatgttctccaaactttaaattttcaagacagttagatttatttttgagtaagtaaacccaaactttcctactaaagtcatcaagattacctcattgagttggtgttctacttgctccctacaaatctatctcactaaacaataaacaacaaaataaaccagaaacaagataaaaacacagccagatttatactagttggcctaatcaatagcctacttcagttcctccaagaggttccactatgagcaaaataatatgctatagacttgtctcagatcaatagaaatcgatctcgaaacacaacgtgtatatgacttagatgagaaactagagaacccttttacacccaaaaacttgaacaatcactcaaacctcccaactctgaggtcgatcctacaaggattgtagctaattactaattaattgaatctttgactttatttggcaaacaaaatttggttgtaaattagggaatttaatttcaattgcttctaatttttactttactgatgcaactaatcttcttgttctacctagtgtgatggcagattataaattgttctctattctgattaagacataaagaacctaaattatgacactatcctacatttctgaagtataacacacatataatcagcaataatctaaacggtacacaagctacataaatcaattatgatataatcaattatatcataactaatactgacttttcagattttatattgaaagtgtaaatcatacaaaagatggccaatcaactatatgtaataagcacaaaaacaatccgttcacataatcacatagaagaaaagaagactaaaattgcattaatcaataaaaagtataagacaatctccattaaaaaccttaaataatgagtttagctcataattgtcattctaaacaattgcaaataacaaatt

SEQ ID NO: 219620 - DNA, 4531 bp, Cannabis indica
tatatcttgatttatcttccattgtaataatatctctaacaaatagacaccactagtactcaatgataataatctttattaatttatcaccacaaatatttactctcttttctaaaaaaaaaaataaaaacaaataaaaaagattgactagatatggatgaggtcaaaaggggtcaacataatatcatctcgagaatatcatatatcgcgtgaaaatatcggagataaaaaaccagctgttctcgaagttaataaatagacaaaattggaggaaaggaaacgattgtatcaaatcagtttcatacaaaatcattgaaactgccgacgtgtaacctcttatcctaaataccagttcttttatatcagtactatctattcttagatggacatgtcagcaattgtaaatagtaaaagtgattttggttgtagagaattaaatctctttgttggagtcatgctctgtagttctccgttatgtatggctcacaaagtggcaagaatcacgcgcttgagcagagcgtggaaggaatgtgttcttgtccctagcgtttgtcatcccctagtcacgtgactcacatgtgatagtatttttatatttcaaattttatttatttttttttggtagtaccgtgtgatttttgtaaaagttaccgattggattctgtattttgttaaatgataaaattgatgctgtatttttcaaaatggtaaaaatagaattctgagcttaatttttgacaacgtttttttttttaatataacaaacttgaagacaattcctaatatgaataaatacagaaaatgtaaacagttttgtcatagcatttttgaatcagattataattaaatttattttgacaaaaaaatcaatttagggtcctatttgtaccattttagaaaatacatagtctattttgtcatttaacaaaatagaggatccaattaattacttttacaaaatacagagtctaaaatagtatttacccttatttttgtttgggaatgcacttatataaatatagtattcataatttttttaaaaaaaaatttaattttaaaaaaaaatctaatattaataaaaagtactattacactaataaaaatttctattacattctataaattaatatatatgaaaatattatatttttaatttttttatagcggtattcaatatcatctctgtaaatttttaaaaaattatgaataatttacagtatcaaaaatagagttctagataatccattttaccacacatatttaaaaaactttaaacgtattttcggcactgtaaaatatatacaatttttaaaaaatttatagagatgatgttataagcataacacaaacactgcaataattttttttgtgaaaaagatattttggcatgtgtttttaggcacgaaagttaactgagaggttgtaataagaagttaacaataacactactctttgcatatactataggttgcttctgcactatttttgatacttagataattttaatcttaatacaataatgtacgacgtagttatttaaaatattatgtacaatttcaaaattttgaaataatttatagtataaaaaatacggttcatatagtatattttacatgcttataaaacaaaacacatgtaataaactgcttgaactttatttttaatgtgttaaatttttaaaatttcttaaaattttaaaaaatatattaaataattatattgtaaactcttatatatataaattaaaattaagactattttctactaaaaaaaattaagactatttgaatgccaaaaaatgcaccaatacatgtttgcactataaaatttccctattaattataatacaagtaattaatccttacaaaaaaaaatacaagtaattaatatatcatttacaaattattacgagaaaaataatattttattttttaaaaattatgtgtgcttaacaattcatttttgttcaaaaaaaaaaaaaaacaattaacatcatttattcatacctttaattagtacttatccttagtacttttcaaaatatatccaatccatatatatatattaagagaaaaaaacacaaagaaatatatgcaaattaattcactctatttttcgaattgcttgtagttgtagtgttgacttaagaaggattttattaattttagaagggctagaaagaactatatacttaattatcttaatttgaaaataattttctcaccaattaatacatcaacatttaattttctagataattgttggtagttcaatgtaaaattgagaattgctaaaagctattattatcttttttgatattatatcgttaattaatttaattaagtattaggttctatataatttaaaaaatattactaactaataatcataagacgtcaataaagatatttaataataatgagcattgttattaggtactagtggtgcctagcaccttctcgatatatcgcgttgcgattgactagcgataatccctaaaagctattatattaaattatatgggacctgatacttagttagatcaatagcgatattgacacataagaatgtgttagacactactagtgccctttagcatttctcataagagtattgctattaagcaccagtagtgcctagcaccttctcaacatgtcgcgttgcgattgactagcgatactctctaaaagttattatattaaattatatgagatctgatacttagttgaactaataataatattgacacattagaagatgctaagcgatactttttaggatttctcttctcataataatgagcattgctattgggcaccagtggtgcctaacaccttctaaatgtgtcgacttgcaattggctagtgatactctataaaaattattatattaaactatatgggacccgatacttaattacaccaatagcgatattgacacgtaggatggtgctaggcaccagtagtgccctttagtatttctccataataatacactaaatcaatatttcatttatttattatttatggggaccattttggttattggaaatggaccaaatattgtcgagctataataaatttcttttgactaaaataatttattgtttcatttattaaaattgaaaatatttatataaaaaaagaaattaatgatgaaaataatcaatagagtgcgtggcaataaatagcgagtgaggagaaatatatagttataaagacatgcattcgcttttgcatggggtttaggttttgactgttctcttcttattagtattgcacgtgtgattttacacatttgcccctcatccaataatatccaatttcatcatcgtatatatatacatatttttagtaaatacactttttttttttttaattttattatgatttatgatttatgttttattatacctttggtctttttagtttgttaaaaatagtttagtactgtaaattggtcattaattctatcagattcggtcacatagcaaacaaaataatataactatttaaacaattaatgtattagtgctacgtataattaatttgaaaaaaaatatatattttttaatttagttttaaataaatttgtactcatttattgatttttagtttagtgatattttgaaaatatatttatattttaaaatatatttttttaatttttaattttaaattatgcccataacgaggacctagacaattagttaaaaaaatcatatcattattttatttgttacatgtaataaaatttgacataaagaccaatttatataagcaactttttattattattgtttacgtttactacactctcaaaaaacttttaaaaattgatcatcattagttgatcatcataatataattttgcattattatgtaataaaaacaaaagaaagtccctttatttatatttttaatttatttcttgacagtgtcatgatgaacttattctttcataatattaattgatttgtgctacgtagtgattaattattttgctacatcattacaaaaaagtatttcttccgtccaaaaaaaaactaattatctattagaaaggtatactaaattaattcatgagttgcaaccaaagtcgaccctaaagtgaagtgagttaggcatgcgcttaggtaggatcggtcttaagcctgtgcgtaagacccacactctttgggcccaaaataaaaactaaaatgctttattagacttttatttaagtaaaattagatatattataaataataaatattcatagcttaattagttagagtgtatgatacattacacaatagtatgggttaagtcccatgacattctttttggatcctaaaatttaaatggttttagacccatatatttttagggtcggtcctcctcaaaccctgcatgctggactctaaaattgtgaaaaaaaaaatatcagtatataaataaaatattatataatatatatttgacaaaaaaaaaaaatgggttacttaaaattattgtctcaaagactagtacttaaagtttttttttttttt

SEQ ID NO: 219621 - DNA, 3475 bp, Cannabis indica
ccagttgccctcagtggtcgggatttattgggttgtgctgaaactggtagtggtaaaacagctgcatttgccattccaatgatacaggtatgtacatataatgttcgatatgattgtaccttttgttacatttgtttcttacaaagttaaggtttcagtgaagatactccattacattatatttaaaattttcttttcttttacagcattgcttggctcagtctcccgttcgtcgtggtgatgggcctctagcgctggtattagctccaactagagagcttgctcaacaaattgagaaggaggtattctagttgatttttagatggaggaaaccaactagatgtgtggtcctaattgtttttggcactccatatctatgaatgagatattagtaatatgtggtcataagtggctcaaaattataactgcagttaaactgtttggaatcatctgatgatagttgatgtttagatggagcagaccaatgagctattaatagatgtggtaataattataaataactgctggtgccactgtaattgtatagaaataattgagagaaatttctaatcttataattgcaattgaacctgtttagagtcactggtcatctaatcttatagcagcttatgtgagtagaaccgtttcaggtgtcttattgtggtagttcctattttcaatcagaattgcctacttactttttgtagattctatttgtttcagctgtaaacattctttcgccatttggatttttactgttatcgttcgtgatatatatgttcaaggcaatggtatattgtgatgtcactctgcattcaatatgtgtcaataaataataatgagtttctgttttactttacaggttaaggcttttagcaaatctctcgagtcattaaaactgcaattgttgttggtgggacaaatatatctgaccaggtgactgacttggattgattcaatttattaactgttgtttaagttcttccctgtgtggtcaaagagaatattgttggggggattatgctggtctattgtttaatgagttattaattaaatttttaattgatatctttttatttgtggtaggatgtgaacccttaaattcaatttcattttctcttttatcgtaagtctgagatacacctttctttgggtgtgtatgggaatattatttctgtcctcgagaaaaagcccatatcattatgtgtttgactgtttcccctgctggatgcctaaacagaggtctgagctacgagctggagtggacatagttgttgctactcctggacgatttatagatcatttgcagcaaggaaatagctcactttcaagagtttcatttgttgttctagatgaggctgacagaatgcttgacatggggtttgagcctcagataagagaagtaagctcctttccaaccttctgtcctttctttcatttgagtttctgtttttgttccatttttcacattgctccatcaaagcctggctattcatgctctctgtccctgtcgcccaatctctttataaatttaacaatgtatgggaattcatttagctcttggaagaaattgagagttcatcatatcatttcaggtgatgaggagtcttcctgaaaagcatcaaactttgttgtttagtgccaccatgcctgtggagattgaaacactaacacaggttaggacttctgtcttgtggttttcttctaccgaatatttcagtgtatattttttctttctttcattttcttttgggggtgggggtttaaaacacggcacttaaataattatgcgttgataaattttggttaaaacagtaataaatgcctgtaatattctttttccacgtcatgtactgtaaatttcatttctctttcattctagaggataattcttccgtaagctttctctggctgtcccaccttgaagctaggtccagatataacatttctagagttttctagtgtgagtactttaatttatttggataaatatggtccatttcttcccccaaagggtttaaacatgcaaacctttgatttgatgctgattgcagtatttcataattcatcaaggtaatcattgtattttgtttctgttatagataagttgacgtgaatatctaaatgttaattctgaggcatagccccttcgtagaagaattcatcatctattttcttcatccagttctgaaatggatttgttttgataagtttctattatgaaagtactttttttgacaattcagggagagaagtttcatattctttctgtttgctctcattgacactaatattattatttcaggaatacttatccagccctgtgcaagtgaaggtaggaaaagttagtagcccaacagcaaatgtatctcaaaatctggtgaaggttcctgacagtgagaaggtacggatcgttgagcaaaaagattagatattatgttaagtgctttcacacacgcactttttttcctttgaagaaacaaaatactaacacatttaagtattctttcctttcattgttggtgtctggggatttttcaggggctgagcaaaaaaacaaagactagagaatttgtctgaatatatattatgtagagagttgtctacacaatagcaaagcgtctttgtttcctttattcttctgtgtttaatttataatgtgatccgatgttttctaattcattttttatctaatttttggttgttgcattaaatttgtttttgcttaatttgttgtagcttgatcggcttctagctcttcttgtagaggaatcatctcatgctgaaagatctggtcatccttttcccttaactattgtctttgtggagaggaaggtattttgtacttcacagctatactgatcaatcatcattattttattacctaccgtcatttcaaacttttaaatgggtttctgggttattataacaaaatgcaattttttttttgacccgtgtgtgtatattcttgtgttgccttataagcaagcaagcatcatgttcagccacaaatatttccattttgagtgcatgcatttaactttatgttcagatgtctgcaatctgagactataattgaatcaattactaactgagaaagttctatagaacttttaggaaattaattttcactttagtagttgttctttacagtatgcattctaaagtcttacatgattttggtccttcatatagacaagatgtgatgaagttgctgaagctttggtagcacaaggtttacaagccgttgctcttcatggaggccgctcacagaatgagagagaggctgctttacgcaattttaggaatggcactactagtattttggtattgttaccttttacagaggaatgatgcgctaagttttaacatgccagatcatgatattttatgataacctttgccattgcaacattttgaatcaattaacattgtagatgtctattcagcaaatgtatatatatatataaatgta

SEQ ID NO: 219622 - DNA, 1983 bp, Cannabis indica
tatatatgtatatatttttttctaatccccgccatttttgacgcccaaaattgcagacttgaaagatttatttttgggtgagaagttgggatatcttcaatatgcaaatgaaatgacagtaagtacttacgtgattagttttttccgtagaatattttatttttgtagtttgtgtaacctgtttgtttgtaggttgagcaagatgatacttctttaagaagtgaaagcactttaactaagataagttcttttcttgaaagtgcattcctatcctcttgtgaaggaattatggtaaaatctctggatgttgatgctggatattctccatcaaagcgtgctgacacatggctcaaggttaatgctgttcacgagtattttatgctggatattccccatctaatttaggagaacactttatttattatcctttcgtaggtcaagcgagattatgttgatggactgaatgactcacttgatttagtcccgattggcgcttggcatgggaatggaagaaaggcaggatggtaatgaaatttctttgatctccatccatgcatgtctttttgttcggttttttagtagaatgttgtatatgattaggttgatatttgcagtatgttattgcatgagttcgtaagaagaataggataaaataaatgttcagagatgagttgtttgagaccatggacatagtcaatggatgtaggaaaatatgaaacggttggtgtatgcataaaaaccagtgatactgatagtcatagggatcaggtttctatagttagcacaatattgtatttggtagaacgagggggtgcacatcttagcattgcaatattttatcagtgttagcatcacttcttttaccagtgcttgaaaatggaggtataataataatactagaatattttttgaacgttttaccagtgctgatttactgatttcaatacttgtatttgttttaagtttttggttttgattttgatctgttactgtttttattatactttgtgctaatgtttaccgtggtattcctctgccacaagtgaggctttcagtacataacagcaggctttcagtacaagtagcctctttctcttttttcaaaaaaaataaaataaaagaaaaagaatatttttagattgtaaaatattttattcacatgtcaagcagtgagaaaaagacttgtccacaattttatcatctttcctcttttgttttgttttgttttttcccaagagttttgatgatttaagaagtggtcttgcaattttacaggtacagtccttttctcatggcatgttacaatcctgatactggagaatttcagagtgtttgccgtgtcatgtctgggttctctgattccttctacgcagaggtaaacgtggatgttgcatgcgaacattataataaaatgatttggataaattttctttgtacattaaatgtgattgtatacacagaagtatcacaggttcatgtgcatgaagataattggttgaaaataagaatcagatatcctcaaggcaatacaagataatttcatttcatcttcactttactctgcatactaggatactcagtgatttagtttcttgagtacatttatactcactgatgattgcactacttgtcttctattacttgctgaaatgaatacgctaaaaaactccactatacttttttctttaattgctctatgttttctcacttgctcattggcatatagattaaagaccttcagtattttaaaatagatatgtgtatagttgagtctctatttatttattgttatttcttttttcttttttttttgtttgggggttggggttaaaggtctaaagtatgttgaactgtaacaatgtagtttctcagtctgaggaaataatattgtggaccaatcgaataccattttagtgacataacacaagggaagtacatcatacatcatatcatgacatgaaaataaaggttaactttgttttt

SEQ ID NO: 219623 - DNA, 3810 bp, Cannabis indica
aaaagtatcgtgtttgagttttgttctgacattgaactttttctttggacaatggaatttgagttaacatattgtctctcatattaatatgtagcatcaacacatgacaaagatgttttcaacttctatccaaatcaaaggtattgtaatggattcgaggaagtactaactcgatatagagagattgttccccaccttcgcctggcaggtaaacttgaattctttgcatagctttcttttgatgtttagttactttgtggtaaaaaaattcttccctatttggttgcaggacctacatcttttgcgcctgtgattgagatggccatgactatagtcgagcaaagtcgtggccagtatcatgttctattgatcattgctgatggacaggttacaaacttccttaatctaatatttggtttgaaattcttccttgaaaacatgaacaatatatgattattccttgtataagtttcttttgtcatgatagtactttacaaaaactttgtgctgccttaggtaacaagaagtgtggatacaagaaatgggaaacttagctcacaagaacagaagacaattgatgcaattgtaagggcaaggtatgccactcgtggcctttacttttatacaagcacatatattagcaaaccttgtggtttcatatccattttgttttgtttggcagtgattatcccttgtcaataatcttagttggggttggagatgggccttgggatatgatgagggatttcgatgataacattccttcacgagcatttgacaattttcaggtaggaaaatttttgtagtccatatgaaattgatgataatgcagttaatcatgagattcatgactgcctttcaatatgtgcttagctgaacaacacttctttttggttgtgcatgaagtttgtgaacttcactgagattatgtcaaagaatgtaaatccaatgagaaagcaaacagactttgctctatcagctttgatggaaataccatctcaatacaaagcaacattggagctcggcatactagggtaatagccaaatcttagtactcaaagcagtttttgtttttaattttgttgcctttagtaacttgaaaattcacaccctttattattttcctatgacactcagtcgacaaagtagaaatgctcctcatagagaacctcttcctccaccattcactgctgatgtaccttctagaagcagcatacaacttaacagctcaagcagttttcaaagtactacttatgataatagggtactcatctgttttctttaatatattttgatacttttggtctttttgtttagtgatatggttaagaaaaatcatcatacattcatattgctctttactgatatacatacttattcaggtctgccccatttgtctaactaacacaaaaaacttggcctttggttgtgggcatcaggtatgccattctctcctcttattatcaatcttctttcagagactcgtgttcataaatttgagatatgtttctgtgttttgacagacttgttttgactgtggagaagtgctccaaacatgccccatttgccggagctcaatcaaaactagaataaggctctactagtcagtcagcatgatagttctcatgttatcatgacacttgaaaaggttgttaatcataggaaagacattaaaacctttgcacaccaataatgtggcaacttttattaaaagtggaatattcaagggtgtacaggacttgtttgtggcttatggctggtatgatgaaagccaatgttgatgtggtgggaggtaatatggggatgggtctagtggttcctaactctgatgaccaagtcctactctattcagtttggcacttgaaagctatttttcctcctctcttggatgaagcccatgctgtcttgtatggtcttcgtcagtgccccgccaatgttagttcactaatcttgtgatggaagctgattgtcaagtcctcatccttaagcttttgcataaatctttctgagattcttatttgagtaatatccttcaagagattttagacatatgtaatgcttttcataatgtttcctttgtgtaagtttgcagtgttgtaatgtaaatgggttgctcatgccttgttgtgactaattttatttggtagccagttttcatacctgattgaggccgatggccttctttttaaagaaatacattttgtaaataagtcttgattatgtatcgtataccgtatagtatatatatactctaaaaccttttcctttattataaaagagatcaaaaacagtaaagtttggccttgaaagatggaataaatcaagttattggcagtgtgcttaactgcttatatcttttataataataaaattaattctgtacagcataatacaatattaccggtaaacactgcctaaatagtatataatttgcttgaaatgaattcaaaacttagaaatgattcacgtctttgcatttcatatcggtaactttgacaatcaaaatcttcttacataaaatgattgcaaataccgtgcaacacaaggtccaactctgaatttagagcaacaagccaaactcattagatcctttagtgaaaatgatgttaagaaggctatgtttggaatccattccgccaagagccctggcttagatggatttgattcgggatttttcaagagcctttggaaagagattggggctcatgtttctaaggccatcctcaacttctttgaagagggttcaatgccgatatccttgaaggatgtcgtcattactttaattccaaagactcaggatcctaaagatgccagtgattatcgtccaatagtctgctgcaccactgtgtataagtgcatttcgaagatgatctgttctagactggcagaagttcttccttgtttggtgagtgacaaccagggggcctttgttaaaaatagactccttgctcataacatcatgatcttccaagatctcctcaaaggttacactagaagaaatgtttctgctaggtgcattatgaagattgacttgagcaaagcctatgatactgtagactggcattttgtggaggacattttgaatagcctttgttttccttcaagatttgttcattggttgcttgtctgcttgagaggtacgacttacttccttttactcaacggtagaattcatggctcatttaaaggagaaaaagggcttcgccaaggagatcccttatttcatctgctgtttgtgttgataatggaatatctgtcgaggcttttatctcaggtttcgagcaaaaaagggtttggctttcacccccttcgtaagaatttgagattaacgagcctctgttttactgatgacctcataattttctgtaaaggaaatatgaagtctgttgaattagttaatgatgcctttcaggaattttgccaagcgacaaggctttcagctaataagaagaaatcccatgtttattttggaggggttaaggagaaaaccaaaatcaaaatcctggctttaactcaaatggaagagggatcttttcccctcaaatatttgggtgtaaagctaagaccaactaagtggaaagcttcagattgtggtgtgattttagataagctcagtttgaagttaaatggttgggcaagtaggaacctctcctttgctggtcgtgctcagttaatccattctatgcttctcggcatttgtaatttttggatgagcctcttcatcttaccccaaaaaatagttgcagccattgataagaaatgtagagattttctttgggcaatgaagggtaataggagcaagcttcacac

SEQ ID NO: 219624 - DNA, 1781 bp, Cannabis indica
gctaatggaccttctattttgaggtatgcggacgatgccctttttttcactaaagccacgatgagggaagcggttgcactttgggaggttcttgataaatactgccaatggtcgggacaaaaaataaatgaaagcaaatctaaagttcttttgtccaagaattttgatatgagttgtggtatcaacattgcggatttcttcgggttcagcatcatggatggggaggaaacttatcttgggaaccctttattttatagtggaaaccgctcgaaagactttaatttcattgtggagaaattcaaaaatcggatggagggttggagagctaagcttctctctcaagcggccagaacggtgcttatcaaacatgtcatctcttcaaccccgatctacacaatgtctgcgtttttgctcccacaaaaaataactgacgcacttgatgcattaattagacggttttggtggactggtgatatggagggttggagaacctgtctctgttaaactggggatcattttgccaacccaagcacagtggtggcctcagaatttgaaaattccatgacatgaatttctgcttagttgcgaaattgggttgaggctggtgtctaactgtaagaccctttgggccacttttatcctgggtaagtattgtagctccaatagcttttggggtgcctctctacctcaggttgcttctctggctgtgcggggaatatggaaaactcgtgagttcttaagaaacaatagcttgtaaattgttgggaaaaaactctcatgtggatatttggaattgctattggtcttgctcagatgggaatttctttggccatgccgatatcaatcctagaagcatgtcgaacatgaccctcggggagcttagactgaactcggaggaggcctaggacatagataaggttgaacgtttttttaagcctgaggctgtcgtggctttgctaaagtgtagtttctctaagttgagggattcagatgtactggtgtggaagtcttctccatcttaaaatttctctctaaaaacagcctataatgatcttattacttccaggaattcaaatagtaagttatactcttccttatggaattcctctgtacacgaacgtttgaagctctttctgtggaaggcgagccatgaatgtatgccctttggctctaggctcagtcgtatatttggaaatgaggtgggaaaatgtcacttgtgcgattcggctgggggtgacactgctgctcatttctttactcaatgccatattactcgtaggccgtggtaatcgagtaaatggaatgtcaaaattgagaatatccctctcaacacttgtgtggaggttgttaactggatcgtgaacccgattcacttcatggatgcgactgacatgataaacggggaggaattcactatttttgctgctgtgctatactctaagctgtggttcttcagaaatgacaacttccacaacaaccgtcaatggatatttacggagatgaagacgactattgataatgattttgtaaatcagtggcgggctactagtgctaagacggcgacggagcgcagcaacactgggactcagctgaaccgctggatgctccctagaccaggaagaattagagttaatgttgattttgctaacaaatctgagattggtgtagttggtgtgtgttggaatatgttttaccaggatatagatttactaccatatatgttgtttaacatccgaaatatgaatttctaaaacaataaaaattaacacatataaagtttc

SEQ ID NO: 219625 - DNA, 4285 bp, Cannabis indica
atcttgtaagtactctcatctcttattttttctacatatatatacataattaattatatatatatgttaaacatttttatgaaagatcattatgattgatgagccttcaaataatgtaataatttctcttattattagaaacttatttgctcatgattttgctttccaaagtttctgtggatcaagttttgaagaatgaatatatgtaaatatatgtactcacagctataggattacaaatattcatatatttatatagctaatttttaataataaatttataaattaattaaaattacagcctaaattagagatctggctctggtataagcctcgggctagaacttatatagcacaagagtccaaattttttttccctccttttgaaaataaatcttattaatttttattaattttaaaaatatactacatttttcttaaataagagtttgaaaatatttttttcgtatggtccacgaaaattcaggctcagccctactaatcactccgggaaatggtactaatttctacggaaggaagcttcaaacaactcattttcacaaaggaagtcctctacaacattacatgaggtattacatatactataattataattatttacatacaaatttaattaatatatatgtatataattatagcataatttcgatatatactaaaactatatttagtttatatatattaattatctttgtggtggcagaagtgagaagatgattgctataacggcaaggagcaggaatatttccccttactttacatttccaaaatttagtaatggttcgtacaatattaaacctattccaaaataaattattaattaatatatttccatattattataaaataatatctataaattagttataaatatagttgttcatatattaattttgtaattttgtttttattcgcatgccattgaaaaatatatatatttttactattaagtttgagaattatattaagttaaattttttgttatttaaatttttatttttcgaattttgatatacactagatcatcttattttaattttgaggtcattgaaattctctccgaattattaagaatgttgaatttgatcatgaattctgtcaaattctatttaattttactatatattgtgacgattaatgttcatgtatcaaaatcgtgcctctaaattttaatatgtaccaaataattgtgcttacaaaactttaacatgtacaaaatcgtgtctcttgaatttttacccacgtcatgcgtctgttagtaaaattatatacgaaagtctttgaatctaataatctcaataacttggaggtaacttttaattgcctaaaatttgaaaagtatgatttagtacatatcaaaattcaaaaacaaaaattataattaacctaagatttatatatatacaaataaaatatatattatattacacattatattattttttattgtacaaaatattataatttgtagtattttcaaaaactactaaaaaaatatgtgtaattttaaagaaaaaatatttttttggggtttattgaaaaatacctcttttatttatcaattaaccaaatctacctctacttttatatttaattgaaacgtacctctttttatatgtactgtacctaaaatactctaacataagagagtcacattgagagtatattgagatgataggggtaaaatcagtaaagtatttaaaaaagaagtaaaaatgatagactttaaaaaagaaggtaaaaataaaagatgacaatataaaaagggtatagaatctaatttcctctatttttttggacccctagactgggtgggccttaggtgtgggcctgacccgcttagcccagactcgaccctaagaattttactaaatacatatacatataaatataatttgtattttttgagaaaatatatacatgatttgtatgtatctactatttataattgaattaaaattttacaggtcatattgagttgtatgataaatatagtgagcttcacgagtatggaactttgctgtacaaaagtttagatactggttatggtcatgaattcccaaaaaacaatcagagggtaattataattataattataattaatactactgtctttaatgatctattatatatatatatacacatatacaatattgaaatattgaagatatatttttattaggttgttgtgatatgtacaatctataatgagaagcaagaggtgaaaggaatagaagatgagaaaattacacttgttatgggcgacaaaactaatgagcttggtaaaggtaattattatttaattcatttttcacatattaataattttatcccattaatcaatttcagtaataaatttgaattttatgtatacttcaattacttatcatcacgagagatatgattattaagaaaaaaaaaaaatatataaagtaattatttgaaaattattaggatatataactaattaggatcataacataaattaaattaagaagttgacaattgttctagctttacatgtgtagctaatgtaaaattatattggtcaaatgtgtactctacacaatcacaacaatagtttctaatatgtaatttttttaattctgtaaatattgtttaattttagctatatatatatatatatttatatttatataaatttatagcaaagtgattaatatcaacattttcatgacatgcagggtttgacaaagccctacgacaaatgagagtaaatggacgagcaatatttatcattcataaggctagtaattaattattaattctcatctaatattttcttgaaatttttacacaattttaaataaatatatatcattttttacaatttttattctttttaattatgattttacaaatccttattaaaatagcaaaaatataataatgtaaaaagaacggtctgtatttttaaaaaaaaaaaaaaagcatactttaaattaatctgtaaaaatatttaaaaatttatagaactgtatttttataattttcttacttaaatataaaatattcctttttttttcctcctttcccttctttgtgattaattttactttcttaatttatgtataaagaagaaaaataacttttttgctagataaacatggcttaataataataagaatcctttttttgacaaatattaatccaaatttcaaatgaaaatatagtttcataaaaaataaaattatgcttataagaatttgtgattaacatatttttgttattaattatgtgattaatattgtgtgttatttgatcagaatctttggccaagtggaagaagaatgcccaagaccagctttggcagtagccagaagtacatagtttgtgatgtaacattacttaaaattttgggataataataataataataataattaagtatttataattccagaaaaataaaattagagtatttattaaatatagaattagagtcataatattgactctaattgaaccaagtaattaattaagagcatgtgtgtgtgagctgttattggaatctaattaattagctggtgtttgagatcaggggatttgcaatttgcataacagttgttaattgttaaactcatgaaaatgttctaataaaataatatgtactcaccactactttttttttttttgttgagaatagtactgtatattattcttctcagtgttatattgttattgttagcagaaatagatccacattaaaatgaggagcgattgctatttaattagttacaatatatatttgtaaaaaaaaaattaatatttataaatataatattaactttaatataatagttaagttaaattacaaacattttagtagatcaaaagttcaaattccattaacaataactttttttttattttttaagtttacttttgcctcagctttacaaaaaaataatacactctccctcactttaaattttgggttctggcaatgactatataacttaagaaaataagcattgttattaggtattagtaatgtcaattaccttctataggtgacgccccgcgattggttaacaatattccttaaaaatatttttttaggtttatatggacatgatacttaattacaccaatagtcgtataatacggagaagtgtgctaggcactaatagtgcattttaacaattctctaagaaaataatttttcaataatatcactaaccaatcttaaggtatcacctataaaaaaatctaagacaccactagtacctaataataataa

SEQ ID NO: 219626 - DNA, 1089 bp, Cannabis indica
ttttgcatagtttgaaatttaataacatgctcaatcatgacataccccttaagtgctctttagaaatctaaatcatatcaaacaaaagtttatgcaatggcacaagactaatttccacctatctatggtaaatggtcaattaatcatctgatctttggaacaaatattggtcaaaacgtaataatcttaagaataattatttcctccgatgaattcaagttgccatttaagctcaacaaaagacaacttattttggcaccatattttgtcattacaatcaatactatcatttaaacatgtcatttatatcttcctatgcaagtacttacttacaactaattatatgtgttgtgtcttgagttgcgataagagaatgattgattataataaacgtcgatgatgaggtggaagacacaaccttaatcaaaaatatcgtgttcaaagaaatattttaaaatattatctaatcgtcccacaaaataaaggtatcttattttaataattgcttttataattagaaatccacaaacaactttataatgtacttatcattttaattagctattttatttaaaaatatgcaaaatagtaagacaaatctaaatttcattatagaaaaaattagtcttcttcataaagaactccattttcatcattacaaattttacttcttcataatttgctaaaatatatcctcttagctaaacattttatataatataattctatcactaacacttttatatgaatctctcatttttctatcttaataaataaataatgttgtgtaacatcttttacaattatcctccgatattcacctttgtgaaataggtatttcaatcacacttcaaaacaaaatgtctaaaattttataaatagcatttaaattgttattgtatatttttttaaaatttttgttgagtagttctctttttcatcaattttattttaaaaaaacatacaatttctatgttacttccattctttttctttatttatcagaaaattgttagaatttattggggtcacaattgtatatataaaatgtgtgttggtcatcaaataaataagtcaaatttatgtggt

SEQ ID NO: 219627 - DNA, 3195 bp, Cannabis indica
gtggtcaccacgccgaggaagttgcagtccgatgagctcgccacagttcgttcttttcaggagaacacaccttctgtcgttacattaccaatctgcatccaggttcgactatgctcaactctactttgtttttttttttttttttttttcctgtgggttagagcttatttttctttgtattattcgtgtgcctgagatggttgtcgtttgatatcgatttaggcaggacgtgtttacactcgacgttttggaggttccgcagggttctgggtcgggctttgtttgggataaagatggtcacattgtgaccaactaccatgtgatccgaggtgcttctgatctcaagtgagttgggtttgaatttgttatggttgaaaattgaaatgatttcctgttgggttgagttggtgagctactattcttcgtttgttctctcctctcataagtaaggactgatatttttgcagggtcactcttgctgaccagacaacatacgatgctaaagttgttggatttgatcaagacaaagatgttgctgtgatacacgttgatgcacctagagaaaaattgagacctattccggttggcatgtctgcagatttgcttgtcggtcagaaagtctttgccattggcaatcctgtaagtaaatggttttactttctaatcccaagtggctatgtcttacgttccttaaatacattacttgttggatcaatctgcatgagtacgaccaatgattttgttattttacatggattgtccaagttaaccaacccttgtttattctgttatgtgttttggcagtttggacttgaccatactcttactactggtgttattaggtaaaagattcatggacctctgtttcatgtgtttttttttttaattcactcaactgaactgtaattgcaacggctgacctcatttggcctgttgttaagtctttttagtgaaaccttgccttcttcttttggtgtacgccatactacatcttgcccagtccaagatgactaataaaaaaaaatgttataggcaaaataacttcagagcaatctaccttttagtttctacattgaccaatacaatttgaaagaagcttagtgcaaagataaaagaagctcactttggtaattttaatatttaagatagtcaatttgaaatttgctgattggaatttaacactctctagacgtactctgaagtagaagaagaaaaagatgtaggtttcatatgaatcatggtgactttctattaaaactaatttctttataaagtgaaagagctaaattgattactccggatttgtcctttaatgaaatgcaagtaatttattataacacaaaatcttaggagaataatggagggaatacagcaaagttattcctaatacgtattacagatgtattctgtatggatgttttatttttttccttgtaaagaattatgatcctgatggattcttaaaatgcttttattagtgggcttcgtcgagaaatcagctctgcggcaacaggccgtcctattcaagatgtcatacagactgatgctgcaattaaccccggtaatagtggagggccacttttagacagttctggaagtcttatcgggattaatacagctatatattctccatccggtgcatcttctggtgtcgggttttcaattccagttgacactgtgagtagcctctacattttaaacttatgatatactgatttatgcttcagagaaactcatgcttattttggctacaaatataggtaaatggtatagttgaccaacttgtgaggtttggtaaagttacaagacctattttggggattaagtttgcaccagatcaatctgtggagcagttgggggttagtggggtgctcgttctggacgctcctgccagtggtcctgctggcaaagcggtaaatcttttttttttttttcctgtttttgggaacattggattttcttcttgagagtcctttggttaaaagttgcatgaaattgacgatgtcagtggagctgatgaagtgtgttctgcagggactaaaaccaactaaaagggatacctatggaagactcatattaggtgacatcattacatctgtgaatgggcaaaaagtatctagtggcagtgacttgtatagagttctagaccaatgtaaagtgggcgacaaggtaaagtttcatttgtgctgacttatattattctacattatcttcttctaatgatagtttcagaacaaagttggaaaaatctgtagagaatttcaattctgactccaaaagtgttttgagtgcataaatgtctttcgcattttaaaatatttcaagtcattaactagttggttgagcaagtcatactgtcaaagcatatcatgaataccacgaattataaaacaacaacagtttattcttaattcttatacaatatttgctgataccaatagcatatagtagaatatacttgcgtctttggttggtctggaaaatgagccaggcctaccctcttatgcttagaagttgttcagatttaaaaagctgctttttaatactgcatcttggtaagttggatgtgggtgtggcagtttttgttacacaagtaaattttgccggtagcatatttcatctttaaccatgctgtagactagaggtgaatggtgttgtgtggtctgagttaataaaggcattgtactctatgtatacttctttcccaaattttctcttctgttatctctttattgtcaatttttttatggcaaaaggggtaaatttaaatgattaaattgactactaaaactccaaatcttacccacatcagtcctcgttaaacttatttaggcatgtttgttggttctcagatatctgtggaggtgttgcgtggtgaccacaaggagaaaatccctgtagtactggagcctaagccagatgagtcgtaacatattgattggactggatttataatacacctcaaaaatgagagatgcattaatcctcactgaaatggttcttgtacatatttttatttatttttgtgtacatactaacactatcaagttcaattgtcattgcatgccaacattatcatgacatttgctttggaaacagcctatattttcatacctttgttagactccttatattttattgttcagtactttcgaaaaaggatagtttttaaagtgaaacgacaatcttaatttc

SEQ ID NO: 219628 - DNA, 8674 bp, Cannabis indica
aaaaaataaaaaataaaaactaacagtgtttagcatcatttcaaaacaacattcccaagcctcgtaagatttctttttcgtaatacaaccaatcaaacaattccaataatactttatagtgtcacatacaaaatcagcaactcaaccaaacatacataaacaataacaaaggcaaacaaaaaaaatgccttcatgttgaaaaaggacatacaattaagtaagaaaattaaattgtaagaggccttatcacaattacacaacgccacatactctactattacaaacttatataatacatggtaaaaactctggctaattacattagtgatgctaagatccacggagctctattgggtccccaatggcgctctatcatctggcccggctaacatgatctgccatgtaataaactcgttctgttaagaattttcgtgcaacaacaatggggagaacattgaaccagagtagtaatttataacatagtttgaaaatgcacttacattgcaatcaaaagcgaaccgcctggcaagcatgatcgcagcatttcgctctctttctgattcaaatgctaaaacgaaagaaacccctttctttgcttgccaaaacaatgcctgagctgcagcattcccacctcctctaactccacacagctaaagcataaacaaaacaggagccacttaattgaccaagaaaacgaggttatataaaaaagggaatatcaagtcttttatgaagaaatccaagctccatgaaaagatatggtaaatattcaatttaaaaggacaaactgaagatttattttcaaagaagttgtggttagatatatgtgcctcgctttggatatgatgctttattttagcaggccattattgggataaaaaaagggcaagaaacacagtagtataatatacctgcattgaactggaatagtactctttagctatcgttgtctttgctttgcacagttttatcctcatcttcccaatgtgaaatgcatggatagattccgattgatgattaactccgttcatctgagtaattaccacctgcaaaagcaagaaatcttttaaatactgcagttttatggctacatcataattctacatcattaaaaaaaagatagatagatatatatatatatatatatatatagagagagagagagataacaattccagactatttttggcttatatagaaagaagaagctagtttaacgtattaagataaatgttttcttatcattcatccaaacttgagctaaactgggccaatcaaaatttatcgaggaatattgtgaaaacttaatagtctttaaaaattagaaaattgaatcattttctgtaccactatgatcaccacaattgcatgtgcaaatggaaaagaaaatgtacagggtaaatcttgagctttttaagacaggcagtaaaatattgatactgacaccaaaattcagaaagattgataacatacattaaactcaacgtcatgtttccgaacaagtgcctccacatagctacccaaaccagcagctgcacaagtttccacacattacataactagtttgatatgatcaataaaaaaattatataaatgaaataaaatggaaaatatctgaaatctaagctaaataatcagagaatgaagatgaatgtcagaccaggatcaactggaccggtggttgtcagtgttattgtctggccttctgcaacaatatcaacttgcaagactcgtccaacatcaaagggctcaggggcatagattgatttggttgctcctgaaatagaaaagaaaaatgattaaaagaagaatagcagctaaacattgcgaacttgatatcacaggaacatatattggtaaccagtttgatatctcaagaaaagatatataactacacacgtgggccctgacaaaaaaaaactacatacgttggtggtcagatctaatcatacactctagttctctaaagaccaacaatcaagtataccattagcagaaaacattgtggctgacaatctctagcacataaaaattaaaaacccaaatgttggaatattgttggaggtgatcagtcagaaagtgacacacttgagtgaatcttctttcgtgtttggttaattaattgcttttgagactagtgaacattgcaccaatcttgctttctttcccatttttaagaatcatattgaaccccaacttcagcaacatattcatttttccttctcaattaacaacccaacacacaaacgggagtgttaggagattacataagctttatgctgggcctgttaataagcgctaaatatagttcttctggaacgtgaagcaacacaaagttgccaaaacaaactacttatttttcccctatacaagtctagagaagtttttataagaaatagttcgaataatacggtgttcatttaaatcagtttaccgccatacctgatataagctcctttttgcagccttcagatgatatacggtaccattgaattgaacatctagatagatctggagcattatcagagcagggttgaatttgcaaataagaacctaaagcttcagtaccatctatttcatacaactgattattgttctccatgcctctcttgctcattgccagctgaaagaattgttcagatagagaaggcaatgcaattaattaatgcactagcaacattaatacacaaaatagtacactcttaagagtagtctgagtgaagacatcatgttattctcaagaaaaaaaatccagttatatcctttgtcatgccaaaccacagtgtgttacacattataagcagtctcatcgacgtaaatatttttttaaaattttatttcttcaactagtcccattaccttttttacttgccaatcacaacacctgagtttttctatttatactcatcactcaggtaactttcaagaatagaaaaaataagtacatttggaccacaaactttaattaagcctatttaaggagctactaagaggaatggtaacaaaattttagacaaataaattatggacactccatatattacccatacttcacattgttaaaatttcaatgttttcctaacaggagctgcagaaaagggtttgtggataaatattaacattttatttaaggaagaattagcacactgaccccacttgttatcactacctctaccactaatattattgcctatggtactcttacagaaaattaacttcccgaaaagcttatcataggttctttctctccattggaacaatagggccgttatgctcattactaagcttgttgaatagatgaaatataaccaatgttatccttgcgagacatacctctttctgaagccgaagataatgcttagacttctctgtgagctgtttcctcaaagcttgaagttcatgttccatgtccataacctacaaattgatgattaattcataagtaccaacaaaactctgtttataaaaggacaaattagttactaccctgaaatttttgcacagagtaggatattattaaaaaattgtttcaccacactgccttgttgaagtcatatgccgaaattgttttcatttttttcccctaaaacacaaccatgccttgaatctaacgcaaacaggaaaaataagtttgtagtcctcatagatgaccaaacaccttaactaaattttctcttttaagctctgtttggaaaaacataatatcacagttgtttgggtgggaaacaaaaacctagtttagccaaattacagtccccaataaatcgctaaaaaatcttatagtttatgctatttattattgggatggtcacaagttgaagttggtaagaacttgagtgtgaggctaaccttcagctgtaaataaattagcatacttcaattgatataagcaaaataccattgaacacaattgcaatcaatcaatcaaatgtccaagaaaagttcagaaaaatacaaaaaacaaaatcaagaccacaatcaatcgaacacacaccttgcttggttgatgcagcatttttattcgtctagcctcttgaacctccttcatcaactcctccaagtcctaacagtcctcatacaaatgtactttgtcagaaaacatttaaatactctgataaaaaaagagcatgttcatcaagaaataaaaaaagtaatcagaatgcttgactgcaaatttctccaaaactgaagactaccaacctagattccaagataacataaactgtaagataataccaactgttgtagtatcatataaaattgtatgaaatatcaatacatgagcataagaatatcaaaataattcattgatcatattttacaaaaaatcctacggaaattaagaaactgcgataagaaaacagaaaactaaaatgaacacaagatgtaaacctgcttccctgatgcccgagacattcgctcttggtcttgaagagcctcttctactctttgtactgctgctctggcagcttcaatttcagcacgagcaaatgctcgttcctcatcaacaagtcttctagcatcttctgaagcctacaaaatgataatacatattcaatttcagataatataaccaatgactaaagaggagtttgtagaccagtgtaccatgaagaattgtttgctggaagcgatcatcaaattaaggttataactaatactttaagtcagctacatgaagcctctttttctaatggtatggagaaacataaggttacttcttgcaaatatttgtttttagagcttcatgtgaatttatcttttcttacctttgaaccttttaaatttttggaacttgcaaggcttgtgttcccactaaaattctagttatcactagtacataatttgctgatatttctgatgtggttgcaacaagtttggtaattactgaatggtataaaataaaaacctagttcccaacgggcaaagatgaatttgatgactgaaaagtaagaaatgctatcaagtaatacttccatgtctcaattcacttaatacacgacgcaaccacaaacgtttaatcacaaaaccactaatctctcatcaggtgagacactgacactgaattcattcatccatgacaccagaaactcttgttaccccagtttagcagtcaagaaatcataattacctgtttaagaaaatttgctagcttcttcacctctgtcttttcttgcattaactctccttctctttgagtcaactgaactgctaaggcctccacctggagatgacagatgatattccattttatttaaagatgggacgatagcaaatgacataacgaaaatgttcaaacaaacagtattaactcaatcacaccggaggtgagaagatacatataatttatagccgataaactgaagaagtatgtatcaaatatgaaaatgaaaacgtattacaaacataggaaagtgaaatacatacaaagataactccaaaagctatccataaaattaattacttaattgaaacttcaagaggtaattagttgactcccagactgagcacaagatactgataaagtgacgttattatgagttaacaggtgctgtgagatgagaagactggtacatgtgctctacgattaatacaagttgaggttttgcttacaaaaaaaaaagtaacaaatttcttggatcttatatgttttctttttctatttcaaaattcattagctcctatgttgtactatcaatctttcaagttgatactcctttaggttataccattttgtttgcaaatttatttcagcatttcaatatcacgcaaaataaataacccttctaacccacttaaaaagtgagaaatgtaataaacttgcttaatagaaaaatccagaatagacagactaaccatcgatattgcttcttctacatcatccttgtttctaccagccacgcgtccttttaaggattccagtgcatccctaagctttttcaaaaggacatgcttttccaaggaagctgcctctctaagtcttgcctgcatcatttcacccaaaaaaataaaattttaaatttgcgtccaacatactaaagttgtgaagtctctcatgatattaactttcacaacctcaaaaggacaaaaaacaactaaggaaagaagaaaaagttagtataaagttaaaaatctttcaatgcattcacatttttgaaaatacacattgcttcataacaaaaaagtctttcaacatattcacacaacgaaaaaacggagtatgaaataaaaagacattaactttttacgtgtttgagaataataacaaaaacaatcttatattcatagtgaaaaaagtctttatcttacttcataacaaaacaatctttcaacagagcaaatcacttatcatctagtggtaaggaaaaactcccttttaaattttactttcagattattataataacaaacaccatatgaacattaatcctcaattcttttataccaagttaccaacaaaacaaaacaaaacactggtgtgtaaaattttgaatcgcagtttataaaatttataaacttaggaaaattgtataaaagattggtaaagcaatttaacctcttcagacaatttagcagcagcagccaaacccttctcaaatttactggcgaggtcacgaactgaaaggcgcttctgctgctccaacagctgcgcagtctcacgtgcaaccacctctttcattgataatactttgggatcatccttcaactcaacaatctgattgttcgatccaatcttataattaggaaaacgactcgaagcaaatatcacatcggctgaaactgctggaacagcctctttttgcatcgtatcaccaaaatctctgcttactctcgtctatttttttttttgtttgaaccagttactctgtcaggcaccgcaaactaaaacccattcaaaataaataaattagacaaatattttgaaaaaaaaggaaagaaaatcatcatgttgatttcaataactactaaatttgagctttaacaacccatactgaagattgttaaaccgaaaaaaaaaataatgatgataacaaaaactgaaatcaactaactaaaaagatgaagcataccataaaacacaatgagaagctaaaaccctagctcaaaactatgatgtagaacaaagagaaaaatgaggacaaaaaaggaaacttggaacttacagatcatggaaaaatggataaagtaataataataattaactcaaaatggacaatggagattctgtgatcagattcaactcaaccactccttacaaataaaattgtgtcttcgtttctctcttatcctaaaattgatcgaacttgtttttaaatttgagagagagagaagtttgctgagacaaaagatgggttttgagtttgctttttgaaaagtagatagagaagaatgaaaaaggaaagaaagccgctcactgttgttacctgtgactatttttccttaataataattaataaaaaaaaaggcaaagaaatcgtttaccgaatatggaatgaacgaacggttaggattaaatgttaagggcatgggatgtcatgcttatgctttaaacttcaaactctcttggcgggtcccacttcggcccccgccttttttattttattgttttataaatataaataaagactccaaagaaaaatattaaatattatatttagattgaattagtgtgatatagaattaggccgaccaaaatatgtgtaacataaaattgaaaagaataataaattataataaataaatgaatgtgtggtgtcatgtaataagtgttgtttagttgttactcttattttaatgtttttttgaatgaatgtgatagactgttaaggaggcataaatataatcgacccaccgtttaccgaattgataaggacagggtctaatgacgaaattaccctcgtagtagttagttgactttggacaatagagttgttatgaagaatgatcgaattggaaattaaatatcacactatcccaaatccaaactagtgcaatccaattaattgcgaaatcatagattaatgctcaatctaattcaatttcctgctctcacaggtcaaactttctatatttatttattttaggaaccaaatatcatgcgtgattattaagcagaataaatataatgtttgtgtgtctattttattttcggtaattctagcatccactatataaaaacaaagaaatcttttctaacgttttttttttaagaaatagtcgagcttggaaatgttcagcaacattaaggagccaataatatatggaaattgatcaatacctggaaagaaaaattattctcaattggaggtaaagaagtgtttttgaaagcagttgtttagtaaataccaatatatgcgatgagttgttttaaacttccgaaaacgttttgtaactaacttgagtctatgatggctaacttttggtggggttcaaataaaaatggcaacaagattcattggaagaattagaatctcctttgcaagtcaaaatttgaaggaagtatggggtttagatcatttattcacttcaaccaagctctcttggctaagcaagcttggcgaattttcgaaatgccaaattctttactaagccgattactccagcacaaatacttttctcaatccacttttttggatgttaatcttggtcattcaccttctctaacttggcaagg

SEQ ID NO: 219629 - DNA, 2449 bp, Cannabis indica
  modified_base (49)..(49): a, c, t, g, unknown or other
acgtgattaattatcttatatttttttcttttttaaaaaaaaaaagttntatggcatagatagttggttagtattaaaatgagtaatttgatacgttgtttgactttccgtccaccttgattgacatcaggtcacgtcattggaatctgatccaatcatgtgtatcacttctctttttttagatgttgaatcccaacgtggaacattgtggccgttgcaccgtacctcatccaccgtactaggatcttttgcattaacttaatggagcactaccatataaatagtaaagctaactttccatttcatgtgggattgtgggtactcatatacttggctacgaagtctcttttatgatcccacgtgcttgcatgtgaacaagtcactaggtgatcctgaatttcattattttattttaatatttggataaattttggcagaagtaataaaaatatttgtgtatatattttcgtgtaagttcggatggagttactttgaaattaataataagcacttttcaaatatagtgctcaaaagagaaaaagggtatagtcttttcaaatggagttgaaactatgtattagtgattgcgtgtgtattatttttgtcaatagtcaaatgtatggtatgttactagggaaggaaataggaaatttaatttagctatatatatgtgaaatttctatttatatatgtatattatcgtactttagcttgaaatgaacatggaaatttttttatttatttactctataagaaattgacattgaattagcctacaaagagatccggtatatgaggattctttgtttgaaccctaatttaaatatatgtaccccacttttattgacaataaagaggctagctattaattcgatataataatttatttggtggcgtttatttttattttttaaaaaataaagaaaaaaaaattataattggggcatagtggggcagctgcactacgtaacatcaataatgctggaaaaccttgaattgataagtagagtgcaaccttttaaaaatatatgcatcaatattttgaatatctataattaataaataaaaagtctttagaaaataaaagaaaaatagaaatttgagttgtagacaaaataagcattatttgaatatagtttaggacaaatgagcgatggcttgggtttaaaagaagacaaacaaggtattcggctgttttggtactgtgtcttgtgtcacatttatatgtttatatatgaatgtgtgacccattttccttatcttgaggttgactatacctggcccagctagttttgtaaataccctagagatattttgtatcgaaaatggaaatttatatatgtaaatacaatgcaattaatgtggaaaagcaaagcttgataggaccagtaacccaagtggtcttgcaagagtcaatggttataattcccaaattttataaaggatataatatgttaatattataatatatgctatctcttacttctaaatatatatcgtttcagatcacaattattatagcaggtgattttgtttaatattaaaattagagtactgtgagatgtaagtatgtggccaattggccataagttggactgaaaaaacataaactattcttatccaattaattagatttaatcattcaaattaacaattaattaattagttggatttagaaatggtctaattaactttatcatcactaataagctgttgtataaaattagtacaggacttttagcatcccaaaacaaacgatcattattgggattgtcgtttagttttattattattagaaatatgattgaacataacgttatcatagattgtttgcttaaaaaactcttttgagattaaaagtagttgtgctgggcaggttattcaaattaatattttatgatcaaaaggaaagatattattatattcagcatgctgagaaaaagcaaaataaattgatatttagatatgtatggtaatggagttcgcatgtcactataaatttatgagatataaataggtcagtgaaacattgttaaaaaaattgttaaattaccaaaagatatttgttcaaatagagaattgccataaagataaggataattataccacacactaaattttttaacttttttacttttatactgtagggcgaatttttttttgaaaatactgtgtaagttttatgctgtgtcttgtgttaagttaagtttccactagtgttctactgatgttttttagttgttctactgttgtttttagttgttttgttttgtgttctattggtgttttataaaaatacaatatttttgaaaagatttccgtgtgtggtaatatttttagaaaaattaacctaaattccagtatttttataagttttcttaaagatatattcaagggttaagttgaaaaatacgacttttttttagttaattaatcaaatttacctcta

SEQ ID NO: 219630 - DNA, 4282 bp, Cannabis indica
tttcaaaaggttagtaaaacttttatctaatgggtaaatattatttttggactctgtgttttgcaaaagttatcgattgaactctctgttttgaaaataaatcttgtatttttcaaaatggtaaaaataggatcctcagtttaattttcgatgacttttttttaaaatataacaaacttgaagacaattactaacacgaacggatacaaaaaatgtaaacagttttgtcataacacttatagatcgaattatttatctagcttaggctgatgaacccaaacatcatgattctataagtaaatactattgatccactcaattcatagtatatcatgttttattgtgatagtccacaagtattcggcctttgttccacttagttccctccctaaaacctaaacctctaaattgctttggtttgcaaaccaaatcccctcaggctagatggaatttgcttgagtttcctcttttcccccaaaggaagttcttgcacagtttatctacctccttaatcaaactctgaggaagcataaaaatgctcatacaatagctcttgatgccaatcaagattgaattgataaacctaagttcttcctgcataagtaagatgtatgcttgcccaagtagcaagtttcttcctgatcttattgattataacttcacagtcaggaaacttccatttggttggtctcgacaaggccaacccggacccggccaacctgcccagaattgacctgaccaacttgaaaattttaagaaatctattcaatgcgggttggtcaggttcaacccattggacctttcgggcgagtttcgagtttgatttttaggtgactgagtttcaggttgaacccaaacctgcccgtgaacccaaatatactcttacctaaactttaattataatacaagtttacattttacattgaacctcaatataagaatataaattattcctaaaaaaaattatataatacaatatacattatatgaccatacgtcttcaatgtgttgaaagtttatatgtatatatatatatatatatatattttcattaaatagtgatttaattatatgtttatataattaggtaatgtttaagtttatttatatgtttatatataagtaggtaatgacatacataattaggtgagtagtaaaaaaaaagttgaactcggtcaacaacccgcccgacccgaacacgtcaacatgccaacccaccaacctgcaacatgtgaacggacgggttcgggttcgtactttttttacccaaaaacccgtaaacctgaaaccccgccaacctaaaatacctaataaacccacccaatgttcaaacctaatggttactcccaagtatttcattggaaatgagcattatccagttctactgtctccatgaatttcctctttttttaatcttcgattctagacaaatatacattcaactttgctttattttcattcagacccgagcattcagtaaaaatcttgaatgccttgtaacacatccactaattccaccttccccttgcaatacactatgagatcatctacaaaatatgttagttttatggtactaattcaggtacgcagtagaagaattatatatctgattattattgtaccatagtcccaatgatctttagatgtatatatattaaatttaaaaaataaattacataaaagaaataaatacatctggatgcctatcaaggtatccttgattgttttcgtaagttgtatccttttgggttgattaaaaactcacattgtagtcttatagattgatccaccacacacaaggaatagtgtgggctattaggataaagtgtatatgaagttcttattggttttatggtactaaatcaggtacacaactgaagatttgtataaccgattatcattgtaccatagccaaggatctccagatgtataaacattaaatcaaaacataaattgcatgaaagaaatatatgtatacatgttgatgactattagggtatcctcaaaacttcttgtaagttagaacaaataattctcacaccataatcttccaaatcgatgcaccacacacaaggagtagtttgggctactaggataaagtgtataatttgttcttgttaaattctcaacacatgaacaagaacagtttgagagagaaaaacaatttcccttttctccctgtaattcaaaaattatagtgtgaaaaactttttctggtttcttaaattaggcttatatttatagtagttaattctatattaattaaatcatatttaattatttaaataaatatctataaccaaatttggttattgatatttttgatgagagaatttctcaactaactttgagagaatctctcaaccaacttgaaatatctttaaccactttttaaatacaaatatttatctaattaaattaaataattaattaattaaccaaaaaagataaaaaccaatagggataccctactatagggtaggcgcctaccttgtctcaattaagacaagaatggtgtcttttgtcctgataacttttaccttaccaattattgtcttgaaaaatattgtcttaacaacttttgttttttttctctatttaattaatttaaaaattatttatttattacaaaaataaataattactatttttccagttcaaatcaactctttattcctacccttgataatgtttcaaggtggtgattcggggaccatggaactataattctaagctccaataaagtgtattatttattgagtctcatgaactaaataatcatgtttattaatatcatgattacaccactataatatgaaattaaactcttagtaattatagaattatattttttgagttttactgcattgtctattgatataatcaattccagttattagccctccttgtgtcagttcgtaattacttttagtcaaattactgttttagccttctaattacttctttatcctttagaactattaatttactagtggaagtataatttagatttcatctaaacttgtgcgcaactttttagtactagaattaacacataaagggagccaacactcaattcgttaggaaagttaagatttcataattgtagatcatgttcccaaccatccatattattagattcccaaaatagaagttgtaagaatcatcttctctaagaaactttaacgagtgaatcaaaagaaactaataacatgaacaagagttcatgattactcaagatttaggtcaatctactatcgatcattgttataatatgaattaggtctttatagtaaacggtaagtttgataaagacaactttatttatatcagtctttgtcatatataatttctattatatacaacaccttcacttagatatcatcgtacatcagtaatctgaaccgagattacttgcaccgaagaacgggcatcagtaaaccgtgctaacaaccattgattaaatgttcctaaacttttatatgttactgctattttattcatggctaagtgatcttagttctttgcacagctacaagtcacaacctcatatatgaataaggaatattccaatatttatatataaattattcaatattaaatattaataatttaacattcatgcatatatcaaaatattcaactattatttaataattaagaatatatttacaagcttttcagggcaataaccctaacaatctcccacttgcccttaaagtaaattgggcatctccctaaattccatattagtcatatgacccataaaagatttcgttggtagagtctttgtgaatgaatctaccagattatgttccggtgtagtctttaagatcgtcacatcacctctctctactatatttcttagtagatgatactttctctcaatgtgcttgcctctcttgttgcttcttgagtccttggagttggtcaccgctccactattgtcacagtagagtaccagtggtttttctacttctggaactacttcctaatcaatgtaaaatttcttcaaccaaaccacttccttagttgcttcacaagcggctatatattcggcttccatggttgaatctgcaatactggtttgcttaatacttctccagactatagctcctccaccaagagtaaatgatgacctagatgtcgactttcgactatctttgtctgattcaaaattaggatcagtatatccagtttgatttaactgtccactagaatatacaagcatgagatctcttgatctccaaagatacttgagaatgtgctttacagctatcca

SEQ ID NO: 219631 - DNA, 2766 bp, Cannabis indica
aattaggatttttgcctcccgaatttgtaccaaattatgccctttaatttttaaggtcgttaaaaataccccttgaactattgagattgttggatttaagatgaatgaaagttcaggggacatgatttagtacatataaaaattcgagggacataatttaatagatatcaaaatctggggagcatagtttagtacataaacaatcattgaaatagtaaattgaatgaaattagacaaaaatccttaaatctaacaatctcaatagttcaggagaatttttaacggccaaaaaaattaaggggacatgatttgatacatgttaaagtttaggggcaaaatatttaagaatggatgatggaatacaagaagatcatgactgagtatttatacgtgtatatcttcattttacttttcagtatataagaaagaaaagtggggaaaaataaaagactttaattccggggtataataataaaataataatgtttggtaagtataggctggcttagcttatttgtagtgtagctttatcctataaatattacatataccaccaccatttgtcatccataacaaaattacttccaaagtgtcaattcaattcttctcacaatgttgtcaatattcatgagaaaacacatgatgagagctcaagtaaaacgaacaaaccttttctctttctctttctaattttttctgcatcaacattttcttcccccccaaaaataactattccatgatattttttttgatctactaaaatgggttcagcttagattaatttgtttgatgatgatggtattgtgcaggtgattaaagctgttatagttgcagttcttgtacttaacatagtaaatggagttgagtgtagtagaagaagaggaaaaggaagtaaaaaaggaaggaatgtagagacttcgttagagtacagtgccataagctgtagagctcatactgcagtgcttactgattttggtggagttggagatggaaaaacatccaacactaaggcctttcaagatgccattaacaatctcactcaatatgcatccaacggtggagctcagctctttgtccctcctggtaaatggttgactggcagtttcagcctcattagtcatttcactctttatctccacaaggatgctgttcttcttgcttctcaggtctctctctctcaacattttaattctttaattttaaaaagagaatattatgtaaatcgttgtacttgtcaagtgtgtttaaattttagggaatagaaatgcatttaagagttgtttgattgttctttatttgaacattatgcttactttggttttgttgtgttggaagaaaattaactactactgaaggaaaaaacttgtagaactggaaattgtctttttccccctctggaaaattacactttttttttaaagattttacaaagaagaatacttaggctataactagtactttatatttaatttctttgttttttcttctcatctatgagaatctttttgaaaaaagaaagttcatgcttttaaatattaaacatttcgaatataatttgttcaaggttaggggatcaagagtcaaatatttggaaccgtttaagacatttcaaatactattttgactaaaaataagaagagggataaattttattgatttttttagtcatgaaaataaattatattaagtgttatttagctaaaaatgaagtttttttttttcgtaatactaatggttctattgtaaaaactaaaaaggtgacacgtcacaggattaggcattagaaaacagatatgagggaacggttcattgacaatgtgaaataaaatccaagaatttgttgtaccaaaacattcaagggatctttttggtgagatcgtttgaatctaaagacgaaaagggcactgttgtaagaaaaagaaaataaaaagatgaaaagacagagactgaaacagggatatataataaagtccctacattatatcaccacctaacatatgttgtagcgggtcaacaacattcattgatttgatttggttggtttaggatataaatgagtaagtagtctaagtcacacttcaattttcattagtgtcggaatcaattaaaactcattaatcaacttggttcactaattaagcagacttttattattatagactcttttcataccctttattgtataacattacaagactagttttttttcttacatttaatgatgaattgatttgatttggtataggacataagtgagtggcctgtcctcaaagcattgccatcgtacggccgaggaagagacgctgctggtggacgcttcgccagtctcatatttggaacaaacctcactgatgttgttgtaacaggtacagtacacttatccccaacaacactacttagtgaccataacataatataatggcttaactgtttacaccactgagtaaaagaattcatgacatgtaaaaatagactatgtgtcttattgttattggtacaattaaatattagattctgtataattattttatgtaataatttttataaaatatggctaactatttactgggtgtcaagtactcaaagtcaaattttaaacacttaagcattgtttttgtaaaattttaacctgaaatgaattgaattttcaggggaaaatgggacaattgacggccagggttcattttggtggcagcagtttcacaagggcaagctcaagtatacaaggccttacctgattgaacttatgtatactgaaaatattca

SEQ ID NO: 219632 - DNA, 3833 bp, Cannabis indica
agctttattcatttttccagttttctgaatttctccatattttataaacaacttataaaaaatattataaaacaataccatctttttccttacactattgggctgggtccactgatttttctctttccaagacccatttgagttagcaggcttgtagcgacaaacgtatttaaagacccaatgcatttggcaggcttggcccaagtattaaaaggttcataataataccataaaatctaataaatttactaatgttactatattattaaatatcagtcttgacaaaaattatattatttatatatattaaattaaatattacacacagtaacatttgaaggagaagaaaaattttgttataattaagaatatattataaggcaaggggaccaagaaacctcttatctagcagaacaaatgagatgaagagaatgagaatgggcgataactgcaatgttctttttatttgttttatgaatttacttatattttttttactaggttgtccaccattgttttcagagtttatttcagttatatatttctatacattatagcctaaataccatgaatggtaccattggaccactagttatggcagtactctttttgaaaaaccaagaaattgtttctttgttccattctttaatttctatttttatacatatagaaagatatttatataatatgatctttggtacacatattcatgcatcaagggtggtaccaaaatgagtttattctcatatcaagtggcctatatatatgcttttattatccaggtcattttgcaggttttgtcatcaacaaaagaaaaatcaaagtgttttgttttgttttgtggataaagtttaagattgtgtaatcaattgactaaacatgttaaagtgttttgaatgtgacaaaagacaattccaatgttttgatttgaatgttctaagtccaaaaagagtgttttaagactttgactagaaaatgtttctcattacaaacaatggtcaatagttttggaactttgaatatgttatcatcaataacattgctatttctaaattctaagcttatctcttcaccttgtttttgttcttcatagagaattttcaaattgtatttatttcttcaaaattgagggttactttagatttttattattttactattggagtcaacacagtattaattagttgaaagttaagatatacatgcactttatttatttttatttgggatcttttgtgatttttgtaagggtagaaactattttggattatatattttgtaaaaattattagttagattttatattttgttaaatgacaatttaaattttgtgttttttaaaaatatactatttagatcccaaacttaatttttgtcaatatttttttaatataactaacgtgaagctaatttctagcacaaatatgtacaaaaattgtacattttgtcataatacttctatagtaagttattattaaattttaatttgacaaaatttaaaaaatacagaatattattatttaataaaataaatggtgtaatagtatttttttttaataattgttttataaaaagagaatctacctttgttaattagtattgaataatattataaatttaaaaagcattagagaaccatgttatggaagaatacatatacacatatatttattaaaatcagatctagaatattattaaagaaatataaaagaagatagtggatagaaagatagatatgtacacaaactctaatgccaaattaattatatgattttgaagcttataaaactctttcaattatcaaattaggctctttaattaggcctttctgtctcccaaactctagcaaaatgactgacagcaaatcaataaaactacttttagtccgaccaagacaaagacttggcttttgacttttgtcacaaaaaatctcattaaatttacaaaataattaaataaataaaaaatacccattaatcacaaaaccatattcactattctccaataatatccaattccttgtacactttagaaatattataataatattaattcacattgtaacataattatgatcaagcaaactagtattggtgatatttgtttttttacaactaatgcaggccaattgagcactttatatcataaccccatttgcattcttaggttgaaaaatatgcccaaatattattatactatatgactcttttctcagccatgttccccttccatttatttcaataaataaataataataaaaaaaaagctaaaatacacttgtgagtagtgagcaccacttaaaaatattattaattcaataataattatgataaaataagtgctataacaatggttaaaaaaaatctatacactattctttcaaatctcaccttagcacaacttagattcatgatatatattttttattatcatttctcccatatggaaacattattaaaaactttttaagcaaatgaaaaaattgtaataataatattcttagtcacctttaagatacattcaattattttcaagccttcctcacatgaaatattaatagttgaaatgaaatggataaggtcgaaataatggtcacaaatagtctagtattattaatatctgctaccacaaaaatcagtattacaccaatttttaataatattattttttaaaagaagaagaagaagagaactttattttgtcccttagtggtaaataaatatagatatagatttattttttttgggtaaaagataatagatttgatttaatgtaagaaagatatttgaatcacagaaattagcagggttgttctgagtttatgaatgtcagattccagaaaagcttcactcaaagatgacccatatgtaatcgaaatgtaactatcactctttatacttatacttctacatcactcgtattttaacttaccacaacaaacgttcctatctttgtacatatctaaaaaacttaccaattccaaaattcaaattatataattacaatattctcccaacaatttcttttatatcaaaaaataaaaataaaaacttgtttgttttcttttgcagccagaacaaaaaaacaatgcaataaaatttgcactaattaattaacaagaatagttacttaaaagttactaaccagtcgttgttgttgttgttgatgttgttcctatatatttatatatgagaataataaacattacaaagaaaaggaaataagaaaaagaaaattcaatttggtcaatgatttttagaccaaataaaaagctcctaaaaaaaaaaacgaaaacccaattgattaaaatgatattaataataattaaaatggaaaatcaacctccaaattcgctcttctccaaaccttcaacaaaagcagctagagttctcatggttttgagttgacactgtaaggccattatatacccagcagtttcatcgaacagtttgtctacaccaagtgattcaccaccaggaacgatcctctgtaatgccttaatcttcctctccacttcttctttctcactctctcctcctgcttcttcttcttcttctttctcacaactagtactggtagaaccagaaccggtattcctcctcctcttcacattttctcggttgagaaactctgtggactttcttcggattctgctgcgctgacccaaatgggataaagagttgtttatggtggcattgcccatctggggtttttgatgggtggtgtttctaatggcgatttgggtttcgttatcttccatgggagaacaaaaagagaaactgtaacagagtgagagaaaagagagaatgaaatgaaaatgatgaagaagagag

SEQ ID NO: 219633 - DNA, 1792 bp, Cannabis indica
taaagtgtaaaaaattaaaacatgaaaaaatttcgctacaaataatcctattatttatatataaatatatataaacaagtacaaagggtacccgtaccaataagcctcatgggacctaaatacctaacaccaccaaacaataattcctataatttgatattcgctctaacatattcgatacttaatcacactaataattaagcatcaaaaccacttaaaaggttaggagactttaaccttttgcccctctaaattatttttcttacaatttaccccccaatatttagtttctccttctgagaacgttagtaataacacatatcacgtcatgtaatagtgttagataccattaatactttttaataatatttgttttattgtgcatggaactttaggcatgcactacaatttcattgcacatatattaatatttgtttttatcatccaatccaatagtcacaataatatattgcagaagagggcctcacctcagtcttttacttttgggccattttcagatagtaatggtgacaagagaatccttagtaatgatgaatacagccgctctcaaaccaagaaataaagaaaaataaagtatattctttaccactttctttataaaaaatacaaaaaaatcaaatggctccaatccaaatagtagaaaagaagaacaaaaatttacaataccaacactcaaaattcttactttttctttttcaccccattttttaaatgattatctaatagtccacttcctccaaattcatcatcaccatttttctctttcatgttttctttcttaaaaacacatataaagatagaaccttaccatactctaataatctcccaaaagtgttctcaaactaagtgccttaacttaacatttaaagtaaagggttttaagggtttaacttcatttttgctttggagagagttatggaaggtactttcatgattgtaagtctaaaattttcattttttagagacttaaacaagattagtgttaatgtatatttggttgtgctaatttgttgatttttttttttttttggttttgatagtagtgagtagttgtgctaccaaatgtagctcttttaataggttgaagagcataatagaggaaaatagtactcctacaagttgggaaggagtgatttccacttgtgcaaagccaccagaaactccaactgaatccatggagtttttggcaagatcatggagtgtttcagctgttgaactctccaaagctctctctacttcacatcagaatcctctcacctcaacaacaaactcttcttctgaagctcatggtggtgatcatgatcatccaagctctactatggctttgaaggaatctgtaagacttttttaaactttagtttagagaatactaacatcttgctagtaaaaaggtatgtttggaagttggattttagtcgggaaagaaaaaagtaagaaaaatgtagaaaagaaaattgttttttccataccaaacatgaaaagttcttttttccgcctatatttttcttacttttttattttcccaccaaaatttaacttccaaacgtaacgttaagtgttgttgttgttgttatagataatatgtgtatgttctctacttttatgttcaaaagggtatcttttatgtttgcttgttttgttatttttggccatgattgataagattattgttgcagatatttcagcaactgtcaagtgagaatagccctccaatttcaccaagagccagtgatgaaatgaaggcaagttatatatctatctctctctctct

SEQ ID NO: 219634 - DNA, 1577 bp, Cannabis indica
tatagtaatatgtgaaatttacacaaattattatttttagtaaattttttttacttttactatttttttttataattttacaatgttctaaaaactaataccgaaacaataaaaaaaactatatgaaagtaataagaaaacaatttctaaataatatataaataataaaaaatcaacaataaaagtttttttttttaaatacatatataatttatgtatttttgaaatctctatattaatattaggtcttaacagctttcaaaaattatttttgagttttgcaaacttcaaaaatatttttgttggttagataattaacttttgactctcaaacactctttatattttcagaaagaatttattgaaactaaaagtaaaaaaagtgtctttttcaagagtctaaaaaaataaaaaacaaattttcgtatttacataaattttccatcataatattgattgatcacaaaaatttagagccgtcctatagcactagaggaacaaagataatgatcaaattattactttttatttgcaatttgaagtaactaattaataatttggtattttgacctataattacaaataatatatattataataattattgtgatcgataattacggataaaagagtcttcatagtccatactatatccctccaacataataaaaataatgataaatcaaagaaaaaataaataagtaaaaataaattattgttgatgattatacctactaaacttgctagttgaatctttttggactaaaagcaatatgggtaggtgattgtttttcataagtagaccaactcatcatttccatttattttttcaatccttttttaacctttccatttttgtttgtttcttcttcattagtagtaaatttggaattaataaaaatattgttggttcattttttatatctcatttcatttcatgaccaaccaataaatgtatgacaaatcatattactttgttatttcatatttttaaaattttattatctatttttttagaaataattatttttgtcctcaatttttgacatgtattaaatcgtgctacttgaatttttaaagttattaaaaattctttccgaactttacaagtcgttaaaatattttttttttgaactattgagattgttaaatttaagatcttttgtctaattttattaataaaagtctgaagtaaatgaaaatctaagggagacgatttaatacatgtcaaagttcgaaaaacatgatttgatacatatataaaaattcgcgaggacacgattgagtacgtggacaatcaccacgttagtaaaattgaacaaaatcgaataagagtcattgaatataacaatctcaataatttttttaaaaaaattaacaacttaaaaaatttaaaatgcatagtttagtaaatatcaaaattctcgagcaaaaattctaattatccaaatttccttaaatcgatatctccttttatgaatggaccaatattaatatatgccacaaaaattatattatttttaaagtcttattgtctaaatttttaagaacatctaattctcttaaaatgacctata

SEQ ID NO: 219635 - DNA, 2883 bp, Cannabis indica
tcctactacttttttatgatcatgatcatcatgatcatcatcaccacacatccttaactcttaacactacaatcttcaatcagcacaaactcaacgtccataaatacaagtacgtatatatatagatatacattataatatttattatgtacatgtgtatacatatatttatttttttttttttttggttatattaaggttttttactagtacatggaacgtgggtggagtggaaccacatgaagaattgaatttggatgattggattgacccttcttgtgacatctatgttttcgggtatatatataaattaattattactacaaaaaattaatttacttataatttaatggaattaattattaattaataatttatgattatatatataggtttcaagaaattgtgcctctaaaagcatcaaacgtgcttggatattcagagagtagtagaatagcaaggaaatggaacaatttgattagacaagctttgaacaagaaaatcaataataaatatcattacaataataataatccaatgagtagagagagtagttttgatgaaataaaaagtttccaatgtatcataagtaaagaaatggttgggattttggtatctgtttgggtacgaaccactcttcgtccctttattaaacaccaaagtgtctcatgtgttggctgtggcatcatgggctgcctaggcaataaggtacgtaattaatatattaattattaattaattaatttcataattataattaatttatattaattaattatactcatgatttatatgtgtagggagcagtgtcagtgagatttcagatacatgaaacaagtttatgcattgtgtgtagtcatttggcttctgggggtagacaaggagatgaaaaatatagaaattcaaatgtttcagaagttttatcaagaacaacttttcctagaggccctttacttgatttgccacagaagattctcgaccatgagtatgttattaataattattattattttgtcaattaatatttaatattccctcttgtttttcatcactatagatcaagaaaataacgacagcaccaaaaaaaattaatagatatattattattattggttaatttaaagataggtgtaattaaagtaatattattggctgtttaattccatatatatttgaatttgtcgtgagaagggccgccataaatataaaattattatttttagtgtatttttattcaattggacggtttaaaattttaaacagccaataaaaaacaatggattgttgattaaaaccctgaaaagactcactactttactggtatttttatatgttgttttaaaattattaaagtgatttttttcaaatataaaaattaaaataattgccctttccaaaaaaaaagaaatggagaatatttgccaagttgatttcataaattataataaatatcgtaaacatgaagcctgcagataagttaattaattaaataaagataaatttatttatttggagtgaaaggaaattattggagcaagatataaaacgatatgaatttgacttggattgataaggttgcaatttataatatattgtttatatttattggggataaattgaaaataatttttttttttgtatactttaataaaaaatactctcaaattatatttcattaaaatgtacttatttttataagtgatttgcccaatatatcttcaccttccacttaagtctagtacataatttataatagaatatcataggtatataatataatttcctccatttttattatcatgatcattttggcaatatataaatttatcttgctggtattggggaaagtgagctgggtttaaaaattaaattaaataaataaatgagaaaagttctttctttctttttttttttttctttttacaaaggaataaatgagaaaagttagatgagatctaaatagagatcaaatcaatatactatatagtatatatgtttgagccataaaagggagctagctagcttagttataacttatattagataatagatagttgccaaagtttcaaaatcaaatcatgcctgcctagatgagccttcccttctcttattaattattcccacattttcatattttagattcttaaaataaaaacaaaagcttatgttagtgttatgtatattattatatgtctcccatacgacaaaatataatagaatatactataataatgaaagtgatatatatatatatttacaatagtaacgtgggttgtttatttatttgtttcaatatccaaaaccaaaacctcgtatataatagagaatactaaataacacaacgttattttactatgattaatgcctaaatatctaacttgtaatcttacaataaaatgtttaaaatacaatttgtgattatttatgattatttttttaattagaattccatccatttattattgaggataataaggtattattaaaataggtaagatatacaactatttatattttctatataatatacatgaatagagattttatacatttttttaatatgtataataatatattattatctatgataaattgctaatcaatctttaaacttttaagtagcattctataatcacactacaatttatgtatattaatctattgttgttagatggtaacttaaagaaagtagaccctataatttcacactcaaattatattagtcatactagaatagcattcttataagcaactctaaagtattatttgctattagaatgcaataaattattaaggtctttaaaaaaaatagtatttctaaaataatgtatatattttttaaaattattttttaaaaaaaaatgaatgctgtggtggtggacc

SEQ ID NO: 219636 - DNA, 3623 bp, Cannabis indica
attatctgaactgatgttgtttcttacttgactggactctgcaattcatgcatctttggtagtgaagtgggattttttttaatatttctagtctctgttgatgaaaatctgagagagctcaaacaaattaaattaggttgacagaagattgatgatggtgatatatttttttgcttaaattgttgctgaattgttgtattcattagtggtaatggtggtttggctttactgaagaacaactatgattttgggagaattttgctatgctttgattcatttatttggaaatttctgatgccatttgagaagtataatcacaagattgagatttttgagtgatttaaattgtgggtagaggttgatcttcagttggtagaagtgatgccattgtaggtgttggattgattttgaggaactttagaggaggagttgtgtggttgtattgaactaatttctgaaatggcttcgatagtggaatgtgcttggacagttgaagtttttcttttttatttttccagtgttttcccaactctcattgaatacaatatgtcctggtctttctttctgttaagaacattatttgtttgttaaaatgcctcagagagatttatgaaatattagatttcttgtttcttggtgctgagatttataacttgctttgtatgctagcccgtagttcctttgtctaagttttaaaaactaaagtaacatatttgtatttatgttgggaattcgggtttgtttgtgtttatgcaatcattggctttgaatgctattgcagctattaatactttgacatgtacagactacatagctaacatcttattgagtttctcgggtgttttctttcttatgttacaggcatgcacttctaagtgtgaaggcataaatggttaattttcagatggatgaactattgaggaatcaaatctttgctatccatgcaattgctgctgcagggtcagtgacattaggcaatgctctaacttaccctcttgatactgccaaagtcattattcaggtcggttgtccaacttttgttattgatcctacctatttattattcaccattcaataatcactgattctattttttattttcttgaaaagaaccatagagttatctatttcaatcttaatttgtaagtttaaatgttgaacaacaggtcggctctagttctggcaaaccattgacgaccactaaggctttagaaagagtcaaatatttatctggctattcaggttattccccataaaatccttgcattttttttattttttgtttccccaattaccattgactatcttaattatcctgtgaaaggtgaaagtcttcaatgtgagttatattagtaagtttgaatggtttgtaggcttgtgaggatgcatattcttgaagttgttaatatgagttatatgtttccccataaaattcatatatttatttttccttccaaataacttcggtaacattaaaaggtggaaagtttgcaatatgagctatgatttgtgagataatacgaagaccaaattacattaaatatcaataattgctgtttcagttttgtgatgatcatgcttgctatatctagtttttaatccatgcctcaatgcactttttctaaatgtttaaagttgatgagcgcaatggcacgatttttaagttaactatgaggcatgtcattgtatggtggataccttggtcgcgttattagtgcttctgcatcctattagttttactgttttattaatttctgtatatatctttttatattataaaattcagatgaaaatgttcaaacaatattttgttctgcgatgaatgcttgcaggtttgtataatggttttggctggttagcattgggaagaagtttaggcgttggagctcgttttggaacctatgaaatcatggccgcttatttcaaaggtttttattgccttttctgttatttatttcccaaagcaatataccacataccccttattaataattgattgttttaccaacaaaacgagaactggtattcttattgaaacgactttgtgacacttttctgatgttgtcaatattatttttcagatggtcgacaatacaattatttatctttatccgaggcctttagggctggaatggtagctggagtagccgaatcagtcataaccactccttttgagctcgtaaaacttcgtgcacaggttgcttcagcttctcctccttcaaactactcctctatgagaaaaaagcgagttgttacaccacttatcgaaaaactactacgtggatatactccagacagaaaggcattaaattattctgttgacctcttatcaacactgagaaacaaacatacaaacatgacgggtgctttgcaagcctatccttggatgatgaccgggtctgggagtccaccatcagtcaccaatgttaggagactacctgatattatatctttggaaggatggagttcattattgagaggtctaaggccaggtctagttcgggattctatttatggtgcgtcttctttacagcttgggaattcctacaccaagcaatggtggattggaaggcaattggaatgaatccagtacccaggttctcttctcaatgtttgttacctttttgctacaaattttacaattgattgataatagccacttacaaagtgatctatattgcttttgttgttacaactgaaattgatttacatacttttcaaaagctttgataaaaacttatagggtgtgtttgtaagcaacaactgtataattactaggtggtgtaattacattctattttaaaatacaatgtgtgtttggatgtcaagtagtaattgcatatgaatttttattttcctatttggcaaatgagttagtaattacataatttaatactattaattatctcatgggagtcataagaattgaaaagtgtaattgagacctatcaattacctccaattacatggttatcgtgtaattactcaggttgaacaaacatgcaaaacctcgtaattacttcgaattacactcaattccaattacacagtggttttccaaacgcttgcgtttgttcactgctcttgtatatgttatggatcttgctgtgtactatagtcgttatctgtgccaattttaatatgttggtcttctattaaagtgggctttttatggtttctcagtatggatgaagacattccactatctcctttagctgttacctttgcagctggattatctggttcagttgctgctgctgcttcacattgtttcgacactgccaagtcccggtccttatgtactgtagtacctaaggtactcccaacctttacaaaactattattcttactttctatctaaacttctattggcattctgttttactatttagtgtgatgcttttcgcagtttgtctccttggaaagaaagtttctcaaatggaaacgacccgggagtaggtttgagagatggacggggattcaccctgcagatagaaaagtcctgtttaatggcattggattgcggatggctcgatgtggaatctcatcgtttgtgctcgttggaagttatttcttgatagttgatcaattggtttcgagaggaaatagactgacatagtaat

SEQ ID NO: 219637 - DNA, 1866 bp, Cannabis indica
gtgcctaatctagtagggcgttacagtacaagttcaatactttcatattgaatcacaatgatttctctcagttgaaatatggctagagatcaatttaatctttaagactggaaccaggataaatttggtgtcatcttctccttataattctgttttatgattttgtgttcttattgtgtttgatcatttgctgttgttgtattttgtatgcattgtttcatattgcagatctgaattttgagtcttggtgttgattgtttaattttcaataaaattaattaataaaatattggcatggtttcatgttactttgatcctaaagagtaattattgctacactttgtgaaaaacacactcaagcactcacactatatataaggctttgtgaaagagatttggaatttataagatatattagaacttactataataaaataagatgaacataattagttaagacttcgaatagtcaaataaatttcttaccaaaaaggcaaaaagaaagatcaaagaatggtcaaatatattaaaaaaaattataatattaatatttttaagatgcgtatgcctttaattacaatactcaataatatatataattccattgatggtatatacattttttttaacgaataaggtatatatatgttaattgtttaaaacagtaaaattaattaaaagtcttatatatgatttccttctaacatagtaacttcatttaaattaagtatttttaatacaaaatggcttcaaagattagcgttatgatcatcaatatacaaagaaaaaaaaattaagaatgtctaattacataataacctactcaatttactgatcgtctcatataacgtaaactaatattttcttttcacatgtaacgtaaattaatattgtgtaaagaagaaaacaaatttttacaatcattaataattaaccggaaaacaaaagatatttattgactacgaatggtttgaacaacgagcatgctatcaattctccacttccttccaacttttgctcttaatccaactaagagtcttttttgttcccaaagtttcaataaccttcactgcataaatacttctactatatttcactttaatttttagcaatctgcttgaagaatttcgagccacaatcccgaagccataaagtattttatctctcgaaaagagtaccattatcttgattaattgtagtatatatgatttagttttgaatgagaatatatatttttcaatagtcaataatactatattataagtatctccctaaatcatatatatttagcatactatgagatcacaagggttttcttcatttgtactacattctactacgttatgattttgctaattaattaaatatattaattaacaaattaataaagtcctttttttttaatttaaataaaattaataaaaattttaagcttgaatgaaacattccatctctaaatattgatgaccattatatattagttcttttataaacataaaagaattgttatatatataataataatttaattatactatattcctatggaatataaaaaagttggtaacacattgaatatgatcaatttttattttataattaaaacatttgggcaaaagcatatatgtatgtatctaggtatttactaattatttagtaaaaaataatcattttgtaattattatattcataaatatgagaaaataaggttacaaaatatgtaataatgtggatttttgcatgatattataagatattttatttatttatttgaaaaggtgaagatatcttgcaacgtattctatactatacaattaatattttatcaatacacattaattggtcaatttaatattattgaaaaat

SEQ ID NO: 219638 - DNA, 1951 bp, Cannabis indica
aaaagaatacatattgaattagataaacactttatttattaggtatgattatttatttatttatttattaagtatgagtattctatttttttatttctagtacctagatcttaattttttttttagggtatcttaatttttttatttgacaatttatattatagttatagtagatattcttttgagatattctaaataaattactgttatccatgtttctagataggtgacatatatacttctaagacctaagattaagtaaagcatgcccatttgtagacccaattacactagtgggtcagcccacaacgaagttagactatggctctccgagtctaattgtaatcccattccattcacgataaagccagaccttcttggtcttggaagagcgactcacccaaaaaatggaagactcagcgaagcatacctgaatacccctcacagggtaatctaagaagggacattgaagagacatccagagacattcgggtgtcatcctacgtggcacccaactaacactgaatcctacaatatgaggggtttgtcccttgtgccaagcctgagaaatacgcacaacacctaaagggacatgttttttgtccaacacccattattctgatggataatgtacaattggtggcgcatgccacttgtcactgttatgtggtccccttctgtatagatgattgttgtctcatgtattgggcctcacctgaaataattatttttatttttaaaataatttattttttatttttaattaatttttttaatttttaaataattatttatatggactaataaaattgtgccacatgtatactatgtacacgtggatgatacaacatggcagttaaaaggtaaaaatcaatggaaatggcaaattgctaacataatatagttttggagattttgcctccaaaaaataaattttaagagttaattgctagcgaagtgaaaatattggagattatgtcgcaatttactttaatgtattttaccctatgagtggacttagttaatgcaactaaaccctagcgggtctgaatttacccatgaacccgactctagcccataaatattacttcatccctttgtacaaaaggttcgagagggttctaaaactttggcaagagaaattcttgtgtaaagatatttcacagcctttgagcttaataatattgactcgtggactaaggctcattaacaccccaatcaaataaaaatcgttgttgcatcatcttttaattattcttctttaagcttaatttattttttattcaacttccgaaaattcctgtaaacatttacagtatcaaaagtaaaatttaaaataattagtgacacgtacataaaataaaataggtacgagtgctactttttttttttttttgtataaaatcacaccaaacatagcttttatcttaataacaaaattctattatggggttataagtgtaatataaaccccataaatcacttacacataagagatgtggtacaaaactcacacaatatttttttaataaaattacaccaaataaagcttcatttaattactaatttcatagggagcgctacttattatttgaatcctattttcagcactataagttatttacaatttttttaaaaaaaaaattaagcaagatactttagtaactaactattattaaaaaagcataagaaaatcatcaaccatttcccccaaacattacccccttttaatttattatttactaacttttatacctcttactttattttatttaccaaaatatcacttgcatacataattctcttaatgataatgtcattgttcttacatcatattcaaccaacctatattttcaatttcttctttttttttcattttcagctacacatttaaacttccctacatggtttaaagaaaaaatatctccaaaaaaactgaaatctcatgatc

SEQ ID NO: 219639 - DNA, 3947 bp, Cannabis indica
aagggtacagagattaacaacagtttctcagttccatagtgaatttccagagagaatggagtaggggtttgtgggaaaaggaagcattgagttctggtatagtagaccgaaaatcagtgagtgggtttgttaagcacaaaatggcataatggattggataaaatgatatgcttaatttgggctgttaagatttcggaaattgctaaggaaaagagataagcacattagtaaaacaaacgaaatgaaggacttaccgagactaggaaaccaaattaataataattaaattatgctaagaaaaagagataagcatattattaataataataattaattagatactaccaatcattttaaagcaataaattacattaaaaattattatattaaattatgtgaaatctcgcttctattagacggcttaagagcagtttatctttttttttttttaaagaaacaaagttcattaacaacaagagcaaaagatgggaatcacaggggaaattccctccccaagaacaatcctgcctttggactagcaattctagtgctcctagcaagaccatccgcaaaacgagtttaaacaacgaggaacaaaggagaacttacacacatcgaaattcttgactaagtctaaaatgaaaagagaaacatccataattaaccaatccggaaggattctcccttaaaaaaaatgttaattactattagtgagtccgagaaaagatgaatagaggtccaagccgaactaacagcccacaccaatgccatttgtaccgctctcgcttcagcctccaaaggagaagacgctttagcctgggcagtcatataggcaagcaaattcatttaaggaggatgatattttgagaagaattttatctaaatccacagcacctccttttaatcttactaaatttctttgctgccatatagccaacgcaacacaaccaaaataaagaagaatctgagactttttgacgtttgaaaacgtaatacaaatagcttctatcacctgaatcaacgaagcacaaggaatagattcaagacgacagggaaacataccagaaaatcagattgctttgaccacagaccattctttaaacaaatgcagacaactctcttcagcagacccacacaagaaacattccttctccgataagaaggggagtcttgatttcgttgggagggcctctgttaaatctctggttcatagctgatctgaatcataaaaccagatgaaagaaaatgcagaacaaagaataaagaaaggatgaagaacagagagaaaggcagagaaagaaggagaagaaagaatgatctcaatccattaacaaagatcaatatacaacttatatacaactagttacagattaactaacccaactaacatgacagctggaactgatcataaccaactaacagaaacaggtaaacaagaacaaacaactgaaatgtaactgacacaataacaacctataacagattgctctaacacctcccctcaaactcataattggatggttcaattttgagtttgtgtctgaaatcagtgaacctttggctagaaattgctttggttagcccatctacaagttggtcataagctgcaacatgcttgatttgcaccattttgttttgaaccttttctcgaacaaagtacaaatcaagttctatgtgttttgttcgggcatgcaaaactggattctgtgtgagcattattgtactcagattatcacaccatattgtaggagcttgaggaagctcaatgtgaagttctgagaacaaataatgcagccaagttaactctcctgtgacatttgcaacactacgatactcggcttctgtgcttgaccgagatactgtctgctgcttcttgcttttccaggcaatgaggttagatccaaggaaaatagcaaaaccagaagttgatttcctgtcatctggatccgaggcccaatcggcatcacagaaggcaaccaagtcacacaaggctggtttggtaagatgaaggccatagttcattgtgccactaatgtaccttagtattcttttaaccgcttgccaatgagtagttagaggattttgcatgaactggcacaccttgttcacactgaaggataactcaggtcgagtgatagttaggtactgtaaaagcaccaaactatagagcgatcaaaattgaaacatccgcaaaagggttccccctggtgagctgataagcgaatactactgaccattggagaagggagaaggtttggcaaccaaacatctgagcccttataagcagatcctttgcatactttgcttgacaaagatgcatgccagtgttggtgtgattaacctcaatgccaagaaaataggatagaactcctaaatccttaagagaaaactgcttgttgaggttggaaatcagtgtagtcacagctgtaggatcactccctgttatcaaaatgtcatctacatacacaagcacaagtgtagtagagtgactagagtgatgaatgaacaaggaatgatctgattttgaggaaacaaacccaaaggacagtaagcattattgaagcttgtcaaaccaagcccttggagcttgcttaaggccatatagtgctttgttcaatttacacaccaagtgttcttgaccaggaacctcaaaaccaggtggttgagtcatgtatacctcctcttgaagttctccatttagaaaagcattattcacatcaagttgcctgacactccacccttgcattaaagctaaggtgagaaccacccttattgtaactggtttcacaactggactaaaggtctctgtaaaatcaaatcctgcttgctggtgaaaccctttagctacaagtcttgccttgtgctttaataaacttccatctgcattctccttgattttataaacccatttgcatcctatggcttgtctcccttcaggaagcttcacaagaacccatgttttgtttcgggcaagagccagaatttcatctcccattgcattgttccaatgttcttgttgaagagcctccttgagtgttgctggttctctcatagctaagtagatttttggcttgaatacaccagatttggatctggttgtcaccaagtgtttgttgtattttcctggtgcattaagacaaccagcaacaagaggaatagaagcaggagatgagcatcgaggaagagaaatgggatcaagagatgtaccagcagcttgagatgaagaacttgagctgtgcactgcaggagcagctgtggggatcagttcaggtgctgcttgtgtaacagcatcgacagcagcttctggtgcaactgctgcatcatctattccagcacctgtttgtgtgtctgcaacaagatcagcaggctggcttgaacaccagcggttagatggaacatgacagggtgtatttgcaggcatattattgtcaaatgaagcatattggtcatgaggagtaatggaaggaacattatttaactcaacagcagtagcagatgcagatgttggttcagtagcagcaggagcaactaagtcagttgctgaatagtgagttttatggtgaatgcacacaggtattaaggcagagacatatgagggaatggaatgatgactcttaggaacttgctgatcctgaacttgctcataagggaaagaaaattcatcaaaaatgacatcacgagagatgtataaccttcccttagagtcaaggcacttgtaacctttgtgattcaaactatatcccaaaaaagtgcagggtgcagacctaaactccaatttatgtttgttgtaaggtctaatattgggataacatttgcatccaaaggtcctaaaggtagtgtaatcaggtttagtgtgaaataatgtttccaaaggagaacattgttgcagcaagggagtaggaagtctgttgtgtaaataaacaacagtcctaaaagcttcatcccaa

SEQ ID NO: 219640 - DNA, 2249 bp, Cannabis indica
gtaattctagtgagaaataaaaactcaaagtagacgtagctctattaccatcaaccatagggagaatactactacaaatttcttgtgtctctctatttatttatttaaacttatttttcctctcgccaatctagagagcgagtgtttgctagatttttgcgtcaacattttagtactttcattgagagcgacaactcgagatcacaatcaagattgttgcaacaagatcaacaagtgttgaaagaagcaccacaataggttaactcacttgagacgccaattattggagaaagtgatgggacgatacatgtatcctagtttccaggtggaggccttgaaaccagttcctctgctcgtcctccaaggctaccaacaactactggtactgatgctagcaaccaaattccacatggtgagccacacgtggagttagaagaccctgaagaagtcaatcctcaggatgaagaacttaccctattaatggctaacttacattaacaatggggacagtctcttgacaagaagcctgaattgttccaatagaatggttgagaagcctatagatccaacaatagaatggctccttcgagagtaacttccactagagctagaaacaacccttgtgtgccaactagtcacgtgtgaacaagtgctcaagggaaaacccttaatctgggaggtacttctaccattcctaatagtcgtactgctcagcgtgtagcaagcatggaggatccccaaagaggtgcgaactataagcgagcatccgaaaggacttagactcaggagcaaaaatcaatgggccctccacatgatgtattatggtcacctatttgggaaatggtctacgagtgaacatctaaatggactcagacttgggaatgtggacctactgggctaccacctgccactaattagatcaaccaagagcttgctcaaagaaattcaaataatatagaaaactgatctcctctgcgggattctcctcacaggtccaatgattctaggccccgtaaccctttaaaggggaagggagctgcagtcaaccttaggggaggtactcggaagctctaccatcgatactgaagagtatgagttttggagggtgagaaacaatgaaccactccatactcagaagtatttccgtgatgaaagaggtgttttgtgtaggtatttcgctcgcggtcctaatggctagtagtatgagtaagtaatagatagaaaaacttgattatggttaagtaaagcatattttattaaaggataaataccattttagaccctatgtttagcaaaagttctcaattggaccctctgttttgctaaatgataaaatgaaccatgtattttctaaaagggtaaaaataagacactaggcttaatttttgacgattttgttctcaataaaaccaacttgaagacaatttctaacacaaacagatactgaaaatgtaaacagttttatcatgacacatttagatcggattattattaaattttattttgacaaaaaatcagttcaggatcctttttgtactattttaaaaaatacagagtctattttatcatttaacataaaagatggttcaattagtaatttttgtaaaatgcagtccaaaatagtatttaccctttattaaatatggaataatatgtgtaagggaatatatgggtaagattataatcttactagagtaattatgtgataattagagattttaatataaattgacaaataaatataatttatttattatggaaattttattggaatatgtgagtgttatgtatgctatttatgaaataaaatattttcaagtttaacaactatgaaatccgattggttggccataaatgtgatggtggtaatagtttgtgatttagttatactgggatgttctattgggtatttgtattgtcagggtatctcaaggtaattggatatggtcaatttacccctagccttagagattatttgggaagtaagtaacggtaaaatagttatttcacataagtttatttaatcttttatttttaatggaattattctagagtattatgtgctaattagataagtcaaaaaattaggaatagttagattcatttttcacaaaataagataaacaaaaaaaccttctactctcactcaatcttaaaaaatttctagagtattattaataaatcttaaaaattaaaataagagattaaaattcaaaataacgataaaatatataaattagaaaaaaaaa

SEQ ID NO: 219641 - DNA, 3946 bp, Cannabis indica
gaaagtcgaatttatttcgtattatttatttttttagttttattttttggtttaaatttacggttttagttgctccaatagtttctatatgagttgttatatgaattttgattacaatttaatttgctttgttgattaatatgtgagtttctatatgaatttccataaaaatataaaaaataattattttgaagtagaaaaaataaaaaataaaaaatacctaataattaaagttactagctatttagtaaattaacaacacaataaaaaaaaaatttagtggaaaggatgatatttattatatatatatatatttatacttagtggtaattaactaatggggcaaactattgaggaactggatatattaatgatatttagtattttataaatgtgtcaccttacaattggttagagatatactttgaaagtcattatattaaattatatacaatacttaattgcactaataataatattgatgtataagatactagagtaatacattactggtaccttttagcatttctctaaattaagcattattataggacactaaagtacatatcactactatgacatgatgtcgtataattggctaagagttataatctatattaaattaagataaatgaaatctaatattaaattgagtgatattatatttattaattcttaaccctctagtatttatttaaatagtaaacactattcaattattattataataaatatcatattttactagggtgttaagaaccatgatgccctttagcatattttatataaatatagtattaatctaattaaggagttgagcttgttaatttactgaacaatatttagtgtataggagttattagacaattgattatataatttgtttttataattttaattttggttgtgtgtttaaccgagagatatcctaattagatattattagtaatattctataatttattaattaaataaataaactggtcaaaaatctagttatatataatttcatatttatatatcctcctttattatctttctcatattttgtcactaaccgagttgacttattttcaatcatcactactgataatataggtgagaaagatatttaatagaataattttattaggaaaagaaaattaagaagaagtgtagagaagggttaattaattaagaatgcaatgttttatgtcatagtcacactcacactatcttgtctccatagatttaggataacgccaacatagtggcacctagatataaagaaagataattgattgacttaagttgtctcacacaataccgatatgttgttttattataattagttgacggtttcttatattatttatttaattaaataatatagaatcaaatattaaaatgtattgataacagtatgtcattttttatggtatttgatactataaagtgtaccttactattttcctttatgagatggtaataattgttaattttttattacaatcttttaattaatttttgtgttcgggaatatatactaaaattccttttttcaaatatataaataaataaataaatcatggcagagttcgttatatgttacaatgttattcttgcaaatattttaaaatttttaaatagtttatagtgtcgaaaatatgtttgaaattttttaaacacgtatagtaaattagaatatcaaaaactctattggtactgtatattattcgaattttttaaaattagatgatattttaactacatataaaaaaaattcaacatatattttagttgtcaaaaggaatgcaatgttatttagttatttttttttagaaaaaaaaaacaaatgtacgagaagggcaacggctgatagggaagatagctgctctcggaaaaattatttaaggaatataggacaagtgcaaatctttctttgattgcatcaaaaagagctcaaacgaattatggggagcatagcaaatggaggcgtttgagcatctcaaaaatattttaatctctctaccagtcttgtcgacacccatacctaatgaatagctcttcatgtatttagcaatcataagcaatatagctaatcaatgttgtgctcttcagagaagagcaacaaaagtaaaaagctgatattgatgtatgtcgtttaacaaatttaataatttttttaattatgtattactaattacttctgtataacggtaaatacaggtcaaacccgtaagggatcttttgaatttattatttaaaaattagtaacaagaatgaaaacggggtccggagtttggatttggatgtcctggatccaggggtaatcaggttcgggttcgggtctaggtttgggtctaggtttggggtctggattcgagtccgagtccggattcagtacaggtctaggttttggtctagctagggttcaagtccgtatttgtgtttagggttcgagttccagatccgggtctatgtcctgggtctaggcccaagtccgaggttctggtctgggatccaggtttgattctaggttcagggtctggggctgggaccaggttcgaggttcaggtttgggtcgatgtgcagatctgggttgaggtccaagttcgggatccgggttcaggtccgagtttgggatatgggtcctaagtctgggatagggtcgggtctggagtacggggtccaggatccgagctctaggtccgggcccaggttcagatccacgttcaaggtatgggtccgggtttgagaatcgggctagggttaggggtcgaggttgaccccatactctatctaaatattataatacaagctaatacaaattatttattatgtactaaatagtacgagtcacatataaataaatgtatggtcgtaataattaatataatataatgttttattcaaatataaaatgttatttgttatttgatacaaaatgacaattatatgacctattaaacgaacccaaaatgaaaaactcattacgagcatagggatgagacatttggtcggtgtctcataagttattctgaaagatcggacaacctaagatgagccgcatatgaagagaaatcacttgatcgagctatattttcatgacttattaaattcattgtatagtatagtcacttgtacaaaatatgactgaaagaatttgtttagtataccgtattatagtattatatgatattatattgtattatattatattatattagtattattatattatttagcataatactatatttgatattgacttgtattaataagttgtgtaaagttataatatattttcaataaactcgacttcaacaccaatttcaggtctaggggtttgggtcccgggtctgcgtcaggtccaggtccaggtccgcatccgagtccgggtctaggatttggggtcccatgtctgaggtctggggtctggggtcttgttcgggtcctgcctttgggtcttgttcgagttcgggtctagggttcgggatcccgtgtccaggtcccgggttcgcgttaagtctgaattcaggcccgagtcccttgtcccggtctggatttgggtctatagaaggccatcacagtcatgacaagcatctccctggttacaaatgagattgatagcttgctggcagtccgactccacttggaatctctgtagccttcttgtaatcccaatttggaggccttcgcggatagcgtgcaactcagcaatcaatgggaaagactcttgcttaatcttctttgcaacaacatatgcaacctcaccattaccatttcggaccactattcccaacccggaggtaccatgccccactttaacacttgcattaacatttatatatatttttttcaagtagtggagtttggggcttgccattctgctctactcctttgctgtgagacacatttcttatgtaaagcccgcttagttaatttggaaattagcagttgttta

SEQ ID NO: 219642 - DNA, 3676 bp, Cannabis indica
aaaaatttgtaatctttaaaaataaaatacattcaaaatcttaaaaagaccaaaatcttaaatgaaactagcaatacgtggctcggcacgtacattcacctagtatataattatatgttgtagttatttataattttagaaaaaaaaaattataaatattatatttaaataaatataatgtatatgattataaaataaaaattaaaataaacaattctagctagatgaagattttatgaaacataccattatattataacataagaatgtatagtaaataattttcgaatcctatataatatgtacaaattaaagaaaaagaaaagaaaagtagttaaatggtgagattgtaataataataatgatttgttttagtaggcagtggtagatatatgtaaaattatttgttggttatattttatgtcaaatcagctttgataatcagtgacgtaaaatataaaagggactagtagtagtatagctagcttagaggtgtgtttattattaataagaaataatatcattaatatatatattaagattaatataagtccattcaaaaaaaaaaaaaaagattaatatataagttaattaatttgaacgtgtcaaaataatgtggttggttagatatcaagtcacacccttttgccttgctacgtatgcttaactaacatttactcttgttttggaaattaagaaccgaaagggaaaactaatttgaggaaagaacaaaaataatgaaggtagctaacaaacataaaagaaataaaatattctaattaataataagtttggactaattgtattttaactaaattaaaaaaattagggcttctcgtttcaaaatttatagctatacatgtatttttttcttcggctagaggcccactggctttctctaagtataggtacagtttggtcgaagttgcgttttgctattgcaattcaattttttctactgcgattagtcttgtctctataacttagttttgagtgttttagtattgtctctgtgatataattttgagtgttttagtcttgtatgtgtgacataattttgttttgttatgtttcgttgttggttcttgtttgttcttcgatgactccatcaaactgttgttagtaattgagaatagcaagttttttatgacagaagaggttgttagtagtgcaattatgtaccttgcacaataattgagcgctcaaactacaaggttgaatgaagctgtaacagttttttctgtcgtgtcttttacatcacattttattttaagttttattgtcaaatgatttaagaattattagacagctaaatatttagctcatcttttttttttaattttaattatagtcgtgtctttaatgggagagatgtcccaattaaattacagactattattttaattaattgctattaacaaaattgcatgatttattaaaaataataataaatttaaagtttctattgactgctatgtataacgacttctctccaaatctttttgtacatatacgtactaataacatgcatggccttgatattatttttgttataataatacaactaaatcaaattctcaaggttttgtttggtacacaatcttctatagtatagtattatattgtattgtgttcgattatattatattgtgatagattgtattgtactatattgtattggtattggcttatattataagtgtgtaaaattatattatataaccataaactcgaccccaatcccgactctggatcagatcccatctctagtactcctagcccacaaacctcgacctcggaccccatccctaaaccttgacctcatacccggactcggaccccatgcccagatcctaatcccagttcagggtctaggtccagagttgggcaggtcttaggtctaggattcgggttcgagtacaagtttagggtcgagtttggggctagggccaaggtcaggtttggggtcatattaggtgtccagggtcggtacctggcctagattcgtggtcagggcagtgttcggagtccaggcccaaagtctatgtccggggttgatgcccaaatctgggtttagggccgagtcagggtccagggcccggggtctggtctccataaattttttctaaatatcataatacatttatggtcgtattaaataacatgattcacattatattaaaatttatgatcgtaataattattacaatacaaaattttatctaaacataatgttcatttaatacaatgtgactcatatggtctaccaaacaagccgacatatatattttgagcaaataatttgtgacttaaacaaatagtaacaaaataatatcagggcacgacattttattgtggtgccaaaagactctccttaagcacgaatttttaggcacgacagaataagcacgaattggcgtatcagaaagtacattggcatggaaaataaggcttgtaggcacgatttttgtcatgctagtggaccttttttcttgtagtggggactgctaagttggccatatcatatatttaaatatctaattaataacatgaaaaacagagaattagggtttgaatacatgaataataaaattagaaataaattatcatatatctctattaatgtaattaaatatattaaattttacataatttaatttaataattaattattataaaatatcactattaaccatttacaaaacatcacttgtagacataatattattaaacaccactaatacctaattataacactgaatcaatgtccatttagagatagaaagaaataggattataaattaaaatataattaatggtgtggtgaggtgagaatgagattttcaaatatggaaagacttgactttattatttgtataataaaacaaagaaacgtacgtgtttgaatagtagaccaccactcaactgatgcagctacagcatgcacacatatatatatatatatatatatcttatatactatatatagtatatacgtgtgcatgtcaaactcaatcaaaaccctacatattatgcctaattaatccctatatatcataatctctattctaatctcttataatcattaattcattaaaattataattcagggaataatcaataataataagtaatttacagtataaatatctaactttaactctcagttagaaataaatacttaaatttaatttttgaaggtaataataactaaattatatttctatcactctaactagatacctgaccgctaaatgttaaattattatccacgtgtcattttcttattagtatatttaaactattttaaaaaaaaaattaatgacttagaccaatcaaaaattgccacgtgacaacatatttaatatttaatatccaagtacttacagaaattttaaattataatttaagtattattaccgtcaaaaattaatcttaaatatttatttataactaaaattaaatttaaatatttatcccataaattactcatcatccgttctatactagttactattaatgtagggaaggaagagctatatatgataattagacatgtgttaataatataatgatctatctgtcaaaaagttggatgaattgtatatgttagaaaaatttataaaatgcattttagaacactatgagaatttaaatgatgtaaaaaatttatatg

SEQ ID NO: 219643 - DNA, 8258 bp, Cannabis indica
tctaccaatattaattatatgatatagggttttttgatctaataaaaagacactatatagttggtacaaaaaggttgtatattttaatagaaactggtactagtgcaaaatctctttgtctttctcctgaggaaattattattatagaaactgaaaggacttggttcaaatttatccaaatattgtgcaaattttaatgggaaatgacactcacttgatgttgaaatgggagctgttgaaggcttatgttatgatgggcaagttttgttctattgttttaataaatattttacatatatatctagattatcttttattattattattattctagtaattagatatggtttactgaaagcaagtatctaactacgtgtgaagcaatgaaaaaacagattcaataattaatcatactgtcataattgtaattgaaacttattactaataaaaatacattattacctgaattgagtgaccaagtggtgtagaaagatagaagcttccaatctagccaagtcaatcccagggcatagcctctggccacctccaaatggggtgaagttacaattgctagtgtctttttcctgtgaatttcagtaaaggttcaatgaattattggactatatactgttgataattttgaaaagagcaaagttaatattgaaatatttggtccccacttacctgccacctccatggattaaacttgtacggccagtcataattactttcatcaagatgaactgatctaaaatatgcaaaagcacaccatccctttggtattagatacccttttatctcaacatctttcatggcttttctcatcaccccaatgataatgttccctaaccttagtgtttctgtaatgacctgtaattttattttatttatcaaaagtcaagcattttagaaaagttatagctagctttcttagctgttattttcttcttctgtgcaaattcaagacagtggtaaaaaaaaaatattaccgtttgagtaaatggtaaagataagtagtcactccaacacagtggctccccaagctcatctttaagtctttttaacttcatgttctcctcctgagataagataaataagtaagtgcgtatagtacttagttattggaactaagtcttctatttttaattcattttctatataaaaatcttgtactatagctgtctttttcaagagaataactgcattagtctaattggtatatatatttattttgtggatagaacctatggctaccttatattatataggatttgcattgtcacctatttccaatgacaaggcacaaatgagaaggaaaccacttcagaaacgacaaaactaggcagtaaaattggtcaaaaaatggactcgaaagtcacaaatttccaaaaaagagaaaaaatattggctggctaaacaggatttatttatgcagcttaatccaattaaatcatttttaaattaaagagcactaaagaaaagggtgttaatgatgatgaaatgaagttggcatcttttcattattatgattattattattaataagtgatatgattataataatttgatttgtataacaatccaagaaagaaaaaacaataaactaagtggttcataccatcaattgttgtagggcagcaggagaatctgagagatatttcactgcaagagtcaaaagaacaggaactgaatcctctcctgggatcatcatatctataatgttatcagctataagatcatctgttaattgaccacttgtgtcatttaaaagaacatctattacatctcttggagcctctttggggaccttgttcatcccactactacttttcctagcttctaaaattttctttacttgctttaccattttcttttttgcctgaaatgaaaagagggaaattattttttgtatcaatatagaaataaggtaagatgtaatgtaagtagtggtaataaaataataataataactaacttacctgtaatgatctgtgaagcctagttccaggaaagtttattggtaatgacatgaggcctgcaatgaattcttgaaattgttttcttaaggactccatttcctcaccaggatccaaattaatcaatgccttaactagtacttgaaatgcagtctgagagagagagagagaccaaaaggggtgtttagtcatattcttgtgttattaacttttaaaaagtaccattaaaaacataataattgttaatctgttttcacagacaaaatgattcaaacaaatttattctcaaccacataacaactggttcaccttttccttttggaaaatcatcctcaaatctaagtagaagctagagatggaatatttcaaacaatcaataattattactctttcactgtttcacagacagattcctttatttacatccccccaacacataaaagaaataaataaaacttaccccccaacctaaaaaaaaatatcttcaccacacaaaaaaggctgaatttttaacttaaaagatagaaggcatcttttgttttttgtgtgtctacttgaaactcttacccaaaaaataaactagctaggtaacttgagaggaaccaaagtaatatcctaactactcatttcccaagatgaatatgtgtgaaaaagagagcttacagttttggtttcatcctgaatgtagatgggtcggtcatgggtccaatttgtcattgattcttggacatatttgtacatgtctctggtgatttgagccttgagttgtggtgatttaaagaagccacccactagtccatggattctcctttgcaagcttccattgataagcaaaatagaagactttcccatcaactcagtcagagattttgggtaagaaggcacaaaaacctttgcatcactttgcagaataaatttactcacttctgcatctgttgaaactatagctggacttccaaatatgtgggacttaaacaccttaccatacctaaccaaaaataaaaacacaaaaatacttgttaatttcccattaattgaaaaataaaagctcaaacaaagttatcaaagtaaaaaaaataaatgcataattataggtaactaagtagctggtgaaaagacttggtaactagaattatcaatagtaaagaaaacatgtaatgttagagattagtttgagaacattaagttaagtttggttttttttcctaagaaaatagatttttgagaccataacttacatgcgacgacgtttatccatgaaggtctcaggtcggtcagagtaagcacaagtcacaaactcgattgtttctccaagaaaaggccaccccacagagcctaatggaagtaagcttcttctgggttttgatccagtaagtcttctaataaacttgttcttgtagaagattatgaagtacaacaaaacagctactgtgattacaaaaatccataaattgaccatttttagatttattttcatgcaaaagcacacgctctcttttctctctctgtaataagctgtactatcttttgaacagactcaatcatagtagcaatgaggacattttttctctctctttttttttggttatagaaggaatgaattaaagttgcatgtgtacaagcacacgagtggtaaagtgagagagagagaaatgttggaccaaagttttaatacagagtatatgtaatgaggaacaactgaatagttgagtatattaaagaagacttgctttttagtttcttatataagaaacttaaccaagtttggattcgggtcgaacccgggtttatatacttgactgagttgaaatgaatatactataatttcttactgaccccacttctcagactttggtaaacttattagtagtatggatcaaataaatacttgaaatgaccacataaactttatttacatatatgtacattggagagaaaagttatttcaaaatgtggatgattgatcttagttgtgggacagtagatttggggtaggccctgttttgggtagaagcagctggaggagtcccctcgtgcattcatgtgatgatactttaataactccagccacacttcttcatcatcatcatcatcatcatcaccatcatcatcatcatcatctctatatagccgaatgaacctctcatgtcatactcaagccccatcctttgtgattttatatatatggttggtagaggtagaggctgcatgtgcagccttaccctctctttttgccaaaacttctcttttgcttgttatataatataaacctctcatttccatcagccatggacacaccacaccaatatatgtaataacaataactataataaagagactacccttttgttttagctttctaacaagtcttaaaacactattgccttttcaaattgctaaacaacatcaacaatattcatgtatcaaagtcatacacgctatcactcacaaaaaaataaaaaagttaaagagactttgcttttagtttagtttagttttagttctatattttttgccgcacattactccttaaatattgtttatatctctttcttctaactacctaacttataattaggtaccattcaaagatatgtcctttctttatcatcaaaatctttacactttattaatgccactatatctagagaatcttatggaatatatttggatagagtgttttttttggtattgcctttgaagagtgaagcgtagggactagagacgataggcaatacaagtgtaatttgggaaaaggaggtagaatataaagagggtgagaaattaacgtatgtatgatagtaacggttgttttttaagtgtcaagatggctgcatgaggtggggacttctcagaattacacacaggtggggtgtccacatcatttttggaaattgttaatactgctttcaattggcccatgtgaatcaccacaagtttttaagtaataaagtttttaagagaatatggttaacttcgaaatttctgtgattggttaccaaatgaaaattatgttctctcttgcatagaaaacgacaatatgattactagggacaaagaaaatatgacaaggaaagcaaattactagtcactgttcctaaagttcaaaggcattaagaatatattaacatcagccaatctaaagggtatttagagggccctcccttgctctgttctcctggaacataaatttgtacaaaagcttcagatcatgcttacttcatctgagctcaaaatgatatgcatatttgaatcaataaacacaaacccagcagactgggatcaaaggagacaaatagtaatagaaaaatgtggttttatactgctactgtctcattgtaatttgtaaccaagcaactacaaaatccacaaatttctgcagcagaccaaacacaactttttgatttacacatggcaatttttttttaagtacttccattgtaaactggcaaaagtctaatcataatgtagtcacaaataaggaagtgagaaacttggaatactaaacaattgtgtttcctcttttctttttcagatattccttaatcatttgatagcagttgttcgccagttatatgctcggaacagactttgttcgaataaactgcttaagcaaagctttttcctcatcgatacgcttcctttctttgggatcatttgttttaatcttccttttttcttccaatatccacttgaaaagttcaagctgttgattctctgagattggttgtcgcaatttagggggaggctctttgacaatcggcgtaggtagagatttatcaagggggacagtgacagtagctgttgtttcaactggagttgcaacttcatccactagctccacgtctgtgtctttctttttcgttctcatgaaaatataagctacaaagttgacacaaaatttcaaacgtcagtctagtcatatattttgtggattctagaaccaatgtgtcagaaggtctcaaagttctattatggattgtaattcataatgcctggtaagaaattccctccctttcatatggaaaagttaatgcctgtttaaaccaaacatgttagacagacagacagtctttatttctttccaaatagcccataaattttccaaaacaaacttggcaggctcaagtaggaaactgaaggttccaccaaaccctgcaatctttgttccccatccccagttattaattaggcaggagaccaaataaattgaaccccagacagcccaatactgcacagctactcaatatccatgacatgaagattctatatcaaactcttttaacttgaccttaaccaaaaactttccataaacttaaggtagaaaagctcgtcaaaagcaaagaaaggtctttttttaaccaaacgaaaggctactcgaactcactcacaaataaaataattgttctacagcaccaacagcctaaacaactgatgataaatcaacctctgtaccgttcttctaaattgatggaaatggcattttcagttgccaaggtttcttgcaaggacatattatattaaatgagaaggaatcttttcttatcacatgagctccaagcttctatgaaacctaagacactatcaacatgtcatattctcatcatagctaacagctatttccaatcaacgttgctgaacccaccactttcttatcttttttaaattggaacaagaacactatcaacatgtcatattcacattataactaactactatttccaatcaatgttgttggacccatcactttataatctttcctaattcccagcacagaaaccatgacttgttgatacttaaatcggaagcttttatcccttttactagacacagacttgcagattcaaaattagatacctaatcatattactgcacaaagaaaagtacatgccagtttgagatgcacaatttattctgcaatcacctacaaattacggtatggtccatcccattaatgaataccttatctacaagactccaactggttacacaaagctcccagacactattttaagggcctaataagaccagcaataaagcacagcatctaggtctaacaattaagaggatattagattattaatcaatctccagaaagaagtaaatattataaccagttcgccaagccttgcagataccataaacaaatataaagatggttcccttgattagaagtgagtatcaaagatttcaaatttaattgagaattaattttattttgaacacacaaataactcgaaacaaaagccatgaatttttatacaaagtacctacaaaactaaacttaaatctcacttcaagttcaaacaacaaaaataccaataagtttcgcagaacccatgctagaaacattattactcaaaaattgtgagaattccatttcacattatctgtaattaagcagtaaatacatgagttaaattaagttaaaggaaaacaaaaatacctccaacagcaagattaacagtgagaagcaacggccagaggaacttgtaacggcgagcaaatgattccttagggggctgaggtggaggtggaggtggagggtgagtccccattgacgacgaagatgaagatggtgaagaaaagtccttcccttgaaattgtttcagctgcgctgtttaaaaaataaaaaaaataatcattagaaaacaaaaccccaactattgaatcacaaaaagattccttctttagctggcttaattatagaaaataaatttcgaatcaaaggaaaaaaaaaaagatagatgtagagggaaaatgggtatttaccctttttgggtttattggtatagagctttggagcttcagccatggcttattgttataaattagagtgcagaaatcttcgtctttctctttcaacttgtcagtttcctaccaaccactgtactatattagtctaacactgtcacaacaacaaattaacataataaataaaaatcagagccttgtattgtagccgagccctactaatttgtttttcaattttgtgccttcaatttaaacgaaaataacaggagattagatttcgtttacatcttagtttcaaatttttaaaactagggtgcttttgtgatattttagttttaaattttttaatcataaattattttaaaaaataaaatatatttttaattattttattttttaattttaaaaacaaaaaataaaagaatttcttctttacatttcatttttatttttctttgtttgatttttatttatgttcggagtttgggatttgggttcaggttaggatttgagttggtgtcgttgagt

SEQ ID NO: 219644 - DNA, 4049 bp, Cannabis indica
atatagacccaagtaaagcgagatttatcatcaacaatggtaaggaaatacttatatccttcaacactagtgatatgaaaaggatcccaaatgtccatatgcactaaatcgaatatgtgtggcaaaattgttgtttgaaataaatggtaatcctttttgtttagccaattgacaaatatgacaatggttattggtaagagtagaagaggaaacactctctttatttaagaattttgaaatgtttatagatgggtgaccaaggcgattatgccagccgtctacatttttgttttgaaactgaaaaaaagtagcaaatgcaacagggtcacgggccggtgcacggtttgctggtgcttttgctgaagcaaaaagagcttgccaaacttttcagctttcccaatcaccacattcggaaaagatcctgaatgatacaaaattttgataaaaaatgaccatattagaactgtgatgaacaagttcagacatataaatgagattaatattgaattagggtacatataatacattatgcagaacaagattattgttaatgtgaatggtacccgattttaatacctcagttttgtggccattaggaaatgtaacatacttaggaaaacgatgttgagaaaaagaggtaaaacaagagaggttaacagacatatggtgggtagccccactatccaaaatccatgtaaaaggagatagaaacctgtttttacctgcaagattagaggcagaaggagtcatggcagcaaggtcaacatgaggaatagaattgcttagttgttgactgagaagggaaatcaattgctggcattgagttgagagatcagtggggatagaggggatctcgacatcagttttggtgctagcaaggttgaccttggccttcccttcctcttgtctcttcttgtcaccatatccagtaggaaacccatgtaaaaaatagcatttatcaaccaagtgaccaggtttgccacagttagaacaacatggatggggtttcttggatcttggattggtgggaatagaggttgaagcagcatccatggggaaagattcagaagaactaagagatctttggcgttcttcttggatgatcatggcaaaaaccctagataagttgggtatgggttcattgagaaatatttgagctcgaaccgaggcaaaagattcattaagtccagtcaagaattggaggacttggttttgattgtagtaatctaaaaagattttcattgcaccacaagtgcaagaggtgatgggttgaaattccttcaactcatcccaaagagatttcatcttggtaaaataagaagaaatcgattgatctccctgttgtaaacgggtgagttgagtttgtaattgaaaaatgcgagggccattgccttcgttaaaccgttcagctaaatcattccacatatcaattgctaaatcaaagtacatgatgctttgagcaatttcttgagagacagagttaaccaaccaagacataaccatattaatgcatctatgccaagaattgaaagagaaattaccgatttcagggcgaggaagagagccatcgataaatgcaatcttgttcttggcaacaagagccatggtgatgccacgtttccaagactaatagttgttgccattgaggatggtggagacaagcaccagaccaggatggtcacctgtgccgaggaagaaggggttggaatggtcatcgttgatagatcgatgagcaggaagagtggaggtgtgattagcatcgtcaatggcggaaggatcttggttgtctgggttggaattactctgcgatggaggtctaagattggtagttcttcgtggaagagcagagttgttcacggtgggagttgtagcaggtggatcagatgtgatctcaggtgctggtgtatcgatgagtgatggaggagcaccatcctgtgatcgagtagaaggtctggccatggaggaagtgggcagagaaacctctgataccatatgagagaaagaaacaaagatagagagagattgaatctgttatttctcattcattagaaaaaaaatgaatacagggcagcctcttttatagagcaaggcaagcaaagttagttaggaaaagattaactaacttatccaactaattaaccactaatattaatattaactaattctaatagaaaataatctatacctaaataacaattatcgttagaaataaatgtgttagaaatagatagatttatcaagtaattgagcagtgtgttatgaaaagggtcttagagcctgtttggctgtgtttttagtttttagaattgtgtttttaaaagtgagaatagaaattattttttgtcattttaaaaatttaatagtgtttggcacaagttttttaaaactatttttagattttttttcttaaaaaaaaaattaatattttaacactatacaacgacaggaacccatttaggtccgcgttcgggtttggttctgggactaagatcaaagtatgtgagcaaaaatgtaaaatatagtatgttcgataaaaaattatttttgaaaattgaaaataacattttgatattttctgttttctaattttttaaaactcagtttttaaaaaactgtttttaaaaaattttgccaaacaacccctattagtttttaaaaattgttttcaattttaaaaaacttaaaacagtttttaagttatgaagtcaaacaaccccttagttacaaaagaatattctagatactattaagtttgttcttgttgttaaattcccacataagcaattcttttaagcactatcaactacataggagaaccaaaaagctacaacaatattaaaatgttgtaactgcccaactcatcaacaaactcattcactggcatctaacagttctctacctctataaaattaaaagaagcttcagaaggcagtactacctgactaatcttgcatctcaattagagagagaagtagcttgaggacagagaaccaaaaagaaagaaaaatagagagctagaaagggaaaagtttgagagaaactttgtaaaagaacacagaaagaaacagagagaggtttttgagattacctaatatgatttgtagctcgagtattcatttgatttttgtaacctgcttatgattgatattgcatcatcaagcatctaaggcgagcttgacagagacgtagccctaatttttgggtgaactccgagatcaaatctctttgtgttcttgtatgtttgttttgtttatctctaagcaacaaacattgatctagatctttgttgttgtttggttctggtattgtgtctgggttttgcaggttcgaaggctagggtttgaagcttgagattgagcttgtagaaggaagaagaaaaagtcttattcgagtatggtttcggggttgaatcaaaagtattctcgattcttcatatctttgattttatatcaaattgatactgtgtcgttttgggggttgcaaactccattccgtgaagtgtttgtaaaggtcattatttaccttggtttctaacttgttagtttagttggtgtaggtatattctcggtattgaatttcctacagcggtatcagggcttgattcaagctaggaagatttaacaaaatttggaaacaagatcaagaaacaaaaaagaaggcaatttgttctattgggaacagataaataagattactctaacctaaaactaatttgttacattcttgttttgtgttgctgtatttatgtaacatttgtaacattaaagtggatgtagaaaaatttgattgaataggagattatacgatttagaggaagaagatttgaacccttctttcttagaacaagctactaaggccaaaaaatacatagcagaaagaattacttgaaactgttactggactaatcatttttaagttgtatgattctattatcaagatagttgacaaagtaaatactctaacacatatatggaaaaaactagaagaccggtttcaaaggaaatctttgattatcaagatctttcataaagaaagaatctttggataca

SEQ ID NO: 219645 - DNA, 4696 bp, Cannabis indica
attgattttgtgaaagatatatacatgatgtgctacatgccaatgggggctagttataaagttaatcaaaacatttggaaatatataatttatatatgtaatttagaacatcgaaggtcaaagcagttttctttgatcgtcctatatattttagccatattcccatgtttcctacctcaacttctactatacgtgtgactaataagaataatatatacaatattactaatttattacattataaccacgcaaagattagatagattttttgtcaatgaaaaaatatatatattagccaaatcaatttaattattttctcttcttcttcatctttatttaataatattatgttaaaatcataacaaagacgttttataattagggacgaagccaaggggagccaggactgaattatattttgaacaaaacatgtttaattgtatattgaactccataaaagttatttataagagcgcatttagatgtaaatatataatcgctgtgatattaattacctaattatacactctaattaataagtacacaatattttaaaatacatggtatatttatttagatataaaagtggcaattatatataaattttcattgttttattttacataattacataaaaaaaatcatattatctagtaattaaaatttaacataaaaagttgtgttagtaatcaagaattataataaaaattatatattatttttcaatatatacattagtaattaatttgtaaaaactactcttcttctctggccttgttaaaatatttatatatattattgcaaagtgttagaattattatatttttatttctcattttgtatatagtgtatgtagtagaaatacttccatatactgtataaatctctaaaaacttggtctccctatatagacagatagagagtagatatgatcatcaatatatatagctggtatttttgactaattttgcaagttacagacaccttacttacctttgcacatgcatatttataattaatatgatcagaaaattaatggttctttgaatttctatatgtactctctctttctacgacccaacgctatacatcgaacttgatttgattttgatgctcttaccaagtaattaatcaattcaattcaaagaccccagctcatctgatcttccttgtaataatatatatttgttatacgtacgtacgtaccctcatatcatcatcatcatcatcaatcaatcaattattacaaaccttattcatctatcatttctacaaattttgacatacaagtttccaatgactattcgattcttcttaattattcaaatattatatatttgttctcaaattgccataattataattatagactacgagaacatccatatccaatgctacttatgaccaaatttaacaattgattaacttcatcaccagcttcatttataataatcacttttttatatatatatatttttgctaattattaattataacattaacacatagtggtgtactactcataaatttgttctctctctcaaagcaatatatatgggtaatactgaaaaataattcatatatatatatattgtaaatatatattaatgtttgtaatgaacaagaacaggaaagacaaagggagagaaatagagaaaactagtgcttgcaagaacaattgtattgattaagtgtttattacaacaggctatatatatatatatatacaaacaagctactaataacaatgccataactaactctctaatagtaaactaacacttaactaacacaaggataactaactgttagtattcttgacagttcccttcaaactaagtgtagcttttgaaactacacacagtttgtctcaaactttagcaaatcgagaactagaaacatacttggtgaggcattcagcaagttgagcaaaggcaaggacatgtttcacatgtatttgatgttgtagcaccttgtctcaaacaaagtacaaattaatttcaatgtactttatgcgagcatctagcactagattggcatcaagaaggacagtgctctagttgtcacaccatatggaaggcataactgtttgaggaatttgaagttttgctagtaaagacaaagccatgagatctcagccacaacattagctagacttctaaattctacttcagtggaagacctgctgatggtgacctatttttgagactttcaagccacaaaattgcctccaaagtaagtgcagtaccctgaggtggatctcctgtcatctggatctgaggctcaatcagcatcacaaaaggcttctaaagagtaatcaggtgttggttttaagtgcagaccatagtccaaagtgccagcaatatacctgagtattcgttttattgatgtctagtgtgcttgcagaggagtatattgacatactttgttgacagagaaggagagttcagacctagttattgtagcatattgaagagcacctactatggatctgtacaaggttgcatccttgactggttcactaccatagtttgaaagtttgagaccactattcattggtgtgttctgagttaatattttgcatttttgagttatttgggataacagaatgccatctaaacttctggtgacttggatgcctaaaaaataatcaaccaaactaaggtatttaagagcaaaagtgatgttgagttctttgattagttgatccaccaactcatcattactgcccataactaaaatgtcatctacatagactaaaatatagatgcaactagtgtatgtaactttgataaacaaagattgatctactttgaaaaagtgaaaaccatgttgtaggatagaagacagcttgtcaaaccaagctcgaggagcttgcttgaccatatatggccttagtaagcttgcaaacatgaatgggatagttaatcaatcaaatatagtggttagtgcatgtatatatcttcttgaaactccctatataagaaggtattattaacatcaagctgtctaattatccaattctttatgacagcaactgttagcacaactctgatagtgataggattaacaacaggactaaaagtctttgaataatcaaacccttcttgttgatggaattctttcgctacaagcctggctttgtagcatttttgattgccatcagcattgaacttttccttgaacacccacttgcatcctataggtgttctgtctggtggaggcttgaccagaacccatgttttgtttcttttaagggctttaactctgtgtccatagtagtgaaccaatgtggctcttgaagagttattttgacagactttggaccataagcagctagcaaaacttttggttttcttatgccagctttaagtcttgttgtcattggatgaacaaatgctagtggtgttgtatttacaacattgtctacatgtaatttgttaggggcaacaagtatatgagcattggaaacattggtaattggcatgggagtagtggttccaatttcatattgaataggaatttctataagagtagtagtaggtacaatagtgttttgtgtaagtgagttgatagtaggagttggagtgggaatttatgatggagagttgggtggggagggagttggattttgagagacatgaggaatgccatgttgaaaagtgttggtagaacaggaaacacagttgacaaagtgggaagagcagatgtttgagagatgttggaagataagtttagagattgttatgttgcagcaatagcataagaaaaatcaatttcatcaaagacaacatctctggagatgtacatccgtttatctttagaaagatactaaaagcctttgtgagacatactgtaaccaagaaacacacaaggagttgacttgtattggagtttgtgtttgttgtagggcctcaaatttgggtagcataagcaaccaaaaactttttagttgactgtaatctggtctagtgtgaaaaaagcacctaaagtggggtagaatcatttaaaataggagtaggcatcctattgattaaatgggtagttataggcttcatcccaaattttaatggcatgaatgcatgagctaatagagttagacatgtctctactatgtgtctgtgttttctctcatagttccattttgttcaagtgtatggggacatgcaagtttgtgaacaatgtcacctctccaagatattggtaaataatctgaattcaccttcccaatcaaattggagaactttgattttgtatcctagctgcaactcaatctgacttttgaatttggtgaatgttggtaatgcctcatcctttgttctaagaaggtacaaataggtatatctagagtatgcattaacaaagctcgtatagtatctacaaccattagattagttcattggggaagggccccataagtctaagtaactcaagtggtgtgtgataagtggtggtagagttgggaaattgtaacttgtgtgatttaccaagacaacatgcagcataaatattagagaaagttttattagttaatggaatgttacagttgaagagagcctattttacaattggagcattgttaggctatttttagcctatgttttggatccaatttatgtgcgtttttagctgtgttgggacgaaattacgcttgttttctatgttttcaggttctttggaataaaagaggtctcgg

SEQ ID NO: 219646 - DNA, 3029 bp, Cannabis indica
tcagttctcaagaaaacagttgaaactacaagcgccacgatcaaaatcttaaagaagaaaaaagaaagaccataaattaaactcatggaaaaataggattgaattttcataagtagtaaccacttactttgatgagtctgaaaatgtaaaagaagtagtttcttttcataagcaaccactctctgcagaagacagctttcaagatttctttcttgctttcaacaccatatttttgagttgctaaagcagctggatggttcttgcttctgtcaaatggagccaaaagctcatctttcattctttgtcccacatgaaagaattgaaatgcttccacaaagtcattgacagtgataaatctataacattcttcttctcttgcccaatactgcttttgatcttttttcgatgttaccttataattatttgatcatttagtagatgataacaatttcgataaaaaaattctgaaaaagttcacatttgcattacctcttgcaaaaagtcagcaacagctttcctctcaggacatttaaaaccaacagtttcgaaaaactcaagcacatgttcgcggggaccttggtaaacaatctgaccctcagataaaagaatgatatcatcaaaaaggttgtaagtctctggtgccggctgaagtaaagagatgacagcagtttcattcaaaatgtgaacaatctgcttcatagagttcataatttggtatgttgtggagctatctaagccggttgatatctcatccatgaacatcaccgctgttggtccaacaagcatctcgcctgagacaaaagcatacattttttttaactggaacaaacaagaagttaaactgtatatattgatcaaagtgcacctgttgtaactcgttttctttgtcctccagagataccccttattaagtcatcccctattatggtattagcacacacatctaatcccaaaatctgtgagcattgcaaattaattttgtgatgatctacaatcaccaatcaagaacagagaacaaaactaaaaccaaaagaaatgcaagctaatcgaacaataaacatagtacaaaccaaaaatatttacaaggtttcatagactaatatcaacaactaattcaaataactaaagactccaaagctgttacagcagactatccagacacaactgtatcaagtatctcagatcacttaactacaaatttcaatccaattactaagaaattgatgttttagatgctaacctttaaaacatactcagtcacaacactcgtctcttggccttctgttgccgctgcctgtatagattagacagaaacaagcatagagaacatctcaggcatctactccagggttgttagtctcttctaaattttatcctgacataaaaaagaaaagaagcttcacagttcaagtaaggaactttgtcacaagggtcaccttcatgaagacatcaatatcaggatcaggcttgatattggcttctttctctcgtctagacaactctgctagcaactctgtgagaataaatagccaaatgaagatgaattccaacccaagtctctaatggaagttaattaaggtgtagggagatattcatactaaccataacgccttttaactccttggcacctagcagaaaagtctaaggtttccctcacagtcatttctttaatatgataatcatgttcacttacatatgccgctgttctttctgggataaactcatccaagccatgcccattataagtcaccttcccacaaaactaaaaaaagcaccaaatcacttaattaaacatacacacataaacaaggcaaggaaaagaaaattttctcactttcaatcgtgggtcaagttgtccagccaaagctagtaaaaatgtagtctttccagaacttggaggacccaatagcaatgtcattctgaaaaataataagcttgtttatttttctttcacagacacaactaaaaggatattaagtactcatttacctgcatggctttataaatccactaaggccatctagtatagcaattttcttcttcttgcttggaattatgtgtagataattcaagaatccctgaaaataaaatcaaacaacaaaatatttttatagaaaattaatacaaataccaaggtatgatttgaatacaattttacacttttttacctcaatgacattggtggtgaagttaatgaatgaaggtagagctctttctcccacataaatatcagtctcaacattgagatgttcaaaacgaacttcaacagtaggtagctcaattccaacactgttgaattgagttagaaaatgagtaactgttttctatttggtcacttatttgtaaataatattaaacaaaaccaacctgtcaatgcgattcttgagtttggtcaagaaagtttgattatattcctcaggcaccttaaccaatgtctcaactaaactctgcttttgttgaatactaagatggtgtacatcaattgtacaagtgtttagtattcctttccttagtcgtttataagttggtagcctctcaagtgctgcccacttgagagtttcttcatcatcatcttcttttactcttttgccaaaggaatccatcttccttcctttcccaaaaaaaaaaattgaaattagtaacaaaccacaagcttatatacaactacaatatacaaaaaaaaaaaaaaaaatctagtacttagtaccttttacgtgtcaatatcgttattagtgtaattaagtaacaggtctaatatagtttaatgtaattgattttaaaaagtaacactaaccaaatgatacgtttaaaaagtgttaaactatattcaataacaatcatctatgaaaaaggggtcttaatgaaatattgtatatacaagatacaactagccatagccataaataaaaacaaaactaacgatttaaggcttaatttttcactaaaaaacaaaaataatggacaaaatggcaagattatatatatacagtagaatctctattcaagaatagacttgggataagtaaatt

SEQ ID NO: 219647 - DNA, 2216 bp, Cannabis indica
accgtgcccactaccacgtcagctgctaaacttcccactgctgttctttcaacatcagttaaagcaaaagctagagctaataagaaagaagcagaaaaagccattgctgaaaagtcaacagcggctgcagagccttcggttgctgggccaactacaggaaaaggaaaatcttctactgagaaagatggagactctatgcaggtaaaataagttggatttctgtattttctgcttcgtcgagtttttagtatcttcttgggtctttgcttcctttcacaccctcctgtttttggttattaatatatgtcatcgttgctttattgtactctgatccaattctatacttggcaggttgacactccaccagagaagaaatcagagcccgagccaacttttgagattctgactaatccggccagggttgttccttctcaagagaaattcatcaaatttctggaagaaagcagatacgtgccagtgaagttagcaccctcggggtttgtccttcttagagacttgagacctaccgagcccgaagtgctctcacttacagatacaccctcatctactgcatcaccagccggtggagcagcagcaacatccacagcaggacagcagggttcaggttcagccatggcagttgacgaggaacctcagccgcctcaacctttcgaatttacctcgtgaatctgattttgttagtgttaattttccgttgtcgtggttgtcatggtttagcggcagagattatgggcaccttcttttgtggagactgatgcaaattgttgcgaatactaccccgcaaccacctctactagttgtggctaatcccgagttctatttgccaccaatggctcggctacttttcttccctcagttatggttgatctccattaaactgtttttccatgattatttatacttttatgcttataagttggggaggtctagtagctccaattgcctttcttggagaagtgaaaaggaaaataaaaagaaaaaaaaagaatgtatactgtataatctccctccatccaatgggacattttttttaaatctctctgccatgactttgggaaaaaatttatgttctttttcttttctgcattattaggttttcattttttttacattattgctgcaaagtaaggaatatttcctcttaagtatttcatttccctattaaattagatgcatctatctattcaatccttgagtttgtggtgattgtcccaaatgctcttttgattttgtgatgaaatcattgtttgtttcttttaaaaagagaacaaagtgtgttataaggacttgtttggtatgagatttcatcataagatgctaatatttttattcttagtaaaataccccacaaaagatacatcatattaaaacattatttcatgcctaaattgatgagttatgattttgttgctagattgaaaaattaaagaattttttatttatgctatggctaattcgatgtggtaatatgcttagcttagcattcatttttcattctttttataagtgtgattattcattaaatgttgaatagaaatacaaaagaagaggttacatccatccaagaagttagccaaaggcatactaataagtagtgataagattgattatgcaatttgaactgaaattatttcttcaaaagctaatatatattttcattcattcttccgaattccttgtttaaaaagcaagccagtgatcacttgtatcatgtgatctcaacattgaattttctatagcttttgaatcataaaaaagagagaaggattaaagatgcacacgagactagaaattagcaaaaattgattccctcgtcccattaagaattttaatctctattcccgtatattctccatcgagcatgaggcagaaaatccttgaatggggcaagtccccacacacccatggttttttgaacaatatgaaataattgttaagactattcttatatggtgtgatcagagccgaccttgaaaatatatgggcccaagacgaattaaattttggagccctcaaaaagatatataaaaaaaatataaaagaagagtgttatgagatttgaatacatgaccttggacattatgccatccacctcaactaactaagttataaatatttgttgcttataattcacttaaattttacttaaataaaaacctaataattttttttattttgggcccccggaaagtgtg

SEQ ID NO: 219648 - DNA, 2576 bp, Cannabis indica
tttattccgattttattgttagtattgaaattttggagagaacactgttatttgggatattggatcaaaatgggcctaaattaagcccagacataattaagaatgatcactgggccaaacttaacaaactttgagcccaataatcacgcctttgccttattatttagttggatttttatgaaaatactgaattttgataaaagaaaattataattttactgtcaaacaaattttttttacaaaaatactgttcttttataaaacaaccgtaaaacaataaaaacaacagtggaacaactaaaaaataactgtagaataacagtaaaaatttaatacagtatacattataagattttacactgtatttttgaaaaaaaaattccgccccacagtaaaaaaaattaaaatttaaaaatattagtatatagtgtaaaaattcctcatataactagtattacaattattaaaatcaatttttttcttttttgaaataaatgaaaattacagatacccagtggagctacatttagttcaccaagcagaagatcacagcctttcagttatagcaattctgttcaattacagtactccagatccacttctcttgaaggttgatccatctatctaagtattaaataaataagaataaaagtaatataaaatgtagtagtttaataataaaaatgtatgtatgtatatgtataatgtagattaaggagaaaatgaaggagctgtcaaaggaggtatttgcaggggatgaggaggctcatgtaccacttggaaccttagatcttaagttacttaaaaagaacacaagaaaatattacagatatgttggctctctcaccactcctccttgctatgaaaatgtcacttggactgtccttggaaaggtaattacacatatattaatactaattaattcatttcaattttacaaacatcttctaaacctaactacctactttatattttatccaaaattctcaacacctttcataccttatatgaaggttatttcgaaaaggttaatttgaatttttactctctgaattttaacatatactaaatcatactcctgaacttttaggttgttaaaaattctcctcgaatgtttgagattattagatttaagaacttttatctaattttactataaaaaatctgacgtggatgaaaatttcaggagcataatttggtacatattaaagtttaggagacatgattagaatatggacaattacaaaattgaccgaaattagacaaaaatctttaaatccaacaatttcaatagtttagatgtaatttttaacgacctagaaaattcagaaagtatgatttaatacatgtcgaagtttaaaagagaaaaattctaattaatatttagaaaaataaataaataaataataacatatataaaaagtacaacaatagtagaagtgtcacttttattcctacaataacaatatttaaaaaaacagaagtgcaattagtagagtaaattattctaaacatttagaaagcagaaggaatatgttgaatataactacaatatatatatatggattatttttgaatgagtattatctattaatggaacctaaataaatttaagtataaatattaattttaaaaatattaaaccattaaattttggtccataatgaataataaaagagaaatttgaatttctatttttaatttagctacttaattaaagaaaatataaaaaaaaatacctcttctatatatattgaaaggatgtatttttcaattattaattaatttgtggaattgaaatgtaaatggttggcaggttaggagcatctcccatgagcaagtagctgcaattaaagcaccattgaaatcagattgtaagaacaatgcaaggccttgccaacccctaaatggccgaactgttgagttgtatgaggaccttggcccctctaatacctaaaattattaccaaaaaaaaaaggaaaaaaaatcttagttacaataattagtattgctatggagatatcaattattatagtgctgtttttatagatatgtatatatgtgttaagatgagtggtatttgtactttatattagaaaagaagattgttttaaacactcttcttttccttattctagcttggggtttttggtattcttaacttcatctatgtaattcaacattagtgagatttgggctttgagtttattttacttttagaacctatttatctataaaaatgccctaaaactttttttttttttggtaagaaatgctaaaaatacattagtaaaaaaaataaggacttatttgttagaccgtataagagtcgtatagtattaaataacaaataacactacgtttatataaaacatagtaggattcgtttggtaggtcgtataagagtcgtattgtattaaataataaataatactatgtttgaataaaacaatgtattgtatcaattactacgactaaagtttttaatataatgtaagttgtgttatttaatattatgtatcgatccgtagtcgatgttgggggtcgtgttcgggtttattgaaaatatattataa

SEQ ID NO: 219649 - DNA, 2614 bp, Cannabis indica
acagcagaaagatcactatttttgaccaacaactatactaatccagtgaactaaattaacaattagaactaaattaaggtggtatatgtaaaaattcctatttatttttggtaattttagcccaaaatattttagaaaaagcctcatcatgttgtaaaatttggaaaagaaaaaaaaagataaaaaattaacatgtggactgccatagcaaccattaatcaacgtctttgtcgtcaaagctacacccagactcttctcgcgcttacctggttacctgtcaaagttaaccaattaaaacaccccacgtgctctctcactttccaattcccaggcaccgttaacacaaatgaagaatcaatatgtaatatgagatcgtcctcttcacaattccggtgacccagaagaactcataccaccaaaaccactactttccaagtacttttcttcttcattaggggttttttcttagttttctttagtttggcaagtattattttccttaattgcagcagtcatgttgttttcttattgtgattttggcacttcaatattttgggtgattattttattatttcttttcatttgtaatttaaatgaattcatgtactgggtatcttttctattttgttttatgccttttaaaatggtttatatggaagatctttgggtccattcataccaaaatacatatatacaattgttgataactcaaaaagatatacgttggatcattttgtaacattttttttttctttttcattttgtcatacgcacagataatagatatagtgctcttttccccttctttaggaagaaatggcatgtacatgagtacatcatcaagctgctcttgcaaagaaaaagccaaggatgattagtagatttgtcttcattggcttttcccttctgtttaggaagttagacaaatataatagaatttcggtaaaaactcttaggccttattgatattggcaatgctcgggttttgggtatctggattttttatttactattaatttgtctgaataatttgaattatttgattccaagttctaaacttctgttcatcatataattagtaattggattcctaaattgaaagtggtgattgcataattgcatatgcttgtagggactggtttgttgtggtgtttgaaaatgctgattcttgcctcttcacaaacttgtaggatggatactttcagtttgagcttgattcaaaatactctttagctgtgaatctccactaaatacagcatatttactagggggtggttattctagctttgttcttctgtgagtttacttgagcagtaaccaatccttccttaggaaaaactatggaatactagtgaagagaggttgggctgacaatacttgctgttgcttacaagttacaaccattatagctcacaccttaatacggtaaattctgagagttgatttagtgtgttagttagttactgtaaattgtcaagtgtcaacaaggaaccttgcaatggttgctttttgttacagttgttgttagtttacatttccctgctggatgcatttcttcttacataaatataaaagtaaaaaattgcttcatactgatgtttgattatgtacttcaacataaccatttacttacatatatctaccaattcagaaatgtcattttcgcttatctttttcaacctaaacaatacctgaatgtttacatctcatcagatataaggggcaaactagaaagctagcttcagatggctcaagacacttatggtgctgattcacctcggcgacgttctggtctcctgcgagatcaggtccagcttgtgaaaaagaaggacactgaccgttatgagattgtgcctattcaagatacactatcctttgagaaaggtttctttatagtgattcgtgcatgtcagttgttagctcaaaagaatgacgggataacattagttggagtagcaggcccctctggagctggcaagactgtttttactgagaaggttctgcactttatgcccagcattgctgtcattacaatggacaactacaatgatgctagtcgcataattgatggcaactttgatggtaaaatttcttctttttttctgcagggaaatataaactaggaagatcctccaactaattcttaaattttcttggtatgccagccttttaaatcttccttccatcatttagccttctgaacaccaatatggtgatgattatatctagatgatgttaaagctcctttactagttctgtgagtcctttgttctcgtgcaatcgcctagcattaaattatatatggagttacaacaatgattagccaacacaactacagagaggagagtatgatataaaaactacgatgctttttctttttttgatcaagtcaatgttttgcatatgtatatattaggagtccaagctaaattgtcagttctagttaatatgttaagttccatgttaaaggttgcaccattttctgctattctcagcatgagtctagtttaagttttcattctatcaaataataataataataaaaaaaaatgtttagttttcatcgttaatatgttttctctacttctgaggctgactgtgcttgcatcttctg

SEQ ID NO: 219650 - DNA, 3511 bp, Cannabis indica
atagctaaacgatgaacactttttattgaacaaaataacaaaagagttacaacatttattttaccattattgcctataaagacaattttaacatactacacaacattaaagactacatacttcacaaggactatacttatccttatatagctctctaatgcttgttcctttggagaagcttttggaaccaataggcagacatttttggagacctcttgagggtgtggaaatcaacatagacaatcccgaacctcgaagtgtaacctaatcgccactcgaaattgtcaagcaatgaccacgcaaagtaaccaactacattggccccttcatcgactgccttctttagttgagtcaagtagtttttgtaaaatttgatccttgttgtgtcatgtaatccttgagccattgtcacattgcccgggtcatccatgcctgcgagttttaacatcaagaatatgagattccatgacaaagagaggactacaaattcaaagagaaagatttgaaattgtagaacatgttaggttcactaattcccaaaaaatacataagttgattttgttagagtatcgccacttgtgctcgagatagagctttcctaaagattgaaccgaaaaaaactacttgaaatctataatagcgagtcaaaaaagtcacttgtgattgagcgaaaatagtcattaaccatcttaatcgaaatgttagactatatcacatagaaaatgtgtggtaactaattattttgagatgggaattcatatatcttaccatactattaaatatgaaacaatcccacaatgttcttcatttcttaacagagaagattagagttaataagcttaattaccattttcagatagtatcacagttgggtttccatagtgttcttttatgtatgttaaacacttgtacaatccccaaggtacttggtaaagccaactagaatatgcctgcaaatttcagctaagtgtgtcaaagaacaaattcttgttaaaaaaaccaaattaaaatgttaaaccaatgtgtggattggatttggaaaacttactctaggaccaattggcactctattcttcttatctgcaagttcaattagaaaagaaaaaaaaaagttaaatttaacatctgtataactaaatgctaaaaggcaccagtggtgcgtagcaccatccgaagtgtcatatcattattagtagaattaagtatcgagtttacaaattttaacataataatactatggaatattgctagccatgacaccactggtacttaatagcaatgctcctacttattgtaatataaaaataaactaaattacaggataaaaggaaacttacatgcaaatcctgcattccaatcttgttgataccctaagacctttggttttggttgatgaggatcataaatgtagtatgcagtgtattgatttatgcccacaaaatccattgaccccttcaccattttaatctcatcttttgtgaattttggtaacctttttccaacaatttcttgcattgtttttggatactcaccatagacaatgggatgaatgaacctaacacatgtacaaaagatcaaattcatcaacttatagttgtaaattcttgattataagttagaaaaaacaaatttttttaccatccaacatgaaaatcccgcgctctttgagctgcatagttatcggcctttgatcgagtaagaggctcgtaccaaacaaaatccaacaaaattccaatctttcccttttgtttttgctaacatgacaatgcaaacatttccatgctaagaactaactcaaaaaagtctttaaactcgaaaaacactgtaaaattactctaaatacttttatcttacttggtatttttggcggtatctctgaactgcagctgcatgagataagatcaaatggtgagccgcgatgtaaggttcggttgctgagttcccggctgtgcaattcccatatgccttggaacatcgtcccggggcaaagaacccggtgtcatacccaagtgcagccacaactcggggctcgttgaatgtcatccaattctttactctgtctccaaatgtcttgaaacaaaaatctgcatagtcagcaaaatctttcctgcaaaatgttgtgaagcatatgtctcaaagtccactctcttatttctcttaaaagataattgaaatttaaagagagtaaattttttgatcagaaaaaaaaaattattgtctagcctaaaggcatgcaacagtacaatagaaatctaagttttttcgataaaatatcaatagaataaaagtagtattttttttaatggtatttattacttacactacttggtcatttaataaacccatgtacttcttctctagtgcctcaggaagatcataatggtagagatttgcatatggagtaatgcctgtacaataacacaaaatcattacattaaagaaaatgctaatttttaggaatagcaatctgggctttttttcacagccgggtcgggtcccgtcccgattggacgggctctagcccatgcaatcgtgttttatttgtctagacagtaactaaaaaaaacctaaacatgaacattctcaaaaataatataaataataataataataaatatataaataaatagtaaaaaaaagaagggggagggtcaggctcaacccacttaacctgggtcaggctcgacctgcttaaccagggtcggtcctgacctgccctgtttaagaaagctatcgggccaaattgctatcaggtcgggtcgggccaatgccaagtcggacctgacctaccccatttgacattcctactaatttttggtgtttttatttctctatttttctattaatatgattagaaaaataccttgtttgagcaagtaattgatcaatctgttatagtatgcaactcctttccagtttacttttccagttccctctgcattcacaatttattatttatatgttaagaaaaacttcattgaaaattaagagcttaatattataataataagagtaaggatatgtgtacaaaaaattacatacaataatattatacacagtgatgtaatactgttttttttaaaaaaagtcagtctatatgaagtaaaactgatcaaattaggggtgttcgcggtgcgggttgtaataaagaaaaatattatagtttttagtttttttttttctattaaatgaaattaatagactcaagtttaactttaacattggagaagatcatcatattaatttttttaagattatgaatctatttatagatgattttatctctcttatttcatactcttaaaatagcagaagatactttagactaaaaagaaatgtgaggttcgaacttttgatctatatcaaaagtgttagatacctcatcaccactagaattcatgtagatcttcattttcttaaatatgactctgcttactattactcatttgaactattataaagttatttatgaaagattagatataataaggaaaacttacaaaaaatattg

SEQ ID NO: 219651 - DNA, 3281 bp, Cannabis indica
agacccggatccaaatcccctccccacagccctggcactgaacccggcttttgacttgaacccgaatccgaccccagacctagactcgactttaataaaatcaaaaaataaaaataaaaatgaactttacagaatacacttttattttctgtttttaaaattgaaaaacaaaagtagttacagaacgcatttttgtttttcaaaaataaattttttaaaaacaaaaattttactttcactttgtgattaaaaaattaaaaaataaaagtgttaccaaacggcacctatatgtttcattttggaaaaaaatagctaatgtgatcatgtgaatatgatattgcattccataatgatatggataagttttaatttgcatacttaaaattacattaattaattttaaccatacaattaaaaaaaatatagaatatctatgatttattttaaagtattgttattgaagattagtagtgactagcaccatctaaacgtattactttgcaattagtagatattctttagaagttattatattatacgagacacattatttaattgaaccaataacaatattaacacatcagaagatgctagacaccactaatgcttttaatatttctcattattttaagaagagaaatactaaagagcatctctaacactcttataatatataaatcactattaatataattcaatatttagttccacttattttaatttaataaaaattataaacaactattaattaattgtaaggcaccatctcatatcttagtatcctataacaaccctcttttaaaaatagtgattatcctataacaatcctcttttaagaatagtgattatcatttatattaatgaattttaatcatataactaaatatgtctccacatgattaaatttagtacacatatgtaaatgaagagcttacatataatttctctttaaatttgttatgaaagaataatgatagtgaatgtcattatttatgcatcaccaactttattattatatttattttatgtaattctagttacacttaagatcatagtaatttttctgaaatttttgtaatcctaaattatttaattcttatacttaataatcattgtcctataaataaagagactatcatgttgtaaagatatacattcacaactaatgaaattcttctcttattctcatattctctgttagtatattaatagttataatattattcaacacgatatcaacacaataatatttttgtgatgtaagttttccttcagtttatttatattttattctatgattataaaatatgtttgttatttacatatgtattacatttcatatcatatattctatagtcattcttattagttatggttataagttttgtcattcgggatagaagctattaattcggagagtagatactggacgcttagcgtgaatccaaaaagcccaatgcggaaggtcttgtagaattcggaaggtatttctacataagcttatactgcatatagaatatctctcccgtatagcttattgtcagtcttgacggtccatccgggaaggaagtcttgtatgtatccggaaggcccaagttgacaaatgacctggtgcgctggcaactgattatctgattctgatttcgtttcgaccgtccgtctagttttcgacaataactaagatcgatgaagttaaaaaaaatcaaattcacaacttcgtatttctcatttccaagatgagaagaacacttggaaatgaagagtttcgagtctcttatttccacaaaacagcaacatttttgagaactggtgactagattcgccataatatgtaaacagactaagtgatgtcaaaatattacttaggcatcataaagtacatcccatggatgttaacgtcatatgtcaacctgtacgctgggtcatgaattgccttcagtaaaatgaccataactcactcaatattaatttaattgatgtgattcaacttgcggttcaaagctatttcaattctctattaagtcatgtctcacacttcaatcataattctgaagttatcgtccccaaatttcatcccaagagagttatgaaaataagctcaagcttacttggagtgggtcccgccatttcgacccgggctctgagacgatcaacctcaaaagttaattttcaccgttagattatcatttacagtcaaaaatagccaacttgtattttttttttattttcaaaggcctccttcacctataaaagcagagctcccttagtttatttttcacattcagaaaattacctacaaggtcagagcttctatatctagtttctcactctagaaattgaagttttgacgcttagctttttctgtaataccatcttgtaagaaataaaaactcaaaatagacgtagctctattactgtcgcgatacagggagtgaactactataaatttttgtgtctctctttacttttatttaacaaatatttcattctcgccaatctagcaagcagatatgtcttggaagtctgtgtccagatttttgaatttacacatgttattttaggaatttttattgatatcatacaatgatattattgatgctatttttttaaataaaaataaaaaattaaagtaaataaagttatacaatttataattaaaacaaataatatgtttataatagcatcttgaaatgtgctatattattgtagtgtttttagaagtaagagtgtcaaaataatgtgaaagaattatttaaaatgaaatgttatattttcaaatgatttgaagaattttagtatctttaaataatggtatcattagagtatcttcagtggtaaaactttagaggatgcttggtgagatgtacatattatgtggcaaaatattatgatgctataccattagagagaaaaaagtgtcattctaaatatttgcatggatgctatgttgtagtattgatgatattcatttttttaataaaatattaagccaaaaagttattgtagctaaagattagactatatattaaataataatatgtgaaatcataattatagcatttttaaagatactatatattgaagtatttttaaaagtaagagtaccaaaaacaatatgaaagagagataaaaaaaatatctatttttaaatgatgtgtaaatttttagcaccattaaatgatgatgctaccagtggagatgcaggtcctctaattggatttgtttatttttttattttttcaaatggtctaatttgagcttgacgcgtgccaagtggcaat

SEQ ID NO: 219652 - DNA, 1233 bp, Cannabis indica
aatttcttaaaattttataggatatcttaaatagctataacgtacgtgactaagaaaaaaattaactaaaaaattatttcaggtgttaaaatagataaaaatgcatcaatacatctatttaaatgagtgaattgtagaattttcccttactttttaagtgataatttagcctacatgagcttgcttaactttcatatttacttatactcgtaatttattttagttttataaggtgagtgagagatcagccaaagtgagtgagtttatataagaaaattatgtgtcacaatcattatatttaaaaaaaatagatataaaaatatgtataagtaggttgtggttgttatggaacgagatcaatatgagttttctttccacgtgtaataaacaggaaatacaatttggatggatatgatattcatacacatgacccaattactacgacacttgtgtggctattggttcaccattgtgatttgaatgttgctcatgtccccacgtacgtataaccactactacgtcttatcttttctaactaattaaataataaatacattttagttcaataattcaaatttaatattcatcaaaatagaaatataaaaatgtaagttccaaaaacactcaagatatacgagagacttatgtcttccgttattacagaattaccgaagatagggaaagcctaatcactacagcaattatatgtattaggggcgacaaaagtcgcctctaaaactatagaaaatcgctcctaatgactattagaggcgacaagtcgcccctaaaaggtcgcctctaataattcgcgcctaaaagtactattaggggcgacaaaaatgtcgcctgtaattaggggcgacattgtcgcccctaaaagtaatcaacaaatttttgaactttactttttggggcgacaatgtcgcccctaatactcctaaagtcgcccctaaaaaggtgtgtcagaaatcattgtttgacttttaggggcaactatgtcgcccctaaaggtttttacattaaaaaaaataaatttttgataatattagaaatattaatatttaatttatgaaaaataactattataataaataaaataaaatattaaatatatttaataaagaacaattagaataatataatagcataaatttttatatgtaacgtaatataaatttgataatggtgatacaataacataaatgttcaaatgtaacataatataaatttgat

SEQ ID NO: 219653 - DNA, 4235 bp, Cannabis indica
aacaaaaagaaaaagaagcatgataaaagtgaatttgactgtatcatcacactttgtgagacatccagcatgttcatgttgcacaaaattaaagaatataatatatataaatatatattctacaagcccaaaaataaaattgatacctgtgctaataatggctctgcaagcccattattgtttaaatacgcacacgcactaatgacatcattgaaagagcacctgagagctttcataacaggcttactctcacatgtatgaaacattcttccttgaatatgagcagtctctctaactttgacactaaaaatagactggtctttattagtatcactgtccaacttcgtcaaataaaattgttcccggtcatgttttgaagggatgggaatgtctaatctggaaaaacaaagctttccttcagtactgtaaagtgaggtattacccctgatggctaaaaccaccatctgctgcaaagcatcgtaagcagatttcagatctcccagtctagtaaaggaccaaataaatcttttgagagagaaaatgttgagactgtagtttctgaaacactccttccatatctcttggaccacagacaagttcttttgcgaaactgctaactgaaatcaaaaggcaaagattgtgatctgacaagtcatcacaacaacattacctgaagaatttagaaaaaaaaaaaagatgagagtagcagtcaattttgctcaccttaagaagctctgagtaagtaacttcatttttccctaccattctacgatccattagatccaaacattgattagcatgacctatactttgtgtttcagcacaggcacccaaaaaactattataaatacatggaagcgggtaaatgccaagactttctccgagaaaatttatcaaatttaatgcctgaacatgtacagcaggaaaacataacatcagttccttcattgtacttaaaagtatataattgaagaacattataaagtttcattcttatagtgcagggattataattgatgattcaacatatataaccaccaaacagaaagaaagaaaagtaaaatgataagatatgttgaagtcattaagcatagcaataaaacacttcacaattatataatcttcttcttttatatgttgtgtgtgtgtgtgaatatgtatctcatggaattaactaacctcatccaggtaaccgcctttgcagagagcacgcaacattagcaaggatgtaatggtatccggcctgatatcattttcatccatcactttccaagtctccaggacaaactacaacaaacaaagtaaatgggtgacttttaacatccaacagaattggcatggtagatttgatccagagacatttcttcttgaatttttcattccagagatgacataaagattaatttaaaaagaaaaaaagaaatcaaataaagctcggcttcaaggaaagaaaaccgaatgactgcaaacaggagcttacaagtggatcaggtgatcttgcacagtagctaaggatgtaaacaaaatcattagcccttagagagtaatttccatgatgaagacttaaaagcagactggaagctttgcttctttcacccaagcgtagcgcatcaacgatttgcatttgcatgggttttgtgattgaatctgctccacaccacagagcataatagcatgagtttaaagaggatgtagaaactcttagaagattattgtatttatgtatggaattaaatatattttcaggcttcccaatcattctttcatgggttacagaccagcaatttattactagcaaattcatcaaacaagttcttagcatcaaacacaatatgaaggtaagcgttatactaatctaatactactattactaccaaattcaccagctaaaaccaaaaaagaaaaatgcaaaagattacgttttgaggtggtaaaatctcgacataacaatgcttcctttgcctgaccactccatccctgccaggacattcatcatttcaatatcaaccaaattaaaaaaaaaataaaaaaatcattccatggtttgatttctccataacattcaaaactaaaacttttaaacatacaaaaattggaaaaagacagtcatacatgttcttgtgctcttgaattacgaaacgagtcggcaaacgaccgcaaacggatcttcgttctgtaaaaaaaaaaaaacacacacacacagtataagttacttctgacgacgaggatcaagtacacggatgtaatagtaagtcgatacggcatacttacaaagttctgtacatgatgatactgtaacttccttcagtagaaaccctcgcattataaattagggttgaaccatttggggaaagattggaattttgctctgaaaaagctatgaaagacggccaaaacgtttatctttaacgaatctgcaatagtaaattttgtagattacttaacaaatgctaaaagaaaaataccacatcctattttattttattttttggaattaaaaaaacgatttgtgccatgaaagtaataaaaaatatagggtacatatatatatatatgttacttacacagctttctttgtttaaaggttaaaaatgagtcttcttcatcttcctcaacaatcactcccaaacccaaatacagtgcttctcctccgcccaaacttattcctttctttctcaatttcgcacaataaaccctttaacccctaattaatttctctctctgcgaccccaccagtttcctcgtccggccaccccaaaatttcaagatttttcagagcaaagttccagtctttccccaaaagtttagagcaaaatttaaaaattgtatcattataaactttgaacttcgaatgaaataaacactctttacattatgcaagttccatgttggagtcatcgacttttatcgcattcaagttctgattactctctatatatgaatatattgcaacactgtatcgacagaagaacaattacacctggtcttctcgttcacaaccgagttttaacaagtgggtttgattcaaatgttcatttaaacacaaaacttgttatcttctatgctaaaattggtcgagttctggccgctcgtagtatttttgacagaatggaagataagaatattgtatcttggactgctatggtttctgggtacacccaaaatgggtgttttagagatgctttaatggtgtttttggaaatgtgtagaggtggtgttaaagttaatcagtttggatatggcagcaccttgagggcttgtacgagtctgagatatttggagactggttttcagatacaagggtgtattcagaagagtaggtatgttgagaatttgtttgtgcaaagtgcattgattgattttcattccaagtgcggaaagatggaagatgcttgctctgtgtttgagagaatgactaagagggacttggtttcctggaatgcgataattggtgggtatgctgttcagggttactctgaggattcgtttagagtgttttgttcattgataagagaaggtaatttaagatttcttttgttaaagttcctaaacagctatgcttaaagactttgcctctctcttttttctttggttctacatttttgaactagcatgcatttgccagctctgtaatttgattctcagtcaatcatatgttgacaggatgtatataaataatatatgtacatacaatgttataataagttttaggatattaaattcatgttcttgtttgaaatgtaataacggcggtcaatttgaacaggagaacaccctgattgctttacattgggaagtgttttgaaagccttagctggaggcagttttcttgtgaaggttagtcaagtgcatgctctcaccatccaactaggctatggctcatgtaactctctaagtggctcactaattaatgcttatgggaaatgtggaagtatagaaaattcttttaaattatacatgagtatgtcagaaaaggatattatagcttgcactgccctgataagtggatatgcacaagaaagtaaccacggtagagttgccctggatgtcttgaaagaaatgactcgtatgcacctggttttcgatcaagttgcattatgctctatgcttaatatatgtgccaacataccctcattgaacctaggaagacagctccatgctctattttaaacatcaagcttataatgatgtggctatgggaaatgctctcgtcgacatgtatgcaaaaaacggag

SEQ ID NO: 219654 - DNA, 2772 bp, Cannabis indica
tcagaaaattatgaaacttcaccaaaaaccttagaataaaataaggaaacgaatctacaaaaatatttgagaaaaaacacctcagaactacccagaacgtggtcgccggtattcacgtcggtttcgtcgctggcaaagtataactttgtccccgattgctcttgacgcgtctttttaattggggaagctctccacagtgctcaggacctcaaaatgatcaagatcaaccaaagaaaagaggcccaagttggcagatcgatcaaagtggtctccttcattggcggtgtaccgtctttaatggagtcaaaatcttagtttttcgtttggacgttaaagctcattttcttacgtcaaaaaacaacccttagggtcccataaactcatatctaatctccattgactcaagaacaagcttaaacacattcgaatttgtgtaggctcactacaagaaataatatttttagaggcgcacttttgcgcctgcataaatcaacgaatacgcctgtaaaattttttcagtcgcaagtcctcaagcgccttgaattctgcgactggaaaaaatagtttaggcgcattaagccaaaagcgtacagaaaagtttaatactttcgcagatgcatattgtgtccctgcaaacattacaacttttttgctgacacactacacgcgcctgcaaaataggcacaatattaatttttactaaattattatttttgcagcaatttcaaaatattaaattaataatttttttattatatttataatttaagatattaaaatcaattagtataaaactcatgtaattttataaatattgatctgaacatcaatccatacataaatattatatatcaacattaattagaagaaaaaaattatgaacattaattcaacaaaagaaaaaatacatgaacattataagaaatgggtatcactaaacatatgatatttcacttctatttctaaaatattgccttgatttctcgaatatatctttcaaccccaattctttaatatgtctcagagtcaaaatttgctcaccaagtctgcaaagtataaaaataaaattatcatcttctcaataataattatggtaagtggcaaaatatcattgaaacatagaaaaatcaaatttgaccaacactaacactaaacagtacaagctattttagttttgtgttgttaacttactgcaatagtaccacattgtgaaaagtaaaaactttataaaaacatgtacaatagaaaagtaatgtctttgtattttgattaaaaaacattatattattgaattgaagtgagcaaaggaagataaattaatgtaatagaattagaaacaaccacctttgtgatcccacacctacaatacaagtagaagagaataataaaatagaaaagagattaacaaaagagctgaggatagttagtttccatggaagatggctcaccaagagaaatgaaagttggattaggaggagaagctccatcaaaccaagcttgggtaacagcaaacaaagtaccattgataacaaatttcaatcattaataatttcataaattaaaacctttaaacatcaataatcccgaaaccaataaaaactgaataatatccaaaagttactatctttatctttctcttcttcatccatacatatcctctgtcaaatacatttcttaatatgtatctttattttgttcaagcttcaatactaattcataactttgtctcttctcctaaacaatatcacaaagtacactagtgaagattagcataaattatccattagtacaaacgaatttcaaaattaaactgaaatacatatataataaaaatgtttaattgactctatattgacacttttatgaaagaaaattactattatttactctacattgacacttatatgggaagaggttgttggaccaatcactgagttggttcaatcattcaggcaagaaatttatacataaattggaaataaagctcaagctttaggcttgtgaaagtgaaattaagacattggaaagcttaccaaaaaaattgatcttgtgagctttaggatccacagcaaaagaaaatcttgaaacatagataactcacctgaaaattaaccatataaacataaaagctcataataaagcacaacattttcttatacctccaacataatccatagcttctgaccatcgtagctgagcttatgagaggtatcaatactaggttcatgcatttctgatagattcgtagccattttctccaaattctctcaagtaaaaatcttatgaggaagtgtaatattctacaaaatgaaaaaatcgaatgttcaaatactgaaaataaactcagataagataaggattgaattagaaacctttctagaagctccaatccaaaatttaatggcaatcaacaaattaggagtaaacaacaatggcgacggagaagaaaagattgtactagaggataattggatgcagcaacaatgacggtgaagaagcagtgacgacggcggtggagacgcaacgacaacagcgacaactacaatgttagggttattttgtgccatggagatttgacaaacttctctgtattatttctattgcagacgcgttcaacatgtctggaaaaatactttgagttttacaagcacacttcaagtgcctacaaaattaatgtcactttcacacacaattgcagtcgaattttcaatttacgtctatattgacaattatactgggacgcattactatgttaactaactaactgtcttc

SEQ ID NO: 219655 - DNA, 2554 bp, Cannabis indica
tttttaaaaatattatttatcttatagtaagggtccaaaatttttattttgtctatagtccatttcaactcaaggccgactccgataataactaacaactatacttgtctcttactacctgaaagagacaaataccatgtgtatgtctttcctagcattcttttttatttgggtgaagggttccaattagcttattataagaggaattatgctttgttttttagaaggttagcttcatgtagtagtgtcatttttaataggatggaaaactttaaagtacatattaataacctaatttaaaaatgataaagtataaaatttccaggtggtctcagaattatttaaattaatgaggaaagaatctctaccaattattataaataaatattaagtaaagtataataaaataatgactaaatatagtggtttttgtaggtgtcaaaattatttaaatcattatttaatttcatctccaaatcactttttatatttatataaatatgttgaaaaagacaaaatgtgactcatacatacttagctaagaatatatataagattaattattgaaatttatctaagtaatcatatcatgtatcattgcatctctttatttaatgtttgttttaaaccttgtaattattaatactcctaaatcgaattttttcacatgcaaaaataaaatatattaatcgaaattatttattggtaggaaacaacgtaagacatatttaaaaaaaaaaaacaaaaacataagacttggtaattatgatatcagcttagatccatttctccatctcatctctaatttattaattatatatatagtttcaagatttgtatatgcatgtgatattgtttattaattacaacttgtctagttgactggttttcaacataatatattttgacttaataatctatactaaattttgtatgaacttagtgtataattataatccattaatgatattattattgtatatatacagggaaatttttctctattgtttccaattgatataaaaaatatacacaaagctgtccatagtagtgactctggcgtctacgacagcaatggaaggtacatattttttagtagaaattaataaagacgagcagtaacacgagtcatgtaaatttttctaattattttgtgcctcgatcgacatttttataggtttctcaaagcgattcgaatgggctgtccagtattttttttaaattaattatatttttgttttaatcatagagataattagagagtaacataattatgtgtatttatgtttttaattaattttcaggtttgttcctttaaaatttgatgaaatgttcaagaaatatgctcacacacatcctaacgcgttaacatcagatgaggttatggcgttgttgaagggaaatagagtccccaaagattataaaggatggtaattaattaaatttcttaattatttaattatctaattattattcattcttttggttctatttataaagctatttgatcaattattaattgtttttaatcaatatcaataagtaaggtatattataaattaataagttattgttttcataataaattaataagttattataacttgtatctttttgacataattagggctcaaaacaatttgttgcacatttgggccgggcctaaactgacatagattaggcccgtgtctaggtctcacttggtcttggtccaaataaaaattatacatattttcagtagttttttaacaggaaattaccctctataatcactttttatttcatatttttatttttaccttcattttactactctttaatttatacccacttttataagttatattcccattatgtgcattagaaagtctagttttaataagttttgtgaggttatatttggtactttgattataaaaaagggtatttatcaattaaaattattttagagttatatttagttaatgtgtaataacaaggagtagtttttaacttatcccttttttaaaatactacatatttttttaaaaataaaaagccgaataattttttattttactaaggtccagtatccaatctccggaccgaccttgcacacttgcatatttataagcacaagtgcaataaattgtttaaattctaattttgacattacaaaacaagttatttatacattgttgtaaaaaacaagttatttatagtaaaaactagggtgttcgcagtgcgggtggtgtggtttttgactattttttcaaactaacccgtacgtgcagtttttcttattttccaaatcgcacccgcaccgcaaaactaaaaaaccgcactgcaaaaaaatagtgcagtgtagtgcggtttatgcggtttggattatcaccaaataattaaattatcacaaatacaacaaagtttgagcaacacttatcaaaaataccataaggcttgaaaataaaaatgaaaaaaaaaaaaaattcaacaatacaataagggaaacttacaaaaatactggaatttgagttaacttttacaaaaaaactgttacacggaaaagtttaca

SEQ ID NO: 219656 - DNA, 3212 bp, Cannabis indica
ggcaagcttgggcaaatgtctttgattatattaatcttctgccaattaacacgtttcagtttaaaaaaaaaaaaatagttattcacaataaattagtctgaagttgactcattcaaactggggtgcacaatcaaaggtcttaggaaatataagacaaggtctctcgcagttaaataatgttttgtttttgcagttagttacttctctaattttggtttggttcttcccaagtcaagatttttctgacattatctatgataatacaatatagttagcttgggtccactccatgaattattttaattatagtaatagaaaattcattattttgtgcttgtgggttttgagttatggtcaatagaaattattgggtgaagaagaaactttcaagtcaaaaatccataaacccattgagtttgccgtgtccacatctaatttcccatcctctatatttgctccatcaacgctttctctctctataatgttgtctaatttgccataattgagttgaaaaatacagctacagaaaatgaagttctttcctccttgtatgatttgcttctcctcttctcaaaaaaacgacattgataatagttatggtaagtgtacatttctggtattctttcattttttttttacatttgattgctcatgactgatttttgagcaaaacccagatgaggaaaacaatgaaaacttccggttattcacttataatgaactgagattagccactaatggattcagctcatcaaacaagattggagtaggtggttttggcactgtgtacaaggttaggaataatatcacttttgggtctaaattttcttttgctgaggatggtttgtgtattcatatcatacgagttgactttttattttccttttcttttctagggccggcttagggatgaaagtctagttggggtaaaggttctttctattgagattgaatccatgagaggagagagggaattcatagctgaattagctgctctttctgatatcaagcatgataatctagttggccttagaggttgctgtgttgatggagctaccagatatttggtttatgattacatggaaaacaataacctttcccacactttacttggtaaccaacccttgtatataatgattattcatcgaaaaatactttacattctttgttgttttagtaaattttatctgggttttttgtgtttatgaaaattcttgctttggtaaaataggtggagagcagaatcgacttaaatttagttgggaaacaagaaaacacatttcattggggatagcaaaaggactttcctatcttcatgaggaacctcgtatagtccacagagatattaaagcaagcaatatacttctagacaaaaatttcaccccaaaacttggcgatttcggtttatcaaagattttgagagagaacagctctcatatcagtactcgagttgctgggacaatgtaagtgaaaaaatgttcatactcttttattattgtgcgaaaaaatgacttcaaaacaaggaacttgctaatgtggtttctccaaacaatggcttaaacaaaaaaggggctaccttgctccagagtatgccattagtggtcgtttgacaaggaaatcagatatttacagcttcggtgtactgctcttggaggtcgttagtggccgaaaagtcgttgattttgatatggaacatggagagcattacctggttcagaaggtaacagagggaaaaaaaacaaatatgttaatcaataatagtagaccgggccatgttaatatcatgcttgaaacatattaaaagagttccttttgtgcaggcttgggaagcttacaagggtgatgaacttattcagttagttgattttgttcttgaaacaaactttcctgaagaagaagcagtgagattcatcaagatcggatttctttgcgtgcaagaacatacaagcctacgtccatcaatggctaccgcaataaagatgttagctaacgagatttcactgagagatgttgaggtatcacaaccatgggctggtttccgatctcatgtttataaaaatggaccaccagaatttgtctcaaagcactttctcaaagggctccacaatcagcttccaaagtcctcgtacatcttatttctgactaccatgtttttctttttcttccttttagtttgtttttttttaacacgagatttttgctcatcctaactaccagcttgtgtagagtccacacatgtattgtattgtgtacatattgggtttggatgagttattttttttacttccagactcatgactcagttagaatagagactcttgattgtgttttgagtacatataacaacagtgcaaaatgaattgtgtatttctttccttaaattctgcatttactatgaatatacaatataaaaaaatttgacaccaatgttcctaactcttatgttaagagaaacattgttgactgagcataacataagaacaagaagcatagacaaatctccttaccctgaaacttgtaaaagaaacaagcttgaactgataatcacttagtacataccaaagactttaaagatgtgaacactgatttctggtctatgatgtgagagtctagttctcataaagcttaccatgtcattcacttctgatcaaccagtcagtaagagcaaaacccgcaacaagcaggcatgcatggctcctcgcacgccatctaacaatcccaccaatttgctgatgggctcagcagatggcatacagggagccaggcatactaatatgaaatgacactatataatttgaaatgaaaatttatttcttacattactatatctcatcaaagcttcaaaccagcttcatccacattgcaggctgcaaactactctgtcaggattgatgaactaataaggatgatctttttatcagtttataggagatctgggggtgtatttatttataaaggggttaagctttgtgttctcaggctattaaatcaagtctcaatcaaggggcttctgtaagctgacccatactcctttttttttttactttcagtttgccctaaccaatcaactagcttttgagttggcaatttggcattaaagcaaacatttctagactaaaccaggtactctctacctgaactgccaccttccttctacacttttgtctcataactcggttaggataggcgcagggggccgtggcccatggggt

SEQ ID NO: 219657 - DNA, 1779 bp, Cannabis indica
  modified_base (1774)..(1774): a, c, t, g, unknown or other
ataaataaatggctagacctatacgatacaaaccaaccaaatatctaatttttaaacattatctatttacatataacttaattactcacacaattatttaatttttaaacaacaactaagtattatattccaagatcattatccaattaatcctttaatttatttagtcaaactttataatcacccaaacagtaactttcgcattctttgattataataaaattcaaatgtctagaatgcaacaattttctttttctttttattattatttttatattccaccttagctcataaaaatactataatatttaacaattaacacaactttgcttatcttaacagaaatcatcactaatactcatctctatactcctaatctgtagcaataaaatgataattattttttctttaaatcgggtattacacatcacctcccttctgtcttgctcattcacatcctcttcaataaaactcaattctaatgaatcctctatcaacttcttcgtttccactatattgtccataagattaactgagaaataattgtcactggccttggggaaagtcattgcctcaagaacattaaaaactatttcttccccttgcatccttagctgtaatttgccattctaaacatctatcaatgcttggccagtttccaagaatggtcacccaaggataatggacacgttgctatcttcctctatcttaagaacaataaagtcatttggaaaaataaacgtatccacctgacaaggacatctttgattacccctcttggataagccaatgagagatcagctagttccaaggttacagctgtaggctttgcttctcctgattgcaatctcttaaaaactgacaaacgcatcaggttaatacttgcccccaaatcacaaagagcatttatcccttctatcatttcgatggtgcatggtatggtgaaactcccaggatcttttagtttgggagggagcttcttctgcaatatagcactatacactctttagttaatgccactacctcaaaatactttatcttccttttctcggaaaagatctctttcatgaactttacatagtttggcattttctccaaggcctctacaaatggaatgttgatgtgcagcttcttgaatacttccaaaattttagaaagctacttgtccatgttgttcttgcaaagcctctatagataaggaattttgacatggtgctcgatgttgataggtggtgaaacttcttttgaagtaaagaccctcagtagtgttcttttcctttggtgttggtccctgttgatcctgatctaattcttccactagttatttctcactaggcccctcatacttcttcccacttctcaaatgaatttccttaaaattctccttttagtttacctccgttgtactaggcaaattaccttgggagcaattagccatttgagtagccaacttccccatatgagtttctaaggttataatggaagatctggtctctatcatgaactgaagtagcaaatctattttaatgttagaccctccactaggaccttgttgtttggaatgttgttggctttgttggggctgagttctctattggtagaaaccttgatgctgcttatttgaagcctatccttgataattctgacgacgaccccctccttggttgtaaccatagttattgttctaagaataactcttaatggcttgagcttgatccattgacaaattattcacatccacctggcaggtgtcatatgagtgagcccccccccnccaca

SEQ ID NO: 219658 - DNA, 3331 bp, Cannabis indica
gaagacgtatgggaatgaatatgggaagttattaagtttggtacctatcctcataattcactacccatcatctacacctgtccatctatatacacgtttataattattaacaaaaattataatacacaattaaatttggagcattttatcatttatttttcatagtgttatatgttttaaatttaataaaaaataatattaaaaatcacttcctaattacgttggtaagatattagggtaaatttatggtacatcacacttttgtcaaccttcaagttgacaaaatttaaatattttattattgaataaaatgttttataaatttttaaaataattctgcttgagtaaaattaagtaaacgttggaatcgattgttgttaaagaatcaatgaatgagttgtggttagagcttataatataagaaaactaaaataaaaaagtgaaatgtggtgtatttttgtggttttggaagatctagctacaaaataattaaaaactcttttgagtaatttacgacataaatacctaagtttaactctagttgtaaataaatacttaagtttaatttttgacgttaataatatcttagttatatttttggaactctataggtacctaaccgttaaaatattatgtcattatctacatgtcatttttttattggtatattttaattatttttttaaaaaaataaaaatttaatgacttggaccaattagaaattgtcacgtcgcaatttacttaacaattaatagtcaggtacctacaaaagttctagaattataacttaggtattactgctaaaaatttatttgtaactggaagttaaacttagatatttatgccacaaattactcaactcttctttataggactctaatttcttttctccaacttttacggttcaatttgaaagcaaacaactaaagcgtttcacttattgaacaagattttattgtcggtcttggatgctgaaagcattcttagggtgatctcgtagttccgaataaagacaaattttttctatactcatgtaaaaaaaagctttagtattttaattttattgttaaacttattcaaaaatatttctaaatcttatacaaaactaggttcattattcaacaataaacacctcattgaaaaaacataaataaaataccaaaattataccaatttgggtaagaacaaaacaaggactactcactactcaataagaagtgataaggattgtctaattttaatattattaattaattaattaacttataaaagataaacataaaattataatattaattaaataataataataatagcaatagcaatgccatgcaataattactcaatcaaattcaaaaccaaaaccaaactctcaacaaaatcacaataaacatttttttggctatggcttcctctcttgctcgttctctcaagaaaatctcttctcatgcttcatctccatggagatacttctcaacatcaacatcatcatcttcttcttcattgaatctttactctgcaatcaaccaagctctccacatagccatggattcagatcctcggtaacactacaactatttctttttccattttcctttctgggattttcatttcataaattaattttcagtttatatatataaaaacagtacttatgtgtttggagaagatgtggggtttggtggggtttttcgttgcacaactggtttagctgatcgatttggtaaagatagagtctttaatacccctctttgtgaacaagtatgattttttcttaaaccccaacaatttatttcttataatattcatcataaagctctaatctttatctttgcttgtgttaattgtgttttattttcagggcattgttggatttgccattggtttagctgcaatggtaggtttttattgtttttgggtactttagttttttggtttctaaacagtttttttgagtttgaatgtttgatatctttttagggtaatcgagctgttgttgagatacagtttgcagattatatatttcctgcttttgatcaggtaaaagggtttttcattgtgttattatgtcataacttttgaacaagctgttcttttttgcttactatatttcttgaattacaagtggcttttttagttttacttttttaattagtttttgaatttttggtgtaattttagtggctctttttcttggctttactttttcttttggattgggtttttttttttggatagactttattttagaatatggttggtgtgaggaaagagagaaaattggaaattaggaaggaagggtaggtgggtttctttttcactgtttcatttggtatgaaactgaaatgtaggagagaaacccaaaattcctgaatgtttagttgtataatgatatagagttttactgtgaatctcccattttaacctagcatctaaaaacacttgctagaacatatatatatatatatatttatatattttttttcatgtcgatgctcgatatagtgacaatattgataatagagttctaacattctagtttaccgcgtgtgttgaaaaaattttaaaattattttcggtactataaactatgtagtattttttaaaactttataagaatggtataattataacgaacaatgccataaaacaaaattagaaaaaaaatattccaacacgtgtgttttttgattctgagattgtaattaacactctttttatatttattatggaacagaatttgattaagattgattattgaaatatatttgttcaattagtacaatgatacttttataacatttgaggggtcaagtcttttcattactttcacttctctctcttaccaaaacacagtcttgaaagaaaaagacttcttttttatttgtagattgtaaatgaagctgcaaagttcagatacagaagtgggaaccagttcaattgtggtggtaaattttcaacttttttaaacctccttttcttcttctgtgctgtttcttaatttcctttctctttcattgatgaggttaatgtaatttgttacttaggcttaactataagaaccccttatggagctgtgggacatggaggacattatcactcacaatcaccagaagctttcttttgccatgttcctggtcttaaagtatgttttatgttttatgtttcttagttactttatcccatgaaaaatattgtaacaaaaccaacatgttgttaaagtattggaatgtcattcctactcgtattcccattcacattcctatttttttgttttcagtctctccaaccaaataccacctaagttatttgcttgacattattggaaaat

SEQ ID NO: 219659 - DNA, 3672 bp, Cannabis indica
atgtttgcactattcatatatagaaatttcaaacaaaggtaacaacaacactaatatcatctttatcacttgtagaaataaggataactactcataatagtgttattataacttctattatcaaactgtgaagaatagtaaccaaacaaagtattacattttttatgttccataatgtataaatcaaaggataaagatagtacaatagtcataacaagaagtagtggtgatggtggtggaaacggtagtagagaaacctcatcgagtaattggcaaacatctcggcaaaaaagtacaaagaggactaaaacaattcatccacctattgaatgtcattggcaattgcctcctataaaggaagacaaaaaatcatctctttcttcttcttcttcttcttcgagctttaagtcgatgttatcatatcctctaaaactcggtggagcaatgaaaaagattggaagaacaaaaagcatgcaacaagttcttgaaggcaaccatgatccgaaagatgaacatcttgttcaatcttttcgcgaaatgctttttcttgaggttcaacttccaccaaaacataatgattatcatacccttttgaggcaagtaattaataatagtgttatcatagagttgaattaaaggtgttattatatgttttctaaagtaaggtattttttgttatagatttcttcgaatgagagactttaattttgctgaagctaaagaaatgttcttgaattatcttaaatggagagaagaatacagagttgatgctattcacaaggttagtcttatgcaaaattattatatattttttaatgtaaattacaaatctctgaaaaaatataattttgatttttgcaggagttcaaatttgaggagcatgagagagtaaagaagtgttatccacatggttttcatggggttgatagaaatgggagaccaatatacatagaaaggattggaatgattgatgtaaatcaactgttacaagttacaactgttgaaagatttgtgaggtaccatgtttcagaacaagagaagacattgaagcttagatacccttcttgttccattgctgcaaaaactcatgttgcttcaaccacaaccattctagatgtccaaggagtggtaactaattcaaatattatattggatcggatcctgtattttacagaagttattgatttgatcttctgttctgttaaacaacaaattagaccttgtatttttcaaaatggtacccgagtccaatttttgttaaaatagaacataatataaccttaaagtgttatgaccacgttaaaaactgagctcagtgaattattaattttgtataattttaaaaaatacacgatccgatttgttattttgaaaatggatattaaacattaattttgaaatgtttgaattataatagggattggctaatttctcaaagcctgcaagatacatcttcatggaaattcagaagattgatagttgttactacccagaggtatatgttatattatatctattattagtaaccaatgatgaatgaaatatggtatatacatatataatatggtgttatgatatatatatatttatgtatatatactgtacatattagcagacaatgcatcgtctgtttattgtgaatgctggttctggatttagaatgctgtggaaagtagtcaaggcttttttagatgcacgtactctagccaagattaaggtgtaactagtaactagtaactcatcattaattacttgttattataatcatcaaactcaactatacatattataatatattcaggtgttgggatacaactaccttaatgagttacttgaagttattgacctaaggcaagtgtttaattattaagattttcgttactaattagttacaaatgaattaagaatataataattaatgttgattatggatatatgaaagttgcttgccaacatttctgggtggaaattgcacgtgtgatgactatggtgggtgtttgttaagtgataaaggaccttggaatgatcctgacattgcagaaattgttcaggtactctaaattttacattaactaccattttataatggttaattaaaattttaacatctaaattttgatatatatattaaattgtgtttattgaagtttttaggccgttaaaaatttatctcaaattattgatattgttaaattcaagtactttcatccaattttactaatggatacttgacgcggataaaagtttaagaggtacgatttagtatatgttgaaatctgggaacacgatttgatacattgacaatcattatgttggtaaaaaattaaatagaattgaacaaaaatccttgaatctgaaaatctcaatagttcgaaattcatgaacgacataaaaaattcggggatatgatttggttagtatcaaaaatctgggagtaaaatcttaattagtcttttataatttggggtaaatactattttgaaccctgtttttgcaaaaattattaattagaccttctattttgttaaatgacaaattaaattttgtatttctaaaataatactaaatagtaccctaaactgtttttttgttataaaacaaaatttcctaataacttgatatagaattgttattacaaaattattatgttttttatatctgtgctagaaacatgttcaagttggttatattaaaaaaattatcgaaaaattaaactcagagtcttatttgtactattttaaaaaatactgaacaaacgaaagattcaatcgatattttttgcaaaatacagaatctaaactgatattaaccttataaattaccattacattaaaatacggaccatatatttactgagaaatgatatggtttatgatggactggtgctgaggacaggatttattagtaatgaaatttgttaataataagtatgaattaattttttgtttatgttgtatataggcaattacgacaacaacatatgaggagaataacaatggtgaagaagatcacattgaaacaacagctccacagtctgcattggcacgcaatatggtaccctatttataaatacacttaatattataataatctgatctgtttaattattatttaaaatatagattattagaataattgatgatatatgttgatattatatgacagaaaatcagaggtttggaaacagcacttgcagacacaaaaaaggtaagttcttgagttaatttgaggttaattataagacatcatatctaatatgcataatcatatcatataattgtttatgtttctgtaaatattgtagaaaattgaggcattggaagatctacttgatcaaaccaagatggtaagtatacttactctccattagtaacttagattttttctaatactcattttgctttgtttttcataaattcttacaaaatgtcatttgattattacacattctacaccttgttaaaaaatcaacttttttagaggagtgctaattacaacatcttattacaatttcttagttaatttatatgcccgaaatcacatgttggaatattttcttttcaattttttttcacaacgatattcgttatagttacaatattatctttgtaaatttttaaaaaattccaaatattttacagtagcgataatagaatttttaatattcaaatc

SEQ ID NO: 219660 - DNA, 1769 bp, Cannabis indica
gtagcgtgccttagcattagggcgttacactttttttttacttgaccgagtttttgtcttattagattttttggtaaaatttttaatgaaccaattattattatagatattcataaaaaattattataaaatattattaatgaatatctaaatcacctaaatttattatcactataaatatgttactgtattttcttttatttatttatttagttccattcgtttaatatattttgtaaaagtaggaaattcccctataaaaataaggcactcagaaaattcttccattcactctatctcatctattctagttatttctcatttttctctacattatattattttataacatgtattcttaaattctttattttccattatttatttatttattttaaatgtacgtgcaacccacgggatttaaatatacataaaaaaaattgatgcaaattaaatattttgatataataataattaaagaatatagagacataaagtgtcatgtgatcaattaggttcattgaatttgtttataacttttttttaaataacacttaacactttcttcttgtgacatacgaactttctttccatatcacccgatcaactttctttgattgaagcaattttttccttttcataataataataataaccttaaacaatttttgtcatgttcttctatttttatattatctactccaaattataaaatgagactgattgaaggtttggtccaattataattttacatacataaaaatagtcagtacatagtctcctttcgagacctgattgcgtactataaattgcaatattgttgtactcatatgagcgagccacattttttagtgggactttcttttttcttttgttaaaagagtattaatatatagaattatatgataaaaattaaattatgtcaaattaagatgaaaaatgaaaaaaattatagaataaaaataaaattatgtgagataatatgaaaatataaaatttataccaataaaaataaaaatatataaagatataaatgaaaaaatataaattttattggcaaaaaataaaatatataaaaatttaatttatagaaaattgggagggaaatgatcacacaagccagccccttctcatatgtaatagagaaatgttataggataccaatagtgcttagcactctcttatgtgtcaatatcgttattggcccaactaagtatcaggtctcatataatttaatataataatttttagggagtattgctagccaatcgcaacgcgacatgttgagaaggtactaggcaccactggtgtttaatagcaatactctatgtaatgttgttatttactactttatttatagtggaacaagatcaatattaatagtgtaattaattcatatattactgtatattaaatttaatttaattctatttttattataatttttattttcattctgattcctatttttatgtttttatttcaaattcaaatttatacatcatcagttggttttttcttttctttcattgttttagagaacatatcagttgaatttatgcaaatattataagtaatgattagggatgcacatttttcttactgggatagggtctcacggggacccgctcctgatggagcgaggatttctcgcctaaatgaggaacggggcggggatggagattactttttatctctgaatgttaaacgggatagggacgaggatcacacttcccgcaacgcggtgacccgtttagtattttatctta

SEQ ID NO: 219661 - DNA, 1853 bp, Cannabis indica
aaaataatttccaacattaaccgtatatggccttgttcaacttgcagacataatcaggtttttctgtgtcaatgaagccttcgggctgggtcatatatacatcttcagtgagctggccgtttaaaaacgcattattgatgtcgacttgttgtatatcccaattatgttgagctgcaagagtgaaaactattcgaatggtgcaaggtttgaccccggggctatatggctcaaagaaatccactccgggagtttgttggaagctacgagcaactaatcttgctttgagtttattgaccgaaccatctgcattatactttatcctgaataaccatttgttagtaaccacagtcatatccggagttgggggtactaagacccatgttttctttctttttaaggcagaaaactcattattcatagcattgttccacttaggattagccaaaacttgtttgacagaaattggttctttttctgtttgaatatcagccaggtaaactttgggtttaaaaatacccattttggaacgagtgatcatgggatgggtgttgtgaggtggtgggggtgatgtggtatgagaggtgacactgtgggaatctggtataggtatattgttgttgtgagagatagactgagatggagaatgaccagacccgtgatcttgaatggataaattttcttgtaaagcatttgacctgggacttgagacattgtttataggaggtatgtgattggtaggtgttatttgggtgggaacttgaaagtcatttgctgaaatgggaagaacagtagtgcttttggaagagatagattttgggaacagatttttatatggaaattcttcttcattgaacttaacactcctagccacatatattctcccactaggatggagacatctataccccttttgagacaaactataccctatgaaaagacatttagatgaccggaatgagaccttatgagattgatagggccttagtaagggaaaacaagcacagctaaagatttttaacaaattgtaatctggtttttgttggaataatttttcaaagggtgatagataattgttgacaggggtagggagtttattaataagatatgaggcagatacaaaggcttcccaccaaaattctaggggcatttcagcttgggcaaggagggtcaatcccacatatactacatgcctatgttgcctttcaactctcccttgttgttggtgagtgtggggacaagaattcctaatcacaaaaccagcagctaataattgatttttgagaggagaaaattctttaccaagatcactttgaatacttttgattttggtattgaattgtctctctataagggcattaaattgattgaataaggatggtgcttcagctttggttttcataggaaaaatccatacaaatttagtaaaatcatcaacaagacttagatagtatttataaccatccatagaaacatgaaaagagggtccccaaacatcaatatgaatcaattgaaaaggtgtagtagttttattggctgtgggtttaaaactaaattgacgcatcttgccaatttgacaagcatcacagaaagttacatgtttacacttgacattaggagtaacatgagcaagaattttggctaaaactggcttggatggatgtccaagcctacaatgccaaactgaaacagatttagacttgtctagagccgggttgctagtggtagtgcaattaagagcagcaggaacactgctgagatttcttggctgatcttgactggtttttgtaggcagggagggtgacttgaatggctggacttgagctgtaaaggccattattgagagtaccctttag

SEQ ID NO: 219662 - DNA, 3423 bp, Cannabis indica
aaataaagtctctcaaattccattctatacttgatatatgaatctattggggttttggatcagctctccaaattcccatctagttaagcactgaaaagaaaatctattctttggctcttgtaaaatttgcatgtatatatattaatactatttactactgtaattttcatgtactactctatttcctgatccagccaacaagaaaaaaaaatcatgttctggctgtaacagccttttaaaaaagttgtaagtttacatgaaattagtgtatgttttatgtatgaaatgttattatttacctacatgaatttcatatgaaaagattacatagcagaaagagagggtgagtcatagaaactccttgtcctctaatcatgttcactgcaactccttcttccattgcagctacttccctccttttcttagcctctaacttcccttgctttgctcaaaatgtaatcttcatgttcttaattttctaacgttacaattagtcattaatcaggttttttcatgtttagatggataattttaaagcccctttagaattacattggaatttattcaaatgatatctaaagaagagcttcatgctacaaacattaatcaataacataattatttttgcaggattttgggtccaacaaagtaccatcttctttgatgagcaactgagtagagattagagccatagagtttggtcatctaacctgtatatagttttaatttgttaatggctgaaaaagtaatagaaataaactcagttgttaatggagaaaattgagtgtttttattggtaattatttggaaaagaaaagacattcccatgttatttcatttatacatatgcataaagaatctaatcacctaatgggtaagaaagaatctatacatcatgtgccaaatctatcatatgttattgtaataagaacataacaacatgacaatggaaaaaattatcttaaaagcccctcaaattccattttatattagatggttctactggggtttatttaatttaaggaccactgacaggacatggaagaaaaaaaaactattctttgtttctcttgtacaaaaacagttcatattataggtattgatcataattcatacatatacatctcgatggaacagacaattttcgaagtgaagttttttattacttactaatgtagtttcactgctcttctagtgcgctcgtaactaatttccaaatctggccaaagataaacaattgaataataaagtatttaattaaaatttaaagtgttaatcacattcagatttataaacaatcaaaacgctcaaaatatcatgtcatgtgtatgctttcataaattattttaataataataaactaatgatttaaaaaaaaattacacgttaattaaattaaatttactaattatttaagacataaaatttgttttagcattatacaaaaattaaagttagggattctcttttaaaaatattcataaagattctattaaaattctacaactaaatacttactctctttagagttgccacaaccaaaattttgactattactcggcaacaccggccggccggataagcttatggctgacttaactcagtcatttctttacttacaccacaaagtacatgtgattcacaagacccaataaaaaaacaaaagcatacattcatgtatagacataaccaaatataaccattaaatcatactatatattacatatttaatagtccaatgtcactatcgttatctaatgggacaaccgataagtaagaagtctagtaatgatttcaattaaagcagtactattttttacactattgcataatgaaaaaagataataaagtaataattcttttatttatttatattgaagaaaagaatgcaaatatctcaaactcgtaaaacatttaaattgacaagttgttacaaaggctttcaaaagacaagaactataaaaagggcagccacatcaaacaaaatcatgtgtggatgaaaatgcataatgataaaagttatgttgaaagtaggggtgtgcataacccatcgtcaaatattgaattagatattatttttaaatatccaacatctaatcgaactaattagtattttttatttagttttgatgagtaattagattttatattcactacaccaaaatataccattagtaacatttgaataactaacatttgttaaaaaatgtgagaatagcactattttagttacattctatcaaaagtgtcactttaaagaaaataactaacatttgttttagtaacatttatgtgaaaatgccattatagttataatttagtgtcacttaataaaaaatgtcactaatttacaatcatcaaattttactaacactaataaaaatgtgactaaaatatttattattttaaatatcactaaaaattaaatttattattataaatattaataaataattgtttaaaaataaaataatatatacatttgtaaatagcctaactccctaaccaactccataagaaaatgtcaaaccccaagtaaccctcaatacccaccatcttctttcattttttttttttttaatttaaaagtagatcgcataggggtgaacatctccatataaccaccatttttaatctcccattcttaccatctcaaagagatcatctcacccttttatagaaaccctaaacaattgctatttttactgtccacaacaataatgtaccgaaatacatgaaattggtgagtttgtatagttatgagtttgatttatttattttacgggtgtgattaatttagatttgttaatgaataatttcatgatttattcttttaacatttttgcagtaatcaaaaggatactaataaaggtagaaacatgaatggaactttagatttgcttcactttaatatatttgtattttttactcaataatagattttttctctatttcttcccgcgtggtgcatttgtagaatattaggcatccttttttaattattattagtctctcttcttatattctcattgccttgcatatttgtataggtaaagtacttgaattgcatgtgcaagactgaagagaatagaagacttctatatatgaagaaattcgagaaggagaagaaattggagaagaagaagaaacttatacaattttaatgaaatttatttttgttaatttttgtaacatactgttttaagtgtttgttggaattttctgtaatagttgtttatttatttatttttattttttttttgtaagtagttctttaatagttgttaaaccattgaatttataaaatataattttatcagattagtacaattttttttttgagaatcgattctctactattatatgttttggaaagaaactaaaaaaaaatcattgactattcaaaaaaaaaaaaaccaatat

SEQ ID NO: 219663 - DNA, 3072 bp, Cannabis indica
taggttgttaatccaacatacttgttattaaatctagatcctggtaaaataatttccaacaattccaactaccattgatgctaactcacagaacatcatctatgctccatatactgcaataaaatgctttaaagaccatgagtgatgataaaagttcaagaatggatggcatgtttgtcatgttttttacaaactattggcacattgttggctcccttgtcactgcatccgtgttaaatgttcttaataatggtgcagatctagcttcatttaataaaaccttgatcactctcatccctaaagtgaagaagcccagccacatcactcaatatagaccaattagtctatacaatgtactttacaaactagtgtccaaggtcattgctatgagacttcagccataagtaatctcaacgactcataacggacaatattctagtggcatttgaattgttgcactctctcaaaaagtaggaaatgtggttacaaaggctatgcaacaatcaaactagacatgagtaaggcatttgatcgtgtggaatggcattttatgtacaagtaatgctcaaaagaggttggaattacagttgttcaactcattctccgtctgtttataattagtctcatactcattcctattgaatggttcagttcaaggtaatgtgataccaactcgaggtatcaggcaaggtgactcgctatcaccatatttatttcttatttgttctgagggtctctctcatcttttacaacacgaggagagtataggttctttacaaggtttaaaagtttcacaatctgctctatctgtgtcgcacctcttttttgttgatgatagtgtacttttctgttgagcaaatagacaatcagcccgatccattcacaaggctcttcaaatctatagcaaagcttcaggttaattaataaatcctgaaaaatgtgttctatccttctcggataacagaaggcaacatgatcaagcttttttccaagatctccttggcatgccaatacagtcctgtcatgagcaatatctaggtctaccttcttttgttgggagagataaaatgaagctatttggaggcattacagatagaatttggaagcttctctattcttggaaagaacatctgttttcagctggtggtaaagaggttatattaaaagcagttgttcaagccatacttacctatgccatgagctgttttagattgcctgtcactttgtgtcaccaatttgagagtatgatggcaagattttggtggggttcttcagcttcagggaaatcaattcattggaaaaattagaatttttttataaagcaaaagtacaaggatgtttaggatttcgcaactttatacactttaaccaagtgctattggcaaaacaagcttggcgcatcatcgaatttcctaactttctaattagcagactacttaggcaaagatacttttccaatggtaactttcttaaacctgatttgggttctactccctccttaacttggaggagtattgtttgggggaaagaattacttttaaaaggcttgagatggagtgttggatctggtcacaagatcaattgtaaactcaacccttggattccaggacacacttgttttaagccttattttttcaaaggatcaaactccaacttgctggtagcaaatttcatcaatgaaaataggctatgggatatggtgtcactacaatccaatttttgtcaagctgacatcgatcgcatcctaaccattccccttaacctgttttcttcagaggacatactggtgtggcacaactcattcaatggtatttacaatgtgaagtcacgatatcatcttgctgtcaaccttactgagcaagaagataccaacagtagttcatcgatttaacattggcggtctacattctggaaaatgaatctccctcccaatgtttaaatatttgtttggaaaatatttcacaaatctctcctagttgcagctgaactctatcgaagacatatagcaacctccccttactgctccatctgcaattcgtgtgaagaattaatcatgccttgtttttctatccaagagctaaagtagtttggcatttgtcgaaattaccaattaacctgtcaagaacagatcaaagctcttgcgaggacattctgctgcaactttcagcaaccatatctacatctgaatttgaactcgtcctggtttattgctggagtatatggcatgagaggaatgcactctatcatggaaacacagtaaaaacacatgttgttgttgccttatatgcaccttcctttcccaaagaatttcaagcaaacatcaaaagccccatcaaccactgctgctgataaagattcaagaccttctgaattcacacatgcaccaagatggacagccccacccccaggaagactcaaactcaacactgatgctgcaatagacacttctaataattattggcattggggcgatttaagaaactctgaaggttcagttgttgcagcattgtccaaaccattacgaggcaacttcagagcagaagaaatggaagtgttgggacttgccttcagtctacaatgtctactatcgaacaatctttcagtggacctcatagaaacagattctcttttggttgttcaaggactgaaatcctcttacttatttatttctgtttttcatgctatacttaaagatgtaaagtattatctagtatcctatttcccacgagcacagatctctcatgcatcacgatctgctaatacttatacccacactttaactaagttcgctcttagtagatactgattgttcttggttggagacattttcatctccactattaactcttctgtaatttattcaaattaatataatagttttttcttttaaaaattttatttaaaaaaaaaaaaagaccaccgctacactatttacttaccgtttgctgaggtataaattggagaaagattcgaatcatacacattaaagcgaagccacgtggagtgctgtatagatcttgacgttaaatcatgtttctcaaaaataaaatgataggttttttttgttttttg

SEQ ID NO: 219664 - DNA, 5511 bp, Cannabis indica
ctctctctctctcttttattcttaaagaatttatcttaatactttatccatgcctcccttttgtcaatcctgggcctccaagcccatcatcaaagctcatctcatctttatgtagagttgagtaagactaacaaacatcacgagctatttgccacctaaaagaatgatggtgacaaagaggtttcttatcttaagaaggaagtcgagttattaataaagtttgagaaagacttgaagaccgaggtggagaccttgaagaaaaaccttcttaacgattctaaacaagctattttagaattagaagaggtaaagggagtccctaaaattaatgctcgcgagagagtcaataaaatagctactcgttctgtatatagggcttggactgtcaacatgaatatggactttagtttcctgggtgcaaatgccaaaaaaaggttagcgcacttcaaacaaactgaaaaggaagagcagggtggtgatgaggagggggaggaagctgaagctgctgaggaagaagatgaagtcgtttttaagtctcccactatgtagactttgcataatttatgccaacttttgaacaacgaccctcggttgggacaatatcttgcccttagtggaatttttatttatgtaattaatttatatttttttgttggatggctaacttagcttctttaatcacagttctaactttatgcctttttaatatgtatagtccctctatctgttgagaagattttatctaagtatgaattctcatcacttaattatgatccatcgtctataagtagactgaatttaatcgttatataattcttcctttaaattctatatcaagattctttactcattatttcatcaagtaaacggtgaacttgaatattttttaaacaacaaatttccttatggttgttcaacatttttgataaattttataggagtatttaatcgtctattcacaccttagattatgtattattaatcaagattcactgcaggatcttgatcataatatctcctatatacacgagtcgtttattaattcagctcgcatttagcttgatgtttgcaagatttttaataatctcatttctttaacaagtgcaattttcattcttatttttaataagatctcaacttttgattttttgtttttctgaactaactttaattaaatattatatcttttgcaatttctttattattatttttataatttcaattatcttatattttgtggatacaataatatgcctccaagtaattctaaagtatactttatgactacttatcataaataaagagacagaaattcattaattaatttggaaatttacataaaatgagcagttataaacatacaatcattggtgatatggtcttaaatgttcgttgttccaagtgttttttaccagcgaggacttggccatgctaatttattaacccctggtgctattacaacttcaacaacgtatggatcttcatattttgggtcaaatactcctactacgggatctcttatgtttgcgaatacctccaatgctgaagagtcttgaccttacaattttattgaagtgtctcgtaatcctttgttgatatgcagtatttctcaatcgtgcttcatcactcatttcatcaattaaatcaaaggattacttaagtaattcctagttttggttggtcatagaattctgctctatgcgattagacgtttacctcaaccagaagcattgcttcagagtcgaaatcaagtgagaaaggagtatgtcctgtcgctacttttttagtggtttaatgagcctatagtacttgtggtaacttatccacccaccttcctttttatgtgtcaagtttcttccttatagtagggtcttgttaactactttgacttgtccattaggttgaggtcacgagactgatgaaaaacttttaataattttgttcctctcgcagaactcagtgaacaagtcactatcaaatggtgtcctactgtctgatactattgtaatggaaataccaaagtgacacattaatttttgaccataaagtctaagacttttttcggggtgatcgcgactagtggttcaacctcgatccatttggtaaagtaattgactgccaggactttatactttcctcctcctcactctatgggtaatgaccatactaggtctatatccaaaattgcgaatgagtagggtgaggtgatcatggaaagctctgttggtagacttctcagaatgtgttaaagtctttggcacttgttgcatctttttacaaactcaggtgtatctttactgattgtggaacaaaatatccttagcagattatcttctttgacaaactttgctaacctgcatggtccctgcaaaagccttcgtgtatttctataatgatactcttggcttctattggtaatacccatcgaattagaggcatagagcatcctctctgatataacttccctttaaaatatctgtatctagatattttatacatgagttttctcgactcattcttttctaaaggaagttcatcgttcaataaatatttaatgactggtgtcatccaagtttgattagtatcaatcatttctacatcttattctttcatcttgtaaatacttggctcctataatttttcaatggaaccatgttgaggttgtcgactttagactttgatgccatcttggccaatgaatcatcattggaaattttttctctgggaattttgtcaattttgaaaccattaaatttttcaaagttttgttgaaatgtttccatatagttggccattttgattccctttgattggtattatccaagtacattattcacttttaattgggaatcacttaagtagtgtattgacttagcatttactacttcgacccttctcaaacttactaaaagtgctttatattgaacctcattatttgaagctgggaactgaaaccttatgtcatagtgaaacttgagaccttccggtgagaataggattatgcctgcccacgagccattttcatttgatgagccatcaaaaataacttcctgattcttcggtttgggatttccttcgtatctttgttagcatttattcatttaacgaaaaaatctaacagtgcttgccctttgatggctgctcgtgggtgataagttatgtcaagctgtccttattctgttgaccattttattaattgacatgaggcatctggattagagaaaacatgccttaatggatgattagtcaatacatggattgcgtgtgcttgaaattaagctctcaactttcttgaggaaagaattagacttagtgtgagtttttcaagtaaaggatatcttgattctgcacgtagtaaacacttactaacgtagtaaactgattgttgggcttttctatcctctcacactaatgttgcgcttattgcattttctaaaactgacaaatacaaatacaagatctcgccgactaatggttttgaaagcactggtggggttgacaagtattctttaattccatgaaatgccttctcgcatttctctctccattcaaactgcttatttcctcgcaacacattaaaaaattgaagacaattgtctgttgattttgaaatgaagctctttaatgccaccacttttcaggtcaatgattttacctattttggtttctttgttgaaggtaaatcaagcaaagcttttatttcttcagggttggcttctattccccttgcattcactatgaaactgagaaactttttagaggaaaccccaaaagagcatttctttgggttgagtttcatgttatatttccttgagatttagaaacactctgcgaggttgacaagatgatcgtggcttctaactaacttaactagcatgtcgtccacatacatctccttgttgcgaccaatctggtgctcaaacatttcatttacgaggcgctggtagatggcaccttcatttttaaaccaaatggcaggactttatagcaatagagctccatatttgtgatgaatctcgtatactcttgatcagcgacatgcattttaatctagttatatccaaagtaggcgtccataaaagacatgagttcatacatagctgttgcatgaacaagttgaccaattcttggtagtggaaagcaatctttcagacaagccttgttaaggtcaaaaaagtcaatgcatgctctctaagttccattagtcttgcgtaccaagactgtgcctgaaacccattatcgataaaatgatcctcgcacaaagtcattggttattaactgttatcccaatttcagcccacctagcgtggcatgtccacatggtcaaaagtagaagacacgtggagaagaactcatcactaacctgtcaagttagtgtcgtgcaccttccaacctaccaggttagtgccatgctccttccaacctaccaagttagtgcttgaaagctttccaaccttctaggttagtgttttccagccttctaacttgccaagttagtgccatgcacatttccatctaccaagttagtgcctaacagccttccaagttaccaagttagtgtcgtgcaccttccaaccttccaggttagttcctgacagccttctaactttccaggttaatgtcgtgcaaccttctaacatgccaggttagtgttgtgcaccttccaacctaccaggttagtgcctgacagctttccaaccagctaggttagtgtcatgcaactttcaaacctgccaggttaaaaccgtgcagccatcaaacctttcaggttagtgttgtgcagctttctaactttataggttagtgtcatgcaaccttctaacctacgagatcccatgtctacatagtggacacaagtaagtttatcttgactgggatgtgcacaacctagcaaggtcctagccagacctacagttggctgaccagggtggaaaggttccatgcactaggcaaccttcaataggttttgttggccaagtgtatagaatcactctagcacttgttcttttcttgcaagctttccaccttgccttcaacattcccatgactttggagtagttcaaactgccacaaagatagggactctccatcaacaaataacaaccctattctttaggaattatttactttgtatttcaaatatatgttataacttgcctatatccaaggatatccctctgtacaacttgtaagccctacaacaatataaagggcaagatacacgcggaactaagttatacacacacgttttaagtctgaatcacaatgcaattatgctcaaaagcactatagctatacgtcctctctcttttcatacctctaacctagaaaactcaatgtaatactgaagggagcctatctagaaatgacatggtcttagcttgcaatttgattggtattatctcaagagtaaatacaactaaaaggggagtaggtcattacataaacaaaaggggtcaaacctctataaatctatgtgtgtcttttagtcgggttttatgccctaaataa

SEQ ID NO: 219665 - DNA, 4757 bp, Cannabis indica
tttttaatagatttaatcacaatcttttatacaattaccaaaactttttttataagattaaagtttgatagttacttggtgtaatataaatctcacataaaaataatatgagacaaacacacacaaatttttttttaagagatttattgacaccaaactcaaataatatttttttttgttgttctcaaaatttaatgtttttagtaacaatgttttatgaaaataatgccacacaatggttcatgttaaaatatttgtagttttttttattaacaatatttgtaaaaaaattgaaacaaacattttattgtcttctccctaatctctaatttacccctatgaagtttacatttttgtaaatcagtaaacattgttttgaccttttactttttcattagttagataatttcaatatatataatgaaaaagagtgaaaaattaaatttaaaaatattacatctttaattatttatatccaaaaatacacgtaataaatattacaattatagatgcaataactgaaaaaaatgaaaagatattgatattgttggagaaaaagacaaggtcgtgtaatcttcacccatttttgaagttttagttttaaagatgtgtgtatgagttgtattgtatatctttgttatttatttatttatttattttttgagattttgataatataaatttaaagttgtttgtttgtatgggaaaccaaacaagcccttatcagactccaattctatcacagagccaaggaaaaagacagacaaaggtgacgagagagagaccctcctatctcaaaactttttgagtttgcggctttcgaggccaattgcttggcactcttttcggtatttgctctctatctcttatttacatattcaactcagatatctctttctccgattcttgttcggtgcttcaggtaaaccacaaatccacaatttcttttgggctcagaatcagatttaggtaacctgtttgatttatcttcaccctgcaatggggttttttttttctttaaaaaaaaattagagtatatgttaggtattgagttctttgtaaatattgggttgacttttgatttgggtaaataggtctatttcgtattgatttcttcgtattgatttgcgtttggttgctgggaaaatgaagagaaaagcagggagactataatggactctactagaccctactgatagagcattttgtatgcatatgtgtgattatgtgagatttttggagtacatagctaagatttccattgcttatgaaagaacgtttactgggggtcatatgaagtttatggggataattatgtataagcaatttcgttgaccacatcttactgtttgtctgaccatttgagctgtttcttagagctgtttggcttactttttactattttttttggtcttaggattacagtttgtttagtgtttgtagaaagaagattaaggactattttccagattaccaagtatatttgtgtgctttacttttgtggagaatggaaaattaaacattagaagttgagaatatacacaattaatgttaacataaagaattgcttcctttgttcccatctccatattacttggcttaagatttttgttgtttcaacttggcacctttgctattcatgctgtgtgagctcacttttagtacgatacaattaaacattagaagtttgatcttgttgttttatagcatttttcttttacactaggatccctgccaagcagtacaatatttgggaccatagcaattgttatgtaccaggaggaactcgaacctgagaccgtgtggacaaaccacgtgtctaaccatttgagctaccctcttggattgttgttttgaaacatatttaactctacccacgtttgttttgttaattaaacatatgatttgataaacataaattgagatgtgatgcgtacattatttataaggatgaaagcttctttatatcaaggtgttacttgtttttatttgacaatgcttcctataaattatttgagtaatgaacaccgtttgttttccaaatggtattaacatggcttgtactgtgcaatgatgttgcatgttcagtataaaagatgagtactttggatgccaccagagctgaacttggtcttgtagttctgtacctgaataaggctgaggccagggacaagatatgcagggccatacaatatggttcaaaattcttgagtaatggacaacctggtacagcgcaaaatgtcgacaaatcgactagcttggcaaggaaagttttccgtctttttaaggttagcttttcctacttagcttcagctgcataatcttccagttaccttgtagtttcccttacaatatctatatttctaactagacatagtaagtttccagaatgttggtccttaattggctctttgtattgttgaaagaaataatgagaaggatagtgtgattaattatctgtatgaagtgattaatgttttcttttatataccttggactgtgaagtaatataatgcaaaatttatacttttaaacatattcatcctggatatttactcatgaagatgcaatgttcaactgcagtttgtcaatgatttgcatgctcttattagtccaactcctcaaggaactcctcttccacttattctgcttggaaaggtgccattatacttctgacctttttgctctcttcactgtgtttatactaataaaattctgacataatatttctttgagaatcctattctaattatagccttttttggggcttgctgatggttttacagtccaaaaatgcgttgctatcaacttttctatttcttgatcaaattgtctggcttggtagatcaggaatctataaggtatggattgcccttctccttctttagttcttatctttaaaagtctccaaagactaaaattatgtttgtttacgcagaacaaggaacgtgctgagttgattggccggatatctcttttctgctggatggggtcttcaatttgtaccactttatcggaggtatgcttcataccaatttatatatatgcgtactttttaaaaggattttggttttccctcaacaaggatggtttgaaactgttccccaccattcttatttcagcttggggagattggaaggctttctgggtcaatgaaaaagttggagaaggatctcaagggcagtgataaatatgaagtaagtcaatgagacaacatctggatttttattgtcttgatatagctgtgctatttcttcatgatcttgtttattgatgagtgcagaatgagcagtaccgtgctaaactcaagaaatcaaacgagagaacactgtctctgattaaagcatccatagatatagtggtagctgcagggctgcttcagttgtccccaaagaaaattaccccacgagttactggagccttcggattcaccagctctctcatctcttgttatcaggtaatcactgatcactgatatttgcagtttctgtcatgagtattattttttatctgataatattcaactcattgttatgcagttgcttccatcaccagcagcaaagtccaaggcagcctagagagccattctattgtcctgaaagcttctacagtcgtaataattatttagtgtgatacaaaatccatggcaatggaaagcctttaaataaagacttgtgaaattgggctttctttatattctgttccatactgctcttcttactgtagcaataataaatgttgtttctgtggtcaatagtatttagtaattaggtggaggaaaagtactcactcaatacttgggtagtttattctaatggtaaatgtatgggccaaacccatttcgattttattacagatgattaaatcccgagtatgctttcgttcgtggaatttacagatcaaaggcagatgattcctcaaatttaatgtaattcaatatgcaactgctctagcaactgtcattaactgatgccgatttttactttagtgataacgaatattaaaaaataaaacaaaaatacaaacttcacatttctcgtattagaactgtgatgtttcgatctttgagagataaatttgtattatgtattgaattgtaagagtacaagttaatatacatgaattaaaataacagaaagcgtaacaatccttttaacaacttcttactaacacaactaacacctctgttatttaactacctggatccttgacagccccttcaaactgacagtaattttagaaaccatacacagcttgtgtctaaactctgataacctagtgctagagatagagtgagatagtctgcaacctgagttgtagaaagggcatatttcacttgaatgcgctgttgtgaaaccttgtctcgaaaaagatgtagatcaatttttattatgttttgtacaagaatggagaatagaatttgcagcaaggagggttgtgctttgattatcacactatatcaaaagaacaactacttcaggaatttgaagctcatggagaagcgactgaaccaatgtaacctcagcaacaacactagcaagactgcgaaactctacttcagttgatgacttgttgattgtaacttgcttttgagattttctaggccacaatgttacctccaaagtagatacaatagcccgtggtggagtgcttgtcatttggattagatacctaatcggcatcatagacacatcaagaaaaaaaaatctattactggttttgaccaggagaccatgatcaagagtacctgcaatata

SEQ ID NO: 219666 - DNA, 2183 bp, Cannabis indica
tccagattaactgattgatctaagagcacttcaactctctttgatatcaaccaatccaatgccttcttggaagccttagaactaacaaattctagcaatctagacccacggtgcaccagtgtcaccttcttttctggaaaatcaacagcaatttcaccagcaagctccacaccagtgggacctccacccacaatcagaattgaatcagcagacttgatcttttcaaattctgtaatagtaaaagaaaagaattaaagttagcatctccaaatgcaaaacagaacatcaatttttgacaatgcacattcattatcatttgaaaaggttattaaattaatctatagatattcaacttatagtttcacttcaatgcaattgaaacaatgatactccgaatatatgcatttttttttccatcccatttacctgattcaaaataactgagcctctcagctttagtcttgggaaaagaatccttgtgaccggtggcaataacaagataatcgtaagcaaacgatcttccatctgcagtgaaaactttcccatttgtgatattagttgcagcagatgcaacaatgtccacattggtaagataatcagagtgattaatcaccatcctttcagcaaatggtggctccaccattgccctcaacatcccccatgtaatctcgaaatactccttcctgaatcatttattgatttattagaaattgtaaatgttagaaactcaacatagaagagaaaaaatattggaagtttcagagccctatctatcctcggtcaagtgtatctacatgtataccaaaacacatacaattcacacaatcatataataccaaaacattcctgcaagagaatttcactcgctatgccctaatagatctcaatacatgggatgtatttacaactgcataaacaaattaaagcaaatttctttacgaaatgtttcacaaaaatggaaacttactcatcgatgaggacaacgtgtgcaaggaactgaatagagcgagctagaatagaaccagccgcaccaccgcctacgattaccaccctcttcttatctgcactagagttttccattgaacccactctcttccgaaatcgatctaaaaaaaatatatggtaaaagtcttaaaggaatcgtattctactggagtttgaagtttttcctctacagacacatttttggggtatttatacacaaaatgttgatgatatcatcgcttacgccgaaagtaaattatgatataatttaatttatttattttggaaagaaaattctcacacattttttttccgcgccatggcttacgcggctggcgccccttttcaacttttgggttttcagaccacaatacaatgtacgtaaggaatgattattacactaatatgagattttttttgacagaaactattatgagattttagtatatgaccccataaatatatgtggatttgtaaattagcccgtcagccataaaatatatcaattaagtctttgaattgaaatcattaaaaatgtaaggaaattaccctatatgtatacttccttttaactcttttttctttttacgtattttttctttgttttttttttatgatttggtattgttttgtgggttgtaattgcatgagttgtgatgtatagtacaatttgagataaattatcatttaaattgctccgtatattttatataaatgtagaaaacaaatacttattctaataatttgaagatttctaaaataagtttttaaattttagttataataattaaataaaatataaaaaattaaattaataaaaatggcatcaaatcaataacttgaatgaaaataatatagtcttattgttgtaaatcttatcaaaaaattattcaatattagtgtaattatcactttattgtttttttttttaaaattcaatttaaaataatcagcacattataacatatgtttatttataaatatatataaaagtatatagaattatgtaaattattgtttttttttacacttttttgcaatatatacattaaattatatatgtaagtgaaaactacccatttataaataggtgaggtttagatttggtatttattaattgtaatacctaaccctcgacatgacctatcaacacgtcacccttagtttgatttaattagacttttttaattagtattgtt

SEQ ID NO: 219667 - DNA, 6820 bp, Cannabis indica
gggtgtatacatacacctacttattctctttacaaaatttaaaaaaaaaaaatatttgtaataaaactaatatgaaaactaatatggttttattatactattattgcaattacaattaatgtaataaaaattgacgtctttaacaaatattgatactgaaagagccgtaacaagactctatctgtatctttaatgcattgcaaaattgttgagatcattattaaaagacaccatcaagatctcttaactactgcggtagcaaagtaaggatggtggttgaactcaaaagaaacctttagagaagggtcaagagttccaacccggcaaatcacattcaacgcgatactattgtgctccgctacttgctctaactttctaagttcggctaatttgtccggttcatttgagaaactactcttcacctcttttgccatcctcagagcatccttgaagcaattgtacataagcaggttctgaacaagaagaagaaaaaaccagtaagtctcccagaggatcgcataaacaatatgaagattgcttgtggattactcaccgagaagcgagcgtaggttgtggattcttgaaatgaagggtatgcaatgtgatcaggaatgcttgctttttgtaaaagctcgaaatgttgaataaatctctggaataacaagttcaaacttaagcttagggagacaaaagatctttataagaatccaaccaacggaacttccagcagcccaaatagctgaagaggaaaataaaatcatacctcatactcggtattaaaagggcttcgaatctcgaaaattctttgttcattcctaagagcagcaagcatctgaaaatattggattgaataagagtgttttaattgagtgtagggctcaagatataataaaccaaatcatctaccaatgatagagggtagagggatcttttcggtcaattggctactgtcagtgactcggtgtcactgttaaatggtggaagtggtgttgaatgtcctatctaggaaacatattaatcaagcacatttaccatagtgagcccttcagccaaacatatttgacactgcagaaacaaaaccgctggtgggatttgatattctttcgacacatcttttgaagtatccctttttttctttcctctccttttacctgattagcagaggtacaaaaattcaaaacatggcaaaatttgtagtaacataaccatcaaatatgaaagtctatacaaatgtgcatttgctcagagaaggttagaatttttaatggcacacttaccagacccactggtgactgccatcttaagatgagttttttctgcaagcttaaccagtacaacatataaataccaatacaccatgcaatattcattgggggaatataactctaactcgaaacccaaaattagaaaccgagaagctatccagtatgtttgctcttccacccaaatgaggatatgttgaaatattttcacccatgaattctgtggaatgccaaaacaatttaatcacaagagcaatcatatgtcttaaatctattcagaaagactaaaaataaaaacttccaagattaagagtgctaagcacaagtcaatgtaacccagtgaatttcatactctaccatctaagtgatctgacccgccaaagaggaactctgatccttaaaagggggcgttcatacataaatatttacgaattgcacgcaaagtccttaaaactctgaacaggcatgcctgtgttatcccttttcattgatattttcttaggtatattcctttttgatttatttagaggaaattgtcttagggaagacatacctgaatcaatcaaaagggtaaaacaaaccttgattagtttaccagtactctttcttcctattaccgggaataacgaaaaaggttatctgtaagaataatgtacataggttgacttttgattgattcaaaatttacatgataaaagaattcttataatgttggtttagaatggagactaagctgattttactcctaaagttcatcaacagtttaatctcccatcatttagagaattttaggttgtagcccctagatcggtgccacatctcactaaactgtaagtgaataatctacctccaaacttccactgctaccaaataagaaaataattaataagttccctaaatgtgtaacgaacaagatcattgtgtgaatgtattaatgaccccacaagagctaataatccatatttgtcactaccgtgaataaaatctttaattcaaatgttagggcaaaagtatggcatttggttttaatataaataatctcattaaagcttttacattttaaatgggacgtatgcgtatctaatgttgttgagaattttgttaacgttacggcaatcgctaaatagtaatagcaatgcaaagcatggaagtggatatcatagacatacctcttcattcaacatgcttgcattttcaccgcactcctttttgaaaaccatctctagctgcaaagccggcaagaaaactaacatagttaacaaataaatttaatacaaattaaggcagaaaagttacttgtcaaattaatacagcaagaaacagtttaaaaaaatggtttccctggcagagaccaaaagttacatgtcattttgctcatagtcaattacactgataattaagtttcccatttaagatgatagtaaatcaccatgtctgttcattacatgagcagtccaagcatggaataaagaaataaagatggaagtttcttctgaaaacaaagcaaactaatttttctaaaaaaggattctattgtccctaaactaagagcaatccacgagtctgaaataggataggaaacaaacttctacactcctgaaacacaattagagccttggaacagttaagggatgtattgaaattttgttgttcatattcagtaaaataaagagtttcctttattaaatatgaaatgtaaaaaaaaaatacagcacccatcgtttttttttttttgaaaaaaagaggagaggccaaacttctacacttcttttgttttctgctttttgctttgctgctttttgcaatccacaattatttcttaccatcctataccgctgtaacccaaagaacacacacccgtcttaggattgtaactcacgttttgttctcaccccactcccagacacccccttaaatccaaagcaatggaaatagcctcttgttatgatagtttagcacccttactgtatctaatttttaataaatagaaatttctcctagtttaaattcatatgttaccctaaaggaaaaaacaattaaataacaacaacaacaagtgataaaggttgctcacaataagatgaatactcccttttcctgaaaatttgaatgactttcagaaaaatgaaaccaaatataaataacatcccaagagatagaattttgcaaactctattagaacagacctgtaagtatattacacgccaatcttgcataatcttcccaagcttacgcctttgccaagcactattggtacaaataattttgaggagattgatcactaactgcacaattggtacaaagatttagtggcatgaattagaagaacattctttcaccttgagagacagaaaattcactgcctgtcacctgtcccaattgtataacgaattcatttttttgaatatcatggttctttgtagcttcaggcaatgctgcagctctagtaataacagcaaagataggatcccgaccatggagtttcgcatcttgaaccagaagaagctgatcagaagtaaaagggattgagaaactatgattataataattagagaacactttagcaaaataataataataattagagaactaaacaataatactaaaggttttagaagaaaaaaatgagtaattggcggcgaaaccctcttatgttttaattttatacacaaccccctaatattttattttgtggcaaaaacttcacttttctttgcaaagttgaggcaccagtttaaataccaattggattgtcactgtgtacacttgcgtatacgtgtcatgtattcattggtttcgaggtttcactgtcacgtgtacaaaggtgtacacatgacaatcccagttgacatttaacaataaatatcactttttttttatttactctttgcaactaattaatattgtttatattagtttaaagctttttagctttttatttacttatttactattttttttctttactttcaataagtattaaatgattttgttgactttttaagttaatttgcaccaaatgcattagagtacaattgcaaaaattaggccaaatatcgcattggctcatttttttagccaaattcagcacaaagtttgcaccaggggaaatggtgtaaatgttcaatgtttacaattcaaaataaatataaagtcacttcaaatttagcacaaattttgcaccatgaagtccaacacgaaagaaaaaagttcatcaaaatctgacctgcagatgagacctggcaactagatctggttgagttttttgaaattgaaccacaaagtgcaatacactgtctaaagatgggtccaatgaatacgaacatataatgtcaagatcgtgaaaaagtttcataaaatatttgacagcctgcattaaaaaaatgagaagttaagaaagaaaacaacatagaagtaaaagcaactatttaagccttacctctttccagctaagaattttaatagcacgtggtggtgtaggggcagccaatctacaatttaaactagcatcaaacccaatcggttgacaaccagaagcagtagttttatcttctaaaccatcatcggaagctcctgaagcactaaatcgaaggaattccgaggaagaaaggatgctttgtaactctgatatgcaggaggctatatgttttctcgccaactccaagcctctcccttgtggacgcctcatacatgtaagaacatgataaaaatgctgaaagcaaataaaaggatggtgactgatcttgaattaaacttatcacaaaaggaaaattatttatggacacgtatagcaaaacggttaatgctggcttgtctctgagctaaattctacaataacatttaacatggaaaacaataatataaattatatgatttgtaccaacaaattcttattaatgtatgtaccacatgatgaaacattttcttttgagtatggttgtacccagaaacaatgcacagacgagaatctgaatttttacatagccaatatgaaaatatatatatacatgctatgctgagaacatttaataagaataacacaggctaaaaccttacgaaggcgtaagcggcacaacaaagctttgcaatagccttcttccagatcgacaatagtttgtaatggctctatatctgcatccaaaattaggatataacaaggagatgttaaacaccatgaggtctgagaatgtagagtgcagtaaacaaaaagaaaagctattgttcattccacaatatcaaagtaacaaggaataagttatactttaaaacatctcaaagtaaatgtaggcagttcgggaaataattttacttggtgacatgagaaatattaatattctcattatcaacctaaggttcatgagttgagaagttcacttcctctttttcttctccttatttgttttgcccattgatggcattcgtccttgcatgagacgattgattatgttggaaaactcgagtatatagactatttgttcaaatggcatttccacttaccagtcagcagatcactcatcatgtatgtgactgtagacaaaaaagaattaatcaggagaatatcttctccttagttttcaggaactttctaggaatagattatacaattatttccttgtattagttcagattctcctagctgatcaactatgtattctataactacatataccctaagttcaatatcaataaagaaaatatgtttaggtatcccacaggaagtttattctatacctactcaaagacactaggatgagggatgagtgggtgcctgttgacacaccagttcgtcttaatgtgaaactgggtaatggtgaggaaggagttgataaaactcgatataaaaaattggttgggggactaatttagttatcttatccaaggcccgacattgcttttgttgtggattggtgagccactttatgcattctcccaaaaaggttcacatggatgcagtctatctataggatccttcggagtcaattggtgagccaattgttgtagtcggagaaaaattgaggccaaattcagagcaatagcaaatgaagtatgtgaggtgatttttctacatcaaattatggaggagctaaacctacctgtgtcttccaatgaaactttaccgtattgctaaaattccaatccaacatgaccaaacaaagcatgtagagattgatcatcatttcatcaagaaacgaggcatgttccatttgtttgcccttcgtactaacatctttagagacgaataacattttcacaaagggattgttcaaaccacgtgttgaattttgtattagcaagttgtccttatttttcaagaaactttctaggaatagactgtaccgttccttgtatagttcaaattctccaagttgttagtcaactatgtattctataaataactacgtacattctcagttcaatatcaatgaagaaaatattcttcctccaaactattagtgactaaatgattttccttcattatcaatactcatctttgtaggtattttatgtgacccacttttagaccctttttatttctttttttctttatgtatatatat

SEQ ID NO: 219668 - DNA, 1411 bp, Cannabis indica
gtgatatttaaagaaaagtggttacctgggtaaaagccttgacgccatgtctttcaagcttaacctcaagatttggatcttcagcgagctgtaaaagcacatcgaccatatcttgggctacgtaatccttgacaccctttcttcgttcgttatgttcatccagcacatgttccaaaaacctatcaaactttttactcagagccttcattctcttgatgtacccctgaaggtccaagaaatcgatccaaggtatcgaatcaccgatgttaagtactccactaagcaagaaaagctcatcaagcatttttttgaattcctcaggtgaaacgatggcgttttcagactcgtctgtgtactttttcccaagcaccattcggctaatcacgttaaggctcacattagataggtgctctttcagggtgatgggcttctctgcggactcgttcaggcccttaagcaaggaattcatttcttccttccttatgtactcgtacgagtctagtcttcgaacactgaacagctccatcagacacatttttcgggcctgtctccagtatggtccgtaaggggaccatgtgatgtcggagtagttgtaagttgtgtactttccggccgctgttttgggacgcccggcgaagattacgtcatgggttttgaggattactttggccatctcgactgaggaaccaactaccactgggtgtgacccaaattggagttgcatgattgggccgtacttcttggagatctcgtgaatggagcggtgtggtaatgggcctattaagttgaggtttccgattatgggccagggttttgggccgggtggtaagtttagtttacggcggcggagacgtttggagaggaggatgagtgccaccgtggcgagccaaatggccgcgtaggaaacccaagttaggtctttcatgttggttgtgggtaagatcagatgtagtgaaagagtcatatttggggatatttatagacttttttttattattatttattagattgtggacatttatttagtaaagtaagtggaaatttgtcatcttactgacttttctttttcttttttctttttaaattatatcgtagtttcggggtacagtaatggtaagaaagaacttgctttgtaattttgatggccaataagattagtgtgttgttaaaaaaaataaaaaaagattaagtgtgaagacacttgatggaaattggaaaaatatgctagtaagccaaaggtactagtgtggtttggttgggtagattaatgagagccccacttttgtgttttttctacgcagcctataatatttaatcttaattatatttttaattaattttgtctgtaaatttatctaagacactcacataatagttaatgtaaaataagttataaaagttaaaaaaaaaa

SEQ ID NO: 219669 - DNA, 2365 bp, Cannabis indica
ctaaaacattatatatttatgccgcaaatttaaaaaaaaaaaataataataactaaaaccgtgccaaattacctagttaaacataaacggggacgaatattaatgacggtcatcttaaacatgttttatccaatttaataattagcatactctattagatccaagcaaattacaagtcacaaataatattgaaaatgttacacatatcaatgacaatgtccatgcaaaatcggtataagggaagaaagaaaaaacatttgtaatctcgagtacaaagctgacagacatacttgcataatttattagaacattatttaataattagacttagcttattacaaaaaaaattgaactaaacaaccctataataaggctaaggcataagccattagaattagtgcaagacctaactgctggaaaaaggtaacatttggaaagatgcttttgtttctattataatatagtggtgtatatattcaatttttcaaaataataataataataataataataaataaaaggtatgtatattcaataatattccataaataaaagatatacatatatatatatatattatattagtcttgaaactaatacaagtagacaagttcaaggtcaaacaactacctaggagttatatccaaatatatagaaaataactaaagggcacagttctatagccaatagaaggtaagaaataattaaaatatataaaggagcggctcataaccaaatgaacgtagaacattacatatacatccaaagtcagtgaagcttctgctagtattatattaagagaatctttggattgaaattcaaagaaaaatttacaagacagaaaataaaaaagttggaggttgttttaaggcatcgagacctagaagaagataaagacatgaaagttttgaagtttccaaagggattagagatagagaaaagaaggattggtactgtcagtccccatgccaatgatacgagtagaaggcattcctccaccacttctacgctgaggctcttctttttgaaagctagctagcttgttttttaagagaatataaaaatataaattattaggtttcattagctggttcttgttggaactttgatgaatcttttaacaaaatatataagtgttttagtgtgtgtgaagtcgaaagagtcccacatggaatatgaactcttatttacaaaggtatatagagtgtaaccttggcctttcccaaagggtatctaaatttatgcgaatgggtgagaactcacacacttgaccaccacacactcacgcgtcgttcgggttgtgtggtgcgacactctattatttttacagaaaaattatttgacaaaataattattttttaatttaattaataaacgtatttaattggaactgattacttagtcgtatcagttaatgggacacgttcaaccaacttgccccacaattcagaaaaaacgttcttcttcccatatgatttttcaatgtattcatttatataatttgattgaattgatgggaagaatacatcttttccatatcgaaaaaatacagttttcataaaaattaaaattccatctgcgatatcaaaattctttgggtgtatttgacggtgctctacagtgcagtgggattctgatacagtacgactgggctgatttatcctggggacgaccgacgaattttggctgcttgcacactcctaggcagtaccgcgaacgtcttaaagagagtgatctagtccgcgactcaacctagaatttttcattcgataatatcgttcctcttttattaatttttgctagcaatttattcaacaattttaagacgttcgttctgctatgactactaccgatgaattttctggttctactgctgacattaacaagccttttcattttgagggcttgaactttaaaagttggagacagaagatattttttctgaccataaaaaaagttgtgtttgtgcttactgttttgaaaccagttgtgtctgaaagtccacctcctgccgacaagaaggatgaagtcgagaagtacgaatcgcaggttaaggaaagggactcctgggtagagaattattttctgtgtaagaattttatttgaatggtctatctaatgatttgtatgattattataattctgacaaatctgccaaggagatatgggaatcattaaataaaaaatatgataccgaggaggcaggaacaaagaaatacgctgtgagctgctacctgaactttcaaatgaccgatgataaatcagtcaaagcccagtctcacgagcttcaaaaaattgctcacaaaattctgtctgaaggtatgactattgatgaacaatttcaagtttttgttataattgataa

SEQ ID NO: 219670 - DNA, 3054 bp, Cannabis indica
attattattattaccggaataacggccagtagtagtgttgaattcttctcttctctttttgtgactttcattattagtataaatgcttaaactctcccacttgtgtttacactcgcttggacttctctcaaatcccaaacaactcattttcgaagctatttcctcccaaacactactagtagtgctattattactacttgttgtacctaattccaagcaattaaattagtacttgtacttgatgatgatgatgatgatctgacgagttcaattaagcttgaaatctcctcttcattattccatctaacaatatttgatgagtttgatgatctttcaggaaaagatggtaattgtagcagtgaagatcctttaccatctgttaatttattgaaagctcccattacagcagcatcacgagcttcaatccaagctttctccttagcccaaaactcattaatcttttcatcaacacgagcagcctcttttttacggcattcttcttcttctgctactcttttctcttgtttatcaataacattcttaaacattttctccatccaactctcttgtgtcaccataattttcttcatctgtgaatccacaaactcctctactttagctttccaactgcttttcttcttccccctaatttctcctacgcctttcattttctgatcttcatccttgttgttcatgttgttgtctgaggatgaagtttcaaattggtcactagaattattaatggagaaactattaaggctattatgatcagagatcttattgggggtattgataaagaagagagtttggtctaataatgtgatgggtttgatcaacaagtagtggggattgatcaatattggaattttgatcatgaccgtaaatggcttctagttgacgaaagaacctgtagtgtttcccatcttgtttcctagctttaccttccttggttttcttgtaatatttgtacaagttctcaaatttctctttgcattttttcccactcctctggtacccatgttcctccgccattatcctattatatatatatatcaacaaacaatttaaaacattatataattaattagctcaaaaagaaatgatgaagagtactatactagctacacacatctactagactatatatatgttattgagtaataattataaatcataaattgccggtcatttttagtaaaactcataatttattattggtttcatcaattaaagggagaagaatagaaatcataaacaatttttcgtacatgcttaattattctgtgttaaatggtattgttattttgtgtgtctagctatattattatatattactaattagactattagcgcgtacggggagctagcgctgtgtgtacgtagaatatttatatatatatatatatatattgctgatatggaatatattaatttaaattgcaagctagaaaacattatatatgcagtcaaagtttagtacgatttaatttggtgattaatataccaaaatatcatctttattagattattagggaaattttagtttgtctatatatattgaaggagatcagtacagagaagtaagaagattttagttatatacattgagcacaaggccagattttccacattatttaaaccataattgaaaattaatcatagttatgtgtgtgtgtccgattttattaaaagtacacatatatatatatatatatatgcttcttaatactaaattatgtgatcagtggatactaagagaagtaataggaatataaatttaatcaatttatatatgtgtcttatgactgttatatttttgcatgacaaaaccagaaagagaaaagaaaatcaatcccaaaatggaaagaaagccaatgaaacgatgtattatcagttttgtttactcgaaataggttttaatttattttacccaattacagaaaagcaagataatatatataggtgaagaaagaaaatcagaagaggagacgaaacttgtgtaattaaaaaatgaacactataactatgtatatatcaaggtataatccatttataataataatcataaagtctaggcttgattgatcagtcgatgtatgaggtattaagaaaattggaaatatagaaattagggttttgatataacattaattatgtttataatatatacctagaaatttgatcccaaagaggacctttctgattagtatccttaaacctgggattaagacgagatcgaatctcgagaagagtaagcgtctcttgtctgggccatcttgttgtgttcatcatattgttatcatagttccccatattattattagtattactactactcatccataatccaccagttccgctactactctccaaatcatgatacaatgcgacgccgtttgacccactcatattaatatgttgacccgacccgaactgatgctccaccaacccgacgccacacaaggatgacgtttggccgtaagagtactgctgctggtaattactactgtgaacggtatacggcgcctctcccaagtgatgagctggcgaaatcaacggctgtggttgttgcagctctgtcctcaccgccatcagctgccggaactctgctggtatccctccgtactggtcttccattattttcagtataagctatagagagagagagagaaagagcgagagagagagattcgatttcgaagtgattagaaataagaataatattgtgagtttttttattaaaaaaaaaaaagaaaaaggaaaacctaaaagacaggatccgagtctaacgcgactaacatacgtcactctatcgtcactggtgagaaaaagaaggggccaaggtgggtcccggactctctccccgactggtgaagtgagatgagcattacgtgatgatggagtagccaatgaaagagttacacgtgttatgtatggttacacgggggagggggtccgacgtttagtcatcaattcgtagaaacaaaatagagacattacatagaaaaaggtcaaaagcaggggtacgtacgtaacgtaaataaagttaaaata

SEQ ID NO: 219671 - DNA, 4555 bp, Cannabis indica
ataaaatatcactttatcagggataaaattacacagggacatatcgggatagacaaagtgcctactaaagtgaatccagcagacatgggcacaaaggttgtgtccctcaataagtttaagctttgcttaagtttattggggattgacacaggttggtaaaacccttaatgggttcgagctaagaccctctgttacactcaaacaacatcaatacagtgcatatggggatttaagtggaaatttttgatagtaaatccccacattcactgtaaaaccacaacatttacaataagattacaagtagtaaaaacttatgtggcctttggcctctaagtaatttagacaaagtagttaagttagttacaaagtttattaatactttgtaactaactctcatctctttgttctctaatacaacaacatatataaaccagtagcatcaaaaaataagagcagagcaatacaaacaccagatcagtacaaagaaaatatactacagaaatagagatcaatagcagaacaagatattcaaaatcaattagtttttctcagagaagaaaccgattgattttgggggttcttggaggaggcttacaatggagtaagctttggaaccaaggtggtacttcggatatccaatagccagagggtgttgttcatgcaaaagaagagaaaaacacaacattattagtactgatttagagagaaaaacagagagaaaaaaagaggagaaaatcactgtaaaatattcggattaccaaattaatacatgtgtgttttggaatccaacccattgtaatcgtttgatcattgaagatccatagtgaacgaggcgagctcgaagaggacgtacccaacacaattttggggaacctctataaaagcttggtgttttcttttccttttcttttctgatttttctattgtgtttagctatttttctggttgtatttttatgggtttgaatttgtttgggaagggatttttttgggtttttattgttgctgttttttgggtttcattgttggtgttcttcatgttcttcagagaagaacagtgaagaaggaggctcacgactaggttttatttatgttgctgaatgtgtgtttgagatataaatcaatatatatatatgactgatgcttttaggggtactactttaaaattgaaaccacatgtagtataaacaaaaagggttgtcgttgggttcaaggccagaggtcaaaacgtgggttgattggggtaaaaggtctggtttgaccttgggttttctttgatactttatgctgtgtgtagggcattttaggaataaaattcctacaattatattagaatgaaaatcttcaaaatcaaatcaagatacaaacttaaaaattaacgcacataccatatcacttgctcaacattaataagaaattaaaatcaacaaaatttttaagaaaaactagctaaaggtataacccttttactaataaccacatacaagcaccttaaatataaaattgctaaaagattatatttaaaattaaagttatgggtaaattttctgtaattgtaggtcatccacaaaataacctacaaaataaaaataaaactttattaccacataatataataataaaaaataatatgaaagaatgatggtaaaccaatccatattaagtataagaacttaaaaaacttgaaatacttaaaagtataaaagttgttgaactagaagtcatgaacataaaaatgatcacttttcttgccaattgattataccataaaactactctaaataaataaggacaatctataataaatagcacaaaagtcgtaaaaggtaacaaaaccatcaaaaaatgttacaaaaacctgtgggtcctatactaatttaataaataataaaaaaaattactaactaattataaaatgtattatgagtatggttttaaggctttaaaatactaaataaaaaatattatctttaaaaatatcatatcataccattttgttatgggaccaccaatattgctttgggatgaatatacctcttctttttcatctttggctctttctctcgtttttttttccaaaacaaaattggttataataaataaagaatattattattaaatattagtagtgtctagtattttttataagtggcttttaagttatttttttaaattatataattgaagataatactaaatattaatagagctttatagtaattctcatgtgaaaatatgagtaattccctccaaatttaattaaataattattaatctttattcattattgtgtttttttcaagactcattattcttgtaaaaagtcccctctataccgtacctgtacgtaaatacactgttagtaccacggacgaatcgcggccctccaattcagcggtccaagcgattctgatccaccacgtgtcttaatcaactgataatgtatcggtcaacactaaaatatgagtcaaactttaatcaaatttatcaataaaaaaaactctttaattgttaaggaaaaaaaattcattatttgtatattaatttttaattataaataaatatgtaaatttaatttttaaggaggataatatttaaattttattttttttaatagtaaaaggaaattttataaaaatattgaattttggataaaaatttataattttactctcataactaattttttataaaagaaaatactgtttttttctaaaacaataaaataagacaattaaaataatagagaaataattaaaaaaaaactataaaacaacagtaaaaatttaaggtagtacacaatataaaacttacaaaaaaacaaaatttcactctacaattaaaaaaaaagaaagtaaaacattaaaaatttttgttaaaataagtaagggcgttaaatgtaaatttcaaatatagacaaagaaaaaaagaaaagaaaagatgattcagttttgttgatagagaaatataaattataaatataataaattaataatcaatttttggtggacagaggaagataatcagacactgagagacgaagatccgaagtcgattgaggaagaagaagaagaagagagatgacgatgcatctgatgaatgcgatgattgcgactcggtatctgactcgggactcactaatgggagctgaggctatagcgtttggatcgatatggtggttcgtctacgccggtatatcatgctttttggtcctcttcgccggaataatgtccggtttaaccctagggcttatgtctcttggtctcgtcgagctcgagattctccagagaagtggtactccctccgagaagaaacaggctggtaagtttttctgaccgtttctatctgattattgattcacaatcgtatctaattttgtgtgtatgtattcttagcttgtatacttccggtggttcagaagcagcaccagcttcttgttactttgcttttgtgtaatgcggcctccatggaagtaagtttttttttttaatcaaattcaactttttcgattggcaattggaagttgatgtaatttatacatagattttatgtttattgagtattctctattcagataaatgttttgatatgataattcgtgaatttgcaggcccttccaatctacttggataaaatgttcaatcagtatgtggctataattctctctgtgacttttgttctattttttggagaggtatattatattttttcaactaactttcatgcttggtttgacagtaaagtatcaatctttttgttggcttattttgatggaaactccaatatcatttttttgagtcaggttatcccacaagctatatgcactagatatggacttgcagtaggtgccaactttgtttggcttgttcggattttgatgataatttgctacccaatttcttatccaattggaaaggtacaatcttcgatggaaagttgaaatttagacatttaaacgtgagcttggaatttgcaaatttagtggtttttgattagtagccaatggtcatcttttattttacttcaaatgtatttagaagatttcgtttatgaatcctatctattagtgcttaaaaataaatctaaagcaaaactttggaatctaattgctgcaaattgatggatcataataatgagatcagattacaagtgcagatattgacttgagatatacaaatgcagattttggattgggtactaggacataatgaagcgttatttaggcgagctcaattaaaagtccttgtctccatccacagccaagaggtaaatgttgaggatagttaatatgctatttaacttgtggaatagcttcacacgttgcaaataggaaatattgctgtcatctaccacagatttatgctagcattagctctgatatccttgtcataataggccggcaagggtggtgagcttacacatgacgagacaacaattataagtggagcactcgatttaactgagaaggtaaggccttaacagtaacattattatttcctactttcattactttctagtttgtcattgcatgtgtgcctgtgacctctctctctctc

SEQ ID NO: 219672 - DNA, 2366 bp, Cannabis indica
cattctatttctattctatttcaaattaggatcaaatattgattagttttttttaattgaaatttacataaaaaaataaaatagtactgtatgagttactgaactttgtaggccggtagacgtgggtagcacgaggctctgctttgcagattgcaaacgtgtggggtcattaattatttaaagtctttttatttcttaatattattaataaatatgactaaatttcggtagtcaaagctcatataaatatatatgtgacacaaccaactaaaagggtactatataaactcttcatatttatatttctctaccctatttggtagtatcgaaattctcctttttttttcctaatgtaagggtgaattcttcataccaaagaaaaaaaaaaaaatgtaagggttaattatatataagtatggtttgtcaatgtaacagctcataattatctaagtttgcttttagccaaaaaaaaaaagttactaaatttgtattagggtagataaagagaagatttgaaatagtaattttccatatttgtaatgtgtaactagaacttaattgattatgaaggcaagctacacctttcaaaaaaaagaagtaagaatatttttctttttgtttttggtaattaaaaaaaattataacttcatttttttaaaaataatcatataaattatatagttattaatatatctgtttttaattttttaaataattatggtgataacatactattaaaatatttaactgagacatttctattagtaggggcaaaaatgatactttgtaataaatattcctaaatatacacacagaaaaatagatatatataaatataattgcatatgccatagaaaaaataaaaaattaaaaagagagaaaggcatgctccatcaagcaacctaagtgtagggcttggtatttaagttatatatttccaattaatacttttgagagatgtggcaacaagtaagaaatttaataagaggccaaaattagagtagagaaccatgttcttggctttgcctcaagcttaaaaacaaaattatttgttaaaagcaactttgagtgtttgaccaaatagcttatgttatatgggcatatatgtttaattaaaataaattatctcacttgatctgtgttttatatattatatataccaatatagagtaaggtaccaacatctgtttttttggcaatttttttcttccactttgatatgttattaatcattacctaatagacatatgattcaatagcatgtagtaattggtaataacttaaatgtaataacttaaatcaatttttaattatatttacattgaacaataagaatgaaggacaagtatttagcaatagagaatttattattattattaaccataaattcatcttttatgccaataaattatctactgttcttgtctttaaagtaggcctgattatttgaatgaggatcatattttcgatgatatgtattatatgtctatatggtgtggtttccaataggtatattttttgtcttttctccattaataatggctaactttgaccaaagtaaaaaaaaaaatctacacacggcacaatcgataaaatatatttttgtatggtaaattttattccatcaatttgcaggatggaatgaaaagaatactatattacttatgtttactttcatttttttttcctttttttcagaagtcacctttccaattttaattaatatttatacgatttttattttactaaaatctagttactaatatatttatatatatatataccttcatgcttcatattaattgtttgaaatttggttattacgttgtttcctttattttgcaatagttttacattgcaatatggccattatatcatcatatatttgtaatctcattacattaaagatatttgcaaacataaaatataatttatttttaaaaacttactaatatagtaaattatgatgtaaatatgttacataaaaaaaaataaatgtaaatttagattacagtataacatgatataaattgtattataataaatattatatttttatatttattatggtcatttttaatattttattattaaatttttgttaatatgatcttttacattaaatgacttgcattaaaatttatatttacctttgcattaatattattattattttatattttttaataaattattaagtgagcataaaatgacatattaaattttacaccaaaatttatcactactacaatatgggcctttagcttccctttttttaacccattttataaaaagggaagctaaagggtgtgagaacacccaccagattcgaaattgacatttagaggcggttttttggtaaaaac

SEQ ID NO: 219673 - DNA, 3039 bp, Cannabis indica
aaaaatttatgatgtggactaataaaaagggtgacacatggacacttacggggaagaaaacggagaggtacctacggaagttttaggaatatgacggaaggtatttttactgccaaaaatacgatttaggtacttatctgctactcggtataaaacttaggtatttttgtcgcaaattactcttagtaaaatgattggggtttatttagaatttcattttctgatttttttaagatggtgatcattaaattagtcgtaggtttatactgattaggtggaaaatctccatattatatctgttcataaatattcctttggtatttatttattttttttggagaaattttgtatgtattatttattgatggatatgacttgtatccttactggtcatgttaaagtgatggtataggaggctgacggtagcactcctcctgatgaaaatgtggcaggactaataaaaacggttgacagtaccaataagagcacttgctacaattgcatgattaacaataatttattgtatctctttgatatggtattttctccctttgtgttttctatttaattaaaatgttcagcatatgattacttgactttgttgaatataagaaatatgtgtcagtgtgtgtgtgagagatttggagggggacaagttgaaatttcctttatatttacatctatatatttttatatattaaaagtaatatttaacgtcaatttttgattcaataaaatattgtcaaaatataagaatattttgctaaatttaattattataaatatatataaatattaatattaattaatattatttgttatatatcttcttcaaatagatgtgagttagtcaaagaaagacgctggctagaaagatattgacttttgtgaaaaaatctaatattgaaaaatgatcattctttttatgatcaatctcttttgtcatcacactcctatggaggtttagtttattttaaaataatttgatgtgtatataagaaaataattaaatcgtcttcattcatcttttcttctttgaccgcgaaagtatcttatttaaaattcctacttaaagatcttttccaaataagcaaaataagttttttaatcaaaccaaaaactccaactaggttagggacaaacaacttacccaagttggagttaatctaagcactatcattattaaacaatatgaggttaagcataacacatatttccagaactctaaaattaaatgttgttaggacccaaaattaatagggtaatatagagcatagaaaataaaaggatatatgggtctttgtattaagaatagtgtttaggagggaatacaatagtatacatagaatacaaagaataaatgaaggattgtacaaagaattgagtatttttttgcatctttgagagactaggccactcagattcctaagattattttattatatttttcttttctcaacaatattaatttagattctagttcttttggctctttattttttcttgctgctatattttatatgttttccttgtgtgtactgtggggcttattaattggtatcagagcatttttttttgttcacaaatggagtcaaagattaaatctatgcaaagcattgattttgtggtactaaattaagtatgtgtcggaagtatttataacgattatcattgtatggcaagaagagttatgcaaagtgttagttttgtggttctaaatcagatacgtgtcagaagcatttataacgattattattttaccacattctaagatctccatatgtacatatgttaaatctaagataaaagatgaaaggatatatttacctcttgaagaaaatcagtgtatcctcgtatcttttcataagttgtatccttaagatggtgatgacaaactcacatcacgatcttctaaatctatcaccacacacaagaaatagtgtaggctaattatgataaaaactatataatgtgttcttatttttctctcaacacatgagcaagaactctgagtgaataattatgtaattattaacctttttaggtttcctaaaatatacatagaattatatttactgagtttattggaaagtgtccattgatataatcaattccagtgattagtcctccttgattcgatccatttatgaaagtcaagattctataatgtaatcaagttcacagccatccacattatttgcttcccaaaacaaaagttgagtgaatcaagaaaaactaataacatgaacaagagttatgattactcaggatttaggccaatctactattgattatcgttatgatatgaattagatttttatagtaaatgacatgtttgataaagataacttaattacatatcaatttatgtcatatataatctctattatatacaacatcttcacttagatgtcataccacatcagtaatcataatcgagatttcttgcatcgaataacagacataagtgaaccattctagcaaccgtcaattaaagattctataactttaatatattatcgactattttattcatgactaagtgatcttaattctctgtacaatacaagtcacaatctcatatatgaataaataattttctaatatttatatataaattattcaatatcaaatattaataatttaacattcaagcatatatcaaaatgttcaactaatatttataacaaaaaatgtctttacaggtttttcagagcataaaacctaacaatctcccacttgacctaaaagtaaacttggcatctcccttaatcccatattcgtaatatgacccataaaagatgttgctggtagtgtatttgtggatggatcaactaggttatgttctaacgtaatatttaagacgaccacatcacctctctctttaatatgatctcttagtatatggtatttcctctcaatttgcttgcttctcttgtggcttcttggttcattggagttggccaccactctattattgtcacagtagagcaccaatggtttttctacttctataactacttccaaattagtgtagaa

SEQ ID NO: 219674 - DNA, 6716 bp, Cannabis indica
agtagatggcttcataaatatacaaactacctcttatgaatatgaagaagagaatgcaaattatattatattaaattatcaatattacaatatatatatataaatatatatttatattataaattatattaattaaattttggtcaatggggtggccaataaattccttctcttgagcatgggagaggagctggttgagcaatatgagtaggatattgatgacctggcatcactactgagaaatcagatgcatatgatgttgacacctgtcattaaacaaaatataccattaatatatataataatattaaaaaaattattagtgtttactatttttctcaatattatatatgtccttataaatataattaaatatcacattctatataacttataaaaataaattttaaaaatatatctctaactaatcctaaaatatcatataaaatgtactcataaaaacaaactctacattgatttgttttaaaagttggaaatcatattatattctttctctttttctttttaaaaatatttaatacaaactaatttttagaaaatcaattatttgctaatcaatcaataaaattacataaataacctaaatctaaatttaataaaattattttgcaaatttcacacttttgaaaaattaattttgaaaattatttagtgcaagttaattattttttaatacaaaatcgaataaagcgaaccacatgctccaccattatttctaatcttaaaattttacattaagcaactttaatttttataacaagaggctctaatcttaagggtcacttaatgtaaatttatcaaatttctttaacaatattcacactttattttggtgctactaaattagtttagaactttagttggtgtgaattttgtattatttctaatacaaaaccacacaaatcaaattaaccataattataacaagagacacttaatctaaattcaccctaattattttacaaatttcacactttatttcggtgctactaaattaatttcaaatcatatttcgtgagaatttgtattatttctaatacaaaaccacacaaaccaaactgaatgaaaccacatgatcgaccattattcaaacaacatttcgaatcaagaagacttacattatgggaatttccgagtttttgaaatgtgcccgattcaagagaagaagagttgttgttgttgtggttgttgttgttgttgatatcttgaggagaagaaaaagaagaagttggcttgaataaatgctcaaaaattgccataataagaaacatagaaatcaaaatagctgtggccacaaaaccaaatgaaattgcattcattgatgttccaaagcttttccatgtagatgattgagattgagttgaaattggatttggggttagatcttgtgagcttccataaatgttccatggttgctttgatgatgttgatgatgatgatgatgtttcactattaatgtcattcataattttcttacaacttaatttttgacctttctttaagtcaaagtgagtttaactaattcaatacacttagatcttttctttaacaatactttcctctctatacacctgcaaaacaaaaaataaagaaaaatgtattctcattgagtgtcatagaatattttaaaatggtaaacaaaggaagaaaagaaggtaactagtaaccattttttgttaatggaaaaacaaatggtaattagtgacaataaatatacattagtaactaaataagataaccattaagaagagagttgatttcattctcattattattgagttgtatagaagcatttttacaaaaccatttttaagaatgtaaaaatggcatgaaaccaaatattaagaatactttcctctctatagtatacaccttcaaataaataaataaacaaaaatctattattattattattattattatgaatattacattttcacaaaaagagaaactcttggagaaaaaaaccatttctgaaaatgtagaaatgatacattaaaaaaaacagagtaagagatgcaaaagtctatggtttttgagtgaactaataatcccacttagtgataataaacaagataatcataaaccattttaatttatttttaacaaaaaaaaaaaaaaaacaaggaaaaaatcaagagcaagaagaagaagaagaagaagaagtaataattaattaaacaaaataataatcagataaatcttataacaaaccttgtttaggcttaagctttgatatcataggcattgtttttggtccagagatttaggagcataaatcatgttaatttaggattctgctaagaaaaaacaagacactcattcacatttctcaaagcattatttaaaacaatgtatagtagtgagtgaatgagtgagtgagtgagtaaagctttatactaaaaaactatagaaaatgtaaaaacaaagttatataatgatgataataataataataataataatcccattggtacccttttctttttttcttttatttttttaattttgtttcatgatccttttttatgcctaacttaattgatactataccttgtctgaagaaacacctaatttataataaaaaagaatgggcctttcatgtctgtataggcaaaaaccaagtctcacctattctattctgttattctattagatttactttttcaaaagctgttaaatttcatttattacaaaaaggagtaatatacagttaatctcttattataattttttagtcaaatttttcatatcggaatatcttttaatggtggtgtttattataattactacatcatttttataaattttaaaaaaattacagataatttacagtgccgaaaataaatttgaaactttttaaactaacgcgtgatagattggaatatcaaatatctgcttttcaatctaataattattcgaaatttttataaaaatttacatgaatgattattttaattataaagaatatcattaataaaaaattaaaaaaaaatattcatgtaatttaagcataaaattactaaaattataataaatattataattagtactccttagtacaaatttattcattaaacccacatgtataggtatggtaagtaacaccgtttttttcttattcttctttgactcttttgcaatctatattattattattgttatgattttctcaaccaatcaaaaattataataataattataatcacaatcttgatgatacataattaaccatatgatttaaccccttaaccatcttccaccatgtatatatatgattgtcactatcagtttttttttttttgggtacacaatttgaaagatgaaaaaaaaagcacacatgggtttggccatggcaagaacaattttactcattttgttgtactgtgaaaaaaagtgctactcattgaaaaaatttgtttgttaaaatttcaaaacatcctttcagtatactttgcttctatatctaaatttttttaaataatttataatatttaaaataaatttaaaaagtcaacaaaacattaaacaattttttttgattgtaaattattggtaccaaaaaactataatatacagaataataaaaaaaaaattagatgccgaaacagataaaaaatataattattttataaagtgtactcatccttactaataagtaaaataaagttagaagattgctgattacaatttcttagtcaattttcacgttcaaaatgacatgttgaaatattcgttatagttacaatatcatttttgtaaatttttaaaaaattcttaataatttacaatattgaaaataaaatttttaatattttagtctgtcacgtgtgttcaaaaaatttcaaacttattttagtattataaactattcaaatttttttaaaaaaaattaactgggataatgttataacaaacaccgccataaaaaaattaaaaaaaaatattctaacatatatttttaagtagaaaaattaacattagcactcctccataaagcaattcaaaaaatataacataacccatttggatgtaatcatggaaagatgagcaaaatctcacaaaatctcaaataatcaacccaaccaaatataaaagagaaaaaaaaaataaagacaccataaaagaaaaagctgctattcctactgagtctacaaagcaattaaaactgaaaaaaaaaataaccaaagggtattattattattattattactattatagctgcaaagcctatatataatatatatgtttgtgtatttattttctttgcccatttggtaggtttgagatcaaagaacaagtaaagaacattttaataaaaataaccacttgaggctagctcggtctagctcaagtggccataggtgggtgtgtgtcttggagattctgggtttgagtcccagttaaaatataattgtaatatataaacgtttacataaaaaaaacattataataaaaaataaaaaagaaaaagagaaagagaagcaatgttggattaccttacagctgggtaataacagagtagccatgattcaagagaagaaatagatctagtactactactactactgcatttaataattatatatatatttaataattatatatataataaaagaaaaagtgttatagaaaaaggttgattaagacctaaatttaatttattcctctcatataaataaataatagttttctaagtatgaataatttgaaacccataacttttgtcagaaacactaaacccaccaccaaccattatatagcttttgttatttgaatttgtattcatttatttgtctctctctctcacccaaaataaatcttaacataacacatagcattttatttgactggattactactattttggactatgtagtttgtaaattaaatttttttattttttaaaattgtataaaatagtataaagagcttaatttttgattattttttttttaatataactaatttaaagataatttttagcatgcacaaatatataaaatgtacgcaatcttttcatgatacttctagatcgaactattattaagttgagtaatttgcgacgtaattatttaagtttaactctcagttgtaaataaatacctaaattttatttttttacggtaataatacttaagttatattattgaaaattttgtaggtacatcagcattaaatgtcaagtcattattcacatgtcatttttttattggtatatttaaattaattttccaataaaaaataaaaatttaatgacctggactaatctggatttatcacatagcaatttacaggagtaagttaaaaaaatactatttttattaatcaattaatcaaatttacctctaattttatatttaattgaaacatacctctttttatatgtattgtgcccaaaatacactgacataagagagtcacatggagagtatcttgaagtgacatgggcaaaatttgtacagatagactctagaaaagagtgtaaaaataaaagaggacaatataaaaagggtatagggtgtaatttcctccaatttacatgacacttcacaaataggtacttacagaagtttcagaattataacttaaatattattaccgccaaaaactaaacataagtatttatttgcaattgaaaattaaacttaagtatttatgttataaaaacatgatctaatttatcatttaacaaaaatcagttcaaagaactattttatattatattttagaaaatatatggtctaatttattatttaacaaaataaaaaatctaattaataatttttacaaaataaaaaatctgaaatagtatttactaaattttaatttatttgctataaaccaaaaacaaaagtaatataaaaacactacatgtaacaacaacaacaacaacacaatgaaatgaaattattcaattaagccaagaattgtttgatgaaaatgtatatacacataaatcaaatcatatttgaaaagaaatgaagctatgattacaactatagatatgattttttttgtgagaccctactaagaaagagaaaggagggtctatatttgtcaaacaaggcaatcacaatgtctgagaatatgatatgaaagcctatctaaaacttattcataacaagtctgaatttttttgcttattattaagttggtgaaagaaaataatatctattaattaattaattaaattgcattattaaaatctagaaagaaagtaaagaaaagggtaacattctattatatcaaaagaaaagaaagaagaagaatacaaaaacaaagaaagtaaaggattccttttgttatttttgttcttacattccccttacttaaaattagaccacaaccacatacatagagacatataggccatgtttttgtatcccaccactactaaagataattgcttttctcattttccatgcaatatttctaaactatatatattttagaaaagaaagtgagaaaaagggttttagggtggtggtggggtgggggctttgcttacattgataagaaatgacacaaaaagaagatgttgaagttttctttttaaaaaagggaaatttgataatttatgctaaaaaattagatagggtgtttaattatacccaattattacacataaaaaaactatacctatcttttaattatcttccaaaaatacccctgtcttttcaaacttctcacat

SEQ ID NO: 219675 - DNA, 6247 bp, Cannabis indica
agaggatttagggtttttcttttggccaaagaaagagcccaaaaaaagctgtttttgggttcaaatatggcggaaaatctggtacaggtattggaaccacaatcccgttcggatggggttttgaaatgtaagcttgatttatcgaagggatcttcttcttctactctgtttcagagaagaattaagttccatccagcgaggaagccctttaagggatttcgtaatggtggtggtgattttcggatggagacactaaaccccagtagctcggattcaaccctactgggatcggtgaaagtaggcaagaaaagtgatgggtctgagattttggaaaatgggttggatccagagctcagttttgaaattacctttaggaggattgtaagttgttctagtgtcttgttgctatgttgatttcttttttttggtatggtttcagacgcttttgaacatttttttctttgttttcagtttaaatgactctaattgatttggttttaacgatcacttttaacgatttatatgattttgatgagagcctttgcttaattggttacaatttgatttgtaataggaagacgactcttacattattaaaattctttccagcttacttcaaattggtaatttgtttgaaaaagttcatttttttaaaacttaaatgctatattctttctttttgctaatcagtctcagctattttcaaggctttttcctttttcagctaaacttttttttttgatatgggattcttgtttttactcgttttgttttgctcaattgctctgtttgatgtaattgtaatgttaattttggtcccaaatgctttgctattatacaataaatttatgggggacataactatgttaaacatctgccactgccatatatgagtctttttttccctcgctggaagaatttgtataccacagcataactgtgtggatggatatggattcagggtgctggtttagaaaatctgggcaacacttgctttctcaactcggtacttcagtgcctgacatatactgagcctttagcggcatacctgcaaagtggcaagcatcaaaactcttgtgagtgaatcttttgttattggagagaatacgtagaacagtttctccaatcctattttatgtgattaattgttgcctaggcaagtatgtatattgggaactctgaacaatgttacagctgaacatgagtagaattcagttaatgttatgctttaatttctgacttaaaggtgaaagtcccttaaccatcagaatagaatggatggatcttataagggaagttgcgaaccattgcgagaaatattactgttgtgccaactttcaaagttgattacaggtattttttttttacttaagctgcgtgtacgcttgcatatttgcaggattctgtaattcatttagtttctaatttggtttgtttatttgtgaaggccatattgctggattttgtgctttatgtgctatccagaaacatgttagtcgcgctctgcaatcaactggaagaagtttagctcctaaggatcttgtttcaaacttgagatgtatccttgtttatttatttatttacggttaagaatagaagagtaaataattattatcttcagtaggttggattgttatttaaaccatccactcctttcggtccccttttcattttcaattttgttatgatttcgtaacactcttcatgacatagggtctctagtaaatatgacttatctctagttggttttgttatcatctaaatcttccactcctttcggccccctttctttgtggttttgtttttgaaacatgttgatttcatataacttggaacctgtggtccttgacctcccaaataggcatatctcggaattttcgtaattgtaggcaagaggatgcacatgagtacatggtgaacttgttagaatcaatgcataaatgttgcttaccttctggagtcccaagtgagtcccctagtgcttacgagaagagtttggtacacaaaatctttggtggcagcctcagaagtcaggtagttatctgaagcttagtcggaattgtttgtaattggacaacgtttcttttgggatttaggctctggaagccaagagtcttgcactgtttggaaaactgatgaaagaccctcttcaattattagttaatgaaatttattcctctaagtttggaatttaattgtcattttatttcttcaggtcaaatgtttgcagtgttcatttcgctctaacaaatttgatccatttttggatctaagtcttgaaatagtcaaggcagactccttgcataaagctctagtgaatttcactgacgctgaacaactagatggaggagaaaggcaatatcaatgccagcaatgcaagcagaagttagggctcttaaaaggctcacagttcacaagccaccaaatgttcttacaattcatttgaaacgatttcgtgcacatgatcctggtcaaagattgataagaaagttactttggtccgacattggatttaaagtcatttgtcagtggttcctatgtaagttatcttttattaatatttttatgcactttttttcttctctgaatttgttggtaagaagattcctctttttgttacagattttctaggtttttcctcatttgatctcaaatgatgcctctgtctacccttgtcatttttgctagactttaacctcgatttaattaaacttagttacagctgaaatgagcatttcatgtatacgttacttgtgtaagctttaggattttggttttctatcaccacaaaatatctcaaaaaatatatttggatgagatagtgacaattactagctgagaaaaagaacaaatggtgacactagagcctatgttaaaattaactgctgtgtggactggatatgtgtatagctatgatgttccatgctttctttagctgccctgttctacaacatgctataacttctaagatgatgtctcttgtgctttgcaggaaggagatctgaagtatacactctatggtgttttagttcatcacggatggagcacccactcaggtcactattactcctatgtccgcacatcaagtgggatgtggtattctcttgacgacagtcgggtatgatagatgaaagaacaatactaatatatgcaaatacaaaatttagagtttgtgtggtagttgaatatacgttcattggtttttgtataaaatcttctcaaagtagtggcattctttgttggtttttgtatcatgtatctgaagaaattatacgtggtgccatgttgataatcattatttggcacataatcattatttttatcaatactattttgctataccctctgaagagttagaaagaaaagtgtttgattcattttcattttctatggcacgtgggaaattagcttatggttttttttttttgatttatcaggttgtccaagttagcgagaagacagtccttgaacaaaaagcttacatgttattttatgtgcgtgatagaaaaactataattccaaggaaacctgtggatctttcccagaaagagaatgctaaaacaaatgaaaatagagctaaaaattacatgaattccaaccaagtattaacaaaacccattcaaaatggatcaactgtagttggattgaatggcgtaacctcttctgcttccgtgacacaaaaagatgcactaaatgttggtccacaaaagatctcccctttgaatgaaatgttggatcaacccaagttggaactatcccaaactaaagctctagtgaaggagccaatggaaagggttcctcttctgcccaaaatttcggaacaatgcttgaaaactgatcaaccaagtgacaatggtgatgcttgtaagatcgaaactgctacttcaacggtggctactcacactaatggcttgaaggaggaagaaagcttaaataaaaagtctagtgtttcagttgtcacatctcccattgtagaggaaattcagagctctacccccactactgaccaaattaccaacaagatttcccaggaggtaaggggtgttcaattctcttatttcatcttaccgctctttcattgttaactagattgtaactttctttttgtgtgcatcagcagattcctacattgcatgtggaggagtcaagagtggctttgcttaaagcgcccactggtttacaagaccaaccaaaccgtgaaaaaagctcggtatgccttcaatttttttctcgagtctgtttataaatttagttattgcactcaaactctgatcatatacaaaatattgaatatcgttttttctcagattgaaaatattacgaactgtaatgttgctgagaatttgttggataagaaggcttgcaattctggtccagattccgtccttgatgagtcagtaaaagcttctggcacatcaacggtaacgaaaggatccctacacggggaagcttctgattgcaagtcccagaaaaactaaagaagaaacttttaaggcgtcaggttgcgagcatgagttttcgctcaagcatgtttttgagggcatcactggctgtacggaagaaaaagaaacataaaaagagtaaactcatgcccttggatagcaagaatgttagcaaggaggttttatctaatagtgattgcttcccatcagatttggggccatctacatctgagaaaacccctacttctccgagaaaacaagacaattctggtgctagaaaagaagcaaatcgtactcccactactaaaaatgaaaacacctgcggtgattccttgaaaacagccgtggatggatatctcccagagagaaatggtcaaaatggctctgttctagctacagatgagcaattgcagaagaaccagatctcaagggaaactgtcagttcgcactcgcaggactctgagagagagaagatgcaaaatggctggatggatgtgcttacccatggtctgtcggagacagttggtaagtagttttcagaaaatgttctcttttagccacgttatctatttggtaacaatcgtaccaattttatctcatttcatatggaccagatgcagtacttagtacttacttctttttggcttgtgacttgtgaggtgctttctatcttaattttgctaaacaaattgtttagagacccaacttggtttgacttaattgttatccttgttacttaattacacattgccaaaattcgcaatgaaacacccaactcccacaatgtggtgtgccatcaatctttgctatttaattattttcatgtgggactcagatgttgctagaatttatgacacatcattgtgtgtaatttgaatgtgtctcaatcattactctttaagaatgtttatttagtcaatgcagtggtgcattgatcaatataaccctgtgctaagtttttatcttcttctcttagattgggttttcattgtgtgaattatctgaatagttgttgggttgcttatttgacttgtatatcttatgcagtcgcacgttgggatggaatagaactgcctcctcaggcagtagaatctgttgctgctaacaatgtcagcattggctatgtagcagatgaatggtatgtgcttcatcttgttcactaaaaggtgttaatcgaattagttttcttaattgttatccatttgcgaagataacaagcactttctctttttacagggatgaagagtatgatcggggaaagagaaagaaggtaaggctatcccagcatgaattcggtggagaaaatcctttccaaaaaattgcaagcaagaaaacaaacttcaagaaggtaaagatggataggttcagatccggaaaccagcctctgaggatatgataaatcgtggtaagtggagccacgagcacatttttttgacacatttcctgatagaaactcttgcttttgttgatctgaaattgtgagagatagaattgagtgttggaattccttaactttttgattattggagagagggattgttgggtggtgagaatatgttataccttattttggtggggaaaggtctttcatgtagaatattgtactagcttaaggatggtttatccaagtgatgaactgaactggtttaatcttggtcagtaatgtacttttgaaccactgattagaggaatctattaatgtggtacttctcttttagttcaagaaaattttggttctgaataagaagatgaatatcacattcctcatttgatttgatggtgcaacaaattgatcccaaacttgt

SEQ ID NO: 219676 - DNA, 1962 bp, Cannabis indica
ttttttttttttgaataagataattatttgatcactacaaaatatgtaagtgtgtaagagtttcttaaaattgtgataaataatcaattgaaatttggttcacaaaaacaatatcagtgatgatacatacaaattaatgcacgtaggaattgtatcagaattacgaaatgacacgtaaaatctaattggcttataataattgttattttgttacgtgatataattttgtcacgtattttcttattaatatatatctaaataataaaatgtaataattaaataatattaattaataaggaattaatcataccctggataataaggaacaggaagaagaaaagcatcaccagggtcagcaaggcaaaacattagggtttcatttgcagaagttgcaccagctgttagaacaatcttatcactttcaaacttcactttgttacctcttaatttacccatcaattctgccatttcctgtaaaaatcaatactaatcaatttatctccttacaaatactacaacatttaatttagatcacattacttaaagtaattatttttgttataatgtatatatattagaaatgacatgtctcaatctaagtaataatttgtatttaaatactatttttagtgattaaaagtgatatttaatcataaaatatttaaattgtaattgaaaaataagatatttatggtaaaaattaatccttatgtaattcacttttgttgcacttaaatacctaagcaaattttttggtgacgaaaattccaatgtatagtttattttgttacaattaaatctttatgtaattcatatatttggttgtaaaaaatcgttatacatgttaatttgatgcaacattaattcataattagttaagagactaatattataacaaaatgactataaatagatttttactgctaaaaaaattacataaatatgtaagtgcaataaaagtactgaactacacaagaattttcgccactaaaaaaattatataaaagtatttaagtgtcgcaaaatatagaaatttttgccctaaatttcttttaaaaataatcactaggtaacattttttaatagtgtgcgcttgatacacacttaggacgagttcgggaacactttcatgaggaacgacaaacgtcattcttgatgaccttgagcattgctcttggatattagtggtgcccaacactttttataggtgacgctctacgattgattaataatattttctaatttttttttaaaaaaattatataagatttaatatttaattacacgaatagcgatataaaataaaaaatgatactaagacgaataatataccttttaatatttttcaaattattaattacttacatttttgaaagaaggcaagccatggtagtcttggaaaagagcaagctctttaaaaagagattgaccattagtactacttcttaacccaagtgcatctggattctcaccaagccatttctcaagaagatcaaaacaaagctgaaataataatagtaatataatttcaatcaaattattaattaatacactaattaattaaagagtacgtgtaaaattattccaattattacaataaggacagccaccaaacaaacataagtagagaattttgtcaattcaagcaaattaatccattaattaatgtcaaacaatcaattttattgctttaattaattatatgactatgacagctgatacacatttttttaattattattttacataattaatcaacttttttttagaataaaaataagcaacttcattaatataaatcatccaaaactaagaatgaaaattccattaaaaatacaatcgacaacaaaaatagaaaatttacgctaaagcatgcaactttatttgcagaccgattaactatataatcttaaatatatttatatattattattatacctgattttcagcaagacccatctg

SEQ ID NO: 219677 - DNA, 3419 bp, Cannabis indica
aaaaaagaaagaaaagggaaggttgtctacgtatgaagagaacagctcaataagaccttccattccactcaccaataaaatgagctgcccattgcctttgtctttctcctctcattaccccttttttagctctctttctcctatagctgtactactcttcttcttcactctctctctctaaccaacacaagaataagaagaagaagaagaagaaacagtaattgattttgaggacccaaaagagaaaagaaaaaacctttattaattaaaaatggtttactctcatttggggtgtttttgtatttggggttggtctttgtttgtgcttacagttactcttgttaatgttgctggttcaactagtaataataacttgcccatcatagcttttgatgaagggtacacccaactttttggggatgataatctgattatccatagggatggaaaatctgttcatctttctcttaatgaaagaacaggtctgtaattttcttcttttcatttgcatgcctcttctattttaatttttcagtttctgatttgattttcttaactgggtgtgttttttcagggtctggatttgtttctcatgacctttatcttcatgggtattttagtgcttctattaagttacctgctgattatactgctggagttgtggttgccttttatgtgagtaatctttactctcttattattattactttgttttaattaaaacaaaagattagtcttttttgttaatgaaaaatgttattttgaagttttaatcagtttcaagatttaatctttcaagatgggttttctcatagtcttttctgttattttaataataaagtttcacttttttttcttattaacacattttcagatgattcattcttctcctttaagtttcaagtacatataatcccaattacagtcttcaaaatttgatcttttttcactaaaaagtaaaacccctttttcagtttttaaactttaccattgattaaaaacatatcattagttctctaattctatttatgatttgtttcagatgtctaatggtgacatgtttgagaagaaccatgatgaaattgattttgagtttttgggtaatataagaggcaaagaatggaggattcagactaatgtttatggaaatggaagcacaaatgttggcagagaagagagatataatctatggtttgatccttctgacgattttcatcagtacagcattctctggactgattctcatatcatgtgagccttgtattttagttttccaatgttttaattaatattaacattgtttatttaatttattttctctctgcaattatatcacttttgcttttctcctttgttattattatttttctccaattggatatatatgatgaaagtgatgtgaattgttgtgttgtgcccctttgttgtagggtatatagatcagagctcttgttttggtaaattacagtactaaagtttcttcctttttcattcttgtttgcctaaaattacatcccctctttctcccaaaacaaaaccactttaccatattactaataccaaccaacccttttaagcttactagttaacacttgtactaatcaagtttatgctttgttttgtgttattattattattatttggaaagtttctgactttgttttctttttgttaaattcagattctttcttgttaatacttcccaatcaagtttcttactttgatttcttttgttaatacttgtactaatcaagtttatgctttgttttgtgttattattattattaggaaagtttctcactttaatacttaccaatcaagtttcttactttgttttcttttgttaataccactttaccattactaataccaaacccttttaagcaatcttagtagttaatacttacactaatcaagattatctttttttttgtgttattattggtatttggaaagttttctttttgttaattcagattctatggagttgttaatacttgtcaatcaagtttcttactttgttttcttttgtttaataatactctccctatgtagccaaattctccgaccttgtcctccacggttgctcggtcgatccaatggagcaattctccaagtgtgacaacatcccaaattccaaatccatcccaactggtatcacaccatcaaaacgaatcaaaatggagggcataaggaagaagcacatgacatactcatattgctatgacaaacttaggtacaagtctcctccttccgaatgcgtgatcaaccctcaggaggccgagagactacgcaaatttgatcccgttacctttggaaatggccgtcgccaccatgggaagcgccaccacaggaacaaagctagccaagcacagaaatagaccacataaagcaactccattctatatatatatataaaaaaaatgtcttctttgatggattcatttcatggttctactttttaatttttgtgtatagagggataaaatgaaaaaagagcacagatttattgagagggtgatgatagagtattattattttataatatatggttttaatttcttctttttcaatggggtatgtgtatagtttcatatgatttggcttcttcttcttacattttacagattgaatttggtgatgatctctgtattttgacacactctcatatgggattcccaataaattatattcagtgtatttgagtaagtgaaattattatgttaaaatattgtgggtggtccatgaaattattagcataactataataagttcatgttgtttttttctttctagttttcattcccttatagtgtttttatttttttaagaaggtgagatgagagagaattgtcatattcaaaagaagattttgtcaaatgggtaattggaatccaaagtgagctggatgtgacaagtggtgaagaagagttcagaaaattgacagtaattattttggacttttcagttgaagttgaagaagaagaaggttaggtatttatttggtgttggttgatgagaagaaaattctaaggactcacactatcctatttcctatcctttcatcttatcaaaaacctaaaccataattattggttttaaataataacagctttcaaagagtgaatattaagttaaagatacttggaatatatagggtttacattttttcttgtttgaatatccatctttaccttattacaacacttagatcaatagttaggttgatgtaatatgttttagataattatgtttttgaaaataaaatgtacaatttctatttattttttcactacaatattttttaggggttttttatttttatattttaaaacaatttttttttttgttatttttacgtacattctacttagaaattcatatagcaactaatggaacatccagctcactttggattc

SEQ ID NO: 219678 - DNA, 3063 bp, Cannabis indica
aaaggtgttgtccttaccgagctctttaatacgatcaagctcactcatatgggttgtcttcatttgtttgatagtttccaaggcctgcttgtattcaacctctagcttaccaatagcggccacatgtttgtcattcaaagccttcaactcagcctcaagtttgataagtttcgtatttaaggtaccaagctcattatttttttgcttaaacataatcttcagtagcctttaacttttcacccacctcttttagttgctttttagatgtctcctaagaagaagtgagcatgccctctagttccttcacttttaacatggcctctgtatagtgcctttccatatctttaaatttctccacatagatgttgtgagaaatattggtcctatggaggaggttaaaattgtcaaagaggaactggaaaaacaaagcaatacagttagccacatcatgggtatccacatgtaaaaataaagactaaagttgtaaagtccaaataccataatgagagagctacgacgcctttaagtaagcttactaatcggaacaatatcgctatcaaaggcctccttggtcgatgcatgcaaagatgagattcctgagccaatattcatcaaaacctgcccactccggtgacaaaagcatcagaagcctctccttgaagtaaaaaactccgagccaattgttggaggatgttctaatttgatgcaacataggagacaatcccatgactagaccctaaggctgtccaaaaggaggggccacttgtggaacatgtgagcccataggtaatgccaccacggccgctgggggtgaaaccccacctcttaaagtgggggcagtggtagccgaagattgaggtagcatactagttggcccaagcccgatggtgacatggccatcggggagggactcgtagatgtcggggcatcttttgcagccacaacatgggtacttggtgaggccacttgagtcggagtggttgtttgttactttctgcctcttagctgtttgtttaatggaggcttctaagttgtccatgtttcctagaagatcaaaggcaaaatatacatgtcaaaagttacaaaatttataaaaaaaaaacaaacaaagtgcaagtcataattgtggaaagaaacatggagaaaaagtacgaccacaaacatatatctaagttaagaagtcaagcaaggtaataaagaaaagacaattttcttaaagctatttttgctctcttcgaaggaagtactaaagtgttatggttatacccgaaattcggctacactttagagcgtgacacgtgtcttgtagtggaatatgaaccacctgatataatgaaattatatcatttagtgaaaagaaaaagaataactcgttaataaaagattaatggaacttattcataacttgttgactacatagtcttaagcgagataaggataaaaggcagttggaacttataattgatgagatacatgcacatgcctctgtatcttatattcagaaaatatcttaaataaaatagactcgtagagtatgcagatttaactgcaaaaccacgtaaaaatatctaactattcggaagaagaagtgttgcaggagttatattggtggcgaaaagtccagcttaaaactagttgcctacccctcttaattcatttcttaattaagcattaaggattgaatgctctggaacatacttttgactaccaacccagattcaggacaagcagatggacttgcaagtgttatatatacatttattatttttcattaattctgtgacatatttattatgtaaaggcttactatttttggttaacaaaaatctacgttaacagtttggtgctttcattgagagcctaagtaataaaattctaaaaaatccctccttacaaacagaagtctatccatggctagtcacaatcaaaacgatagaaatcatcctgaagaaattacacatcgcccggggaaagagccaatgggttctcaaagaccccatatttatggaataacatgttcaagaagaaattatggtggagataatcaaaacctagaaggaaagaacaaaaaaaccaatacttctgtaggatatgtacctagaagtgaggatgcttatgatccaactaggtatgtattattaatggaattggaaaatcgacaactccgacaacacttagctgaatctaaccgacaaaatactgagttggaaagagaggctacattggctagggcaacttaaggaactaatacatagaatcaacctgatcctggggtaagaagaccacaaggcagacctcgggattcaagaacaaggaaacaggaagcaaatcaaggaaatccccaaaacacccaggaggagcaacctaggggtactagggatgttgcattggatgaacaacaaaataaccaagaccaacatcgagaagttcctcaaagatcccaatgatttatgaatcaaggaaatgaacataatgatgcaccagaggcttctcacagtaatgaggacacaagttagccacatactaaggaacaggaaatccctcgtaataataagagaaatcctgggactcaacctaggacaagtgggctaccaccgagacactctgaacgtccttctcgatctgagagggaaggtgtatacacatacctaaatagaggacgtgtatctaacctcttccgaaggagaaagccagtacatgacgaggcaagttctagcttgggacacttgaggtctcgagggcacattcgatcaggaaggcaaatgcgagaaggaagcagacctcgacgttatgctgatcaagaaagcatgagcaatacgagaagctatcaatataagagttactcagatacgagatttgtgagtaattatgagcgaagacaacctgatcttcgcaagtgactaaatcagaatgcacctgacttacgctatcaacttaatgctaaccaacaacaaatggaccccatctagttatgaatgaggaaaccgagccattttatcctgatattatgaattttgaattccctcagggattcaaaaatccacacatctcgcagtatgatgg

SEQ ID NO: 219679 - DNA, 3877 bp, Cannabis indica
tgtgaaatatgtacaagctgcaaaaggctgtttgctcacccttttgaatgtgatgaccagctgcaggagagcgtgaactttcaagcatatcattagcagattgcttgcctaaagatgccggtcgtgcaggccttattctctccctatctgaattctaaatgaagactcacgtgatagcgatggcactctgttagagctggaggatttaggtgatcctacacttgactcaagggcctgcctttttgcagcaggggttgcttctagattttctaaatgtctcttggacggaacttgtgtacttgaactggctttgctcattctctttccctccacttctaaaagttacacacatatcgatagagaataagtgtcttttcacaacagaatagaattttaaagcattttttactcttgaggcattaccttgcttttggctattgatttcttcagcaaacttgcattcttcgcacatccaattacttccaggaaccttcctcagcatttttcgcatgcaatagctattatagcaatagaaatgtcaaaatgtgaattcaaataatcctaacaaacaaagcaacaaaaaatacaccaacagaagaatacatgtgaagaggatggattaatcttacgtatgttctgcgccatcactacacctactacatatagctagcatatcttcacgaccagcatccccgcaaatatcacatactttaacctgttctcaacaaaagaaatcagagaagttaatgactcaaaatttgaactctgtagtgaagaaatatgtaatatacaataaattcgaatttattggaaaatctttggaaataccccgagataaataacaaaattaaaaattatacataaaagaacttcaagaattttggagtggaacacaatgttgttgtgttggttcaaaacaaattcagaaatgagttaagaaaaaaaggtgaagagagaccaagatgactggaatcaaaactacatttccgagtcacaaactccttcttcagtcctactgagacccacaaaactaaagagcacatcagtttacatttttctttttcctcttttaaatgcaattcacaattcacttcagtgagtcaatgtctaaacaatttatgaagtctcatgttataaccctataacaaataagagaccaaaggaaccataatatacaaagtaaatgaaaaatgcaacaaaagtcttcatagaaaatatattcacaagggaaatgaaataaaaaaaaaattagtcactatgagatatattaatggaataaaataacttcactacttacatcatgctccacaatgtccgattcatcactatcatcatattcggttttcaaaggaggttccggcacgtcaaattcacttgacttctcatctctctcaccttgacctgaacatttcaaagttttgcctgttgactcctgaatatcactagtgatctctgcttccagcttcggtgatattgttgtgggattatcagtatggacaggagatttctgagaagaaacaccatcaacagctgctgcagctcctttcgatgaggcaccaatttgttcagaagtgcaatcaactaatttttcctgtaaatacgcatcaaacctcctcaaaagtcagtaaagtgtaatttaaggggcaaatattaacactgcacggacaaaagtagaagcattgcaccttagagtagctactgctagcatctgcatcttttgaaactggcgtctcacatacttttgactcgtgtctcttttttgattcttctaaacctaaattactaactgaagctgaactacatgaaagagttttcttgtctacattcttgctactattactgattgcaacatatgtgtcattagctctactaacacatgaaatgtcatcatcatgagcttctacaactttggaatcctcgcacttaattgagaaaccttgtgggtaagtacgaactgctttagggggaactccaatctctccattaattccaccagagaccacgggaggcacctcagtgtctaaagccttagatcttacgcctgctttgctgtcagcattttcagataacgaatcatgactagaactaacactcattaggttgcttgtttcactgtttgcttgctgtaaactgtcacatgtcttattcttaaaggaagatgaggtgtcacccacattcacagagtactggctagcaacatttacaacacgaccagtttcgtcagaaaattcttcagtttttgaagccatgagagatcgattaaagtgcatacacgatgaacaaggagcagcacaaacgttacaagccccagactcgcctttcataggaactttatggctcatggaatgttcactgaattcgttttcagatacagatgaaacctaataagaaaaatgcataaacttagaacataatgaataaaaaacacacaactggctttaattacattatctacagatgataaccaacttaggttagagaagagtactaaagatgtattatccatttgtcctaaactactacgtttgatcaacaagttaaaatgtttgtacagaaataaacaacagatcaacctaagctagcaaatataatggttattgattcaaatctaaatagggagttacacttaatgccctggaatgcgctttgggcagttacttgcttttgaaccactgctaaataactaaaagagctgaagctcacgtttccataatgaaaaagaaaattgaagcgttcaacacatacaacaaaagcccataaacaagagcaagaaaacaaagggttttagctatagctcgatcaaacaacagaggattttacactactacgtttaatgggcaatttaaaatgttgtacagaaataatccacgatcaacctaagctaccagatataatggctattggttcaaatcaaaatagggagttacttgccctcccaccattgaaaaaccaaattgtagcctttccctacatgaaacaaatgcccataaaaaatgagcaagaaattccacttcttataacacatgtagctcgatccaacaaacaacagaggattttagcagaaaaactaagttacaacaaaaagaaaatggtagaaaagacaaaagaatgtatgtagaaagtagaattaccctgctatctcaccatattcctctgagtattatgatcaatgtcatcatcagaatgaccttgcatgcgatgactccctctcaagactggtgtgatctaaaaagcacatcaaattacattaattacaaccccactaatccctaaaccacttagcaagaacatagaatgaacaaacatcacccaaaattaaatcaatcaaattaaaagaaaaaaaaacccaaatgactaaaaaagagaaaccctaattaaaaaaggattccatgcctttggttccaaaatcatctgggtgtggtggtaaaggtctaggaataggcgttcgttggggtttggcatcctcagttaaaggatcggaagagagcgaatcacaaagaaaggtctgaaagtgggaattaattacagaaattgataggtttcgatgttcatctcagaacaatatcgaagaagattgaaagaaagaacaaaaccctaaattggtgaagaattgaaatcgaaattagaggtattatcgatagggcaaaccacaatccgaaactatgtatcaatcaatccatccatccatccatatattcatctatctatctaaatacatacgtgacaaagaaagaggatcctatacccatacacctatacatatataggtatatatatatacacaaatacatacatatacaaattgttaagtgtatgtatagtgtagatagagtagtagaatcatgaaattggtaaataatttttatcatatataaaa

SEQ ID NO: 219680 - DNA, 4684 bp, Cannabis indica
agtcttcatcatatcaacatattgcaccaattatatacgtacttcgtaaaaaaaacagtgttggcagttgtcgcttcgtcatcatgttatttccttatgaactggtgtaagtcgttattttgttcattgtatctaccgataaacgatatcattgatacgtagacgaatattgtaggcaatatcatctgtcaagaaaacgcaatacaataattcataaacaattgagataaataaataatataataaatgtaaatattactcatatacgaattatttcaaaaatacttgactaattaatggcataattttctaagacttacaatttggtggttgattcactaaattgaaaaataacgtgataaccctcccccagtgatataaaaaatcaatgctattggattttgagcgtcacattaaattttatattgtaaattttggtgtttaataatattttttttttattattttttaattacaaaagtaaaaataaaatttaccttcataaaattttatttttaaaaaataatgtgttggataactacttttttttttcttattttaaaaacaaaaacaaaagtgtattttataaattttatttttttattttatttaagtcggatcgaggtttggatctacggccgaggccgtggttcgagtccggcactggggttggggtcggagtccaagtttgaatcggaatccaaaatattaattaagaaaaaaaaaatcttttaaaaaaattatgaaagtaatttttactatttttaaaattttgattcttaaattaaaaatttgaaaaataaaaataagttttagaacatattttgaaaatatttttactaatctaatttaaatttttttaccaaacgttacccttaattaataactttatctcatgtggtctcgtagtgatggcagatttttttacttttaataatagtaaaaaattgtaggtaaattgaaaaagtgaaattagctaatatactattttttttaatttttttttcaaatttacggtttggtcgggttgctctcgtgttttctatgcgggttgctatacggattttggttgtgatttaggttgctctgttagttgctctaggagtttctaagtggaattccgtaaaaaaattaaaaaaaaaaaaaaaaaaaaaaaaaaaccaaaaacttagaaaaagtaaaaatgaaaaaatcccataaaaaagtgactaaaaaatattaagatttatatttttactaaaaagtctatatgtaaaaatgatagggttatgtaccttcccgtggcagttaaactatgtactatttacagtttgcatgaaccctttatttattagggtaaaagaagaagcagtattttaggaggaatcacagatcctctatgttaataaagacggagaaggctccaaagctcctaccattcacctactagtcggaaaagatacagtcctctgaggatgtacgggcgtcctagaaggataatagggtcatatagtttgggatagatgtaaccaattaatctcggaccctatctagctatattccatctagagcgctaggagacatttgtatgccctctgacaccgaattagatcttgtcctctgtgtcagaccctagtagtgcgcatacttggatttgtagtcctttttctccaacggcttgtctaggcaacaacttttaaaggaaaaatcattgagcgacaacgctcccacaacatgccttgcaatggtcgtgcaccacacgatggaaaagctacctaccaaaccagcgatcggatcttcctgttttagtctaagccccagtggcgtgttgagtaagtaaccctaggtgggtaaaggatatgcccttacccacatgtgtgcctatatataactttactttttatatgcaaggggtgaacaatttttacctataaaatcgctaccgaaattcttataagattctttttcttcaagaggaatgagaagaatacagagtttacatttatactgtaaacacttgtattacataaatacttgccgacaaggctaatacgatgtggactagggattattaacgcttgaatcaagtaaaaaagaatttatctattattttttgtcttatattttacttaagttttaattaatccgttttcaaatatttcgataaataaatagtcataaaaaattataatttactttaaataaagatatttttcagacaaaatttttttaatcattataaacgtatgtattaattacaatttgttattaaattttatttttaatcatatataagcattatttcaggagattattaaaaataaaatatttatttactattgaaattggggtaagaggtttcaaacgtgagacttcttttagtaagaaaaagtgtgaaatcactatattatacctatgatcacatatttatatatttattaaaaatacacaaacttataattattcaatttatttttctgtgaaccataatttacaactgtgtaatcaattacaattttgtaactaaagtttactaagattatagttatatattacaattttttaaaaaatattcacagattaaatattattgcaaaatgttgtctatattttgtaattacttacaaatgagaaatgctagtactagtagtatctagcactcttccacatatcaatatcgctatttgtgtaatcaagtatcggattctatatagtttaatgtaataacttttagagagtattgttaatcactcgcaaagtgacatgtctagaaggtgctaggcaccaatattaatgctcaaataataatgttccctacaaataatatagagagagaacgcgacagagacttgtatactatttgtatttgtatctatacatatacaaaatatatatgtctatggaatggagagggagaaagacttgtatactatttgtatttgtatctgtatgccaacccctaataattttgattataatattaaaataaaaaacttcaagaaaaacatgtagaattatataagacactattattgtgagggtgatattcttcccttttaagttatgaatcggtgactatagagagaacaattattactatttggtcataaaagggatcagtcgtgcatgggatttgcttgttgcgtaggcatcatgaacagtgtctccttatttttggggcactttgtgggacaagagtgcaccaaacagtacttttgtggataaggaccctcccctcccgccttctactactgatcttttaaacttttagtcacaccccgattcaatattctacatcaaatgaaggtgatctgatcgatcgatcaggtacacattaattattccttcaaatctgtaaaatcactatctatcaaacttcaatttccacagtgagaaacacaaaacaaaaaaccaaataattaaagatgaagctatatatatttatttatagctagtagacgcactcgtaaggccaaaattttcggcaacattttctctttgaaagtgatagccacatacaaggacttgaatgatcaccaccaaccgaatatgacaattttctaacaataaaaacaataaaaccaaacataacatgtaagatacatttttcatttataatatatatatatatgaaattattataaaacacttacattaaatagtttaatgcaggcatatcgtggggagcataaaagatttgagaagaatttttaagttttacgacccaaattaagcttctcgcagtgaatggtataaatgatgaagagaagagtgactcttttaagaatgtgtcccaacgattggccctttagttatcatccatgaataacaaccactaaatgttctttattctttggaatattaggtaaacactattcaattctttagtgataattgttttcaatattaattataatttgaaattatttctatacgatcttacatacattccaataaatttttttagtgtgcattggatgctagagatcattgcactaggaaaaattatcgatttagaccttatacgtggccacaaagttccccaacaaattaataaaatgttggaaaggtaataatttaattactctttatgtaacataaatttttaattaactaattaattgaaatgttaatataatttttaaaacagagcataccaaattattggggcatcaaatccgtatcttgggtcgtggccaggaattgcactaataaattttccaagacaacttaaaaactaagaatgtggtttttatgttttgaaatacattactgacatcgtcgcacgtgcaaaccccaaccgttatatacaagatcaaaaagctataagttttaattattaattatagtatttaatatatttaaaaataataatatatatataaactaatataaatttttacttctttttatagtttggagaaaaaaagacatacaatctaaaaaccgaattattaccattacgtcgacagtatatagaacgattaatgtcggtgattcacgaaggcttgaacaaatgatgctgaaaggcctaagaatttttcttccctagcttattttttagtttaacttgtaatcaaatttaataaattattaatacttggactaattttataatatttgtgtaatttataattgtaatttatttaattgcttatatgaaataaaattacttatattgtctaatcataaaattaatttaaat

SEQ ID NO: 219681 - DNA, 4475 bp, Cannabis indica
tctctctctctctctctcaagcatgcagataaacaaggctccttcaaaaaattttcttttcacacataaacccagttcgtttccacacgctgaaacccattccaagccccagatctcgagatcttggtggctccgtcttcccatccatcgtcgatcaacccagctctgagagctccaaccgtccttgtcgcatcaagaagctcagatccaatcgtcccaatcgcgtcaacattaacttcgggcttcatccctccacatatgcgatttccagaaccccttcccctctcaaaatttatgaagctccttcagataatcaattttttctcacgagttttcttctccctgtcaaatcgtctctgctagaaatagtattaatcaaattttttggatataaattcaaattttacaataaatttccccgtgaccgatctggttcttttgatcttctaagtaatgtgaacactctttacacccaaaataatcatgattatacctatttttgtgaaacagattgtaagtttttatttaatgcaatttggttttcatgtattaaatgttatgcttcatttttggattctgtatctctatttggatgagtggatgagatgtgatactcaaccactgaactccttatttattgccatttttagcatttttgctataaaaggcaacctgcttcaccttttcagcacacacgaagcaccatttagcagcaagcattccctgtgtttttttttttttgcctttctttgtgcacacacgatcccacagtcatggatgacttaaccacctcattatcaattgctcttaatctcacagatacagaaagtaccattcagacactttatgaacccactcctacagttgatacagtcgttgatccccccttgttgctcaattttttctggttgctaaactatacactgtcaaaactttcaactgaaaagtcttcatggaaaaaatgatagggaattggaataatatttcctgattccctgcaccattacggaccgatccaaaggccttttccttattgagtttggatgtgaaggtgataggcatcgtgttctattgcagcagccttggtcatacctcaaccagcccatcctcatggatattcccaattcggtggacgtcctaaatggcgacaacctcctgaaactccctctttgggttcaagtcttcaacactccatttctcaaacgcttcgtaaagcttgcggagcttgtctcctcctctctcggccatctccttgagatttatcggccttcctttcgggaaacttggggaccctatttttcgtattcgagtcatgtttgatgtggcacaaccacttccaaggggaatcccggtcaatttctcggggataaacaaagttgtttggcttgagctaaagtatgaaaacctctcagacatttgcttcttttgtggtcgtatgggtcatagttacaacaaaagattgtgttgattatatgaaggcctgtgatgaggcccctcttccacctgatctcaggtatgatatcaaaacaattttcgggcaaggttaagatttatactaatcctatgctatattgtcctgaacagctcactttcactactccccccggtggccacttttatgactacaaacccaacaaaagcagtgtgtgtttccctacccgactccatgccccctttccctacccatgctccccatgatcaaaaccccactctcggccaaactcaacttgtgggactttttaagtccgacccctccactcattcaaatgaaaccgtgccttggaatcaaactgacacccaaccccttaccacttttcttccccaacccgaggcaaatccaccaacattcacggctcttcttaatgccaccatgagtaacacttgcgcccaaaatgccccacaagccacaacacctagtttctttactacctcacaaaactctagtagcaccaaatctactagtaccaagcattgccatgtcctacttccggtcaacatcccactccttgttactagcaaacggttggaggccatgaacttgtcctaccaacgaggggtggccactccttccagctccaagggcaaacaaaagaaaagcaaatccaaggcgaacgaaagtttcaaacgacaagcccaaatggtcaatggggaaattcgtcaaacggtcaagcgctcccgctttaacaatcacactgatcccgagatctctcctgaaaaatgcaggcctggccgctgagcaggcctgcctgctgccatgaagctcctcagttggaatgcacgtggtatcaggagtgatcgtgcattccgtaatttctcccgcttggtttcctcttgtggacctgacattttgtttatcatggagtctagacttgttaaaaatgctgttgacaaacttaggattaagcttaattttgactctggtctagaagtccctagattaggtagaggcggtggcctccttttgttatggaacaatgatgtaattttaactttactttcgcaatctattagtcattttgattgttatgtttcgatacctaccgataatgtctcttttcatcttacttgtttttacggttcgccctttgttgctcaaaggcctcatacgtggaaaatcttaaatcgaattgggaacaataatcccatggatccttggcttgtcatcggggattttaatgctttccttaacttggatgataagcatgggggaaaccctgacagagatccttcttctgatttcaaacgttttctaaactcttttaatttttagcccgcttgatccaaaaggcccccttctgacttggaataataatgtggcctccctgaaaaacatccaagagcacattgattggggtcattattaacccctcttggtctaatcttttccctgatgctctcctctctcacctaggtttctttggttctgaccaccgtgttcttgagcttgttaccaatagcactaccactccaatccctgatccgagtaaaaagcggtaccttttttgaaaatgttttggctttcagaaccaaattagactaagaccctggaatcagcctggaattgctcttctagtaacctggaagtcattcctcgccttgttgctactcaagctaactgcgctactcacttaaatgattggaaccacaagaagaatttctagtttaaaaagcgcataattcgccttgagaaagatcttgagcaagccaggaatagcaccaattgggataatattacggtgagaaaaatcaaagacctccaatctcgtttggaggctcttctctacaaggaagaaatctattggaaacaaagagccagagcccaatggcttgctcagggggacaagaatacaaaaaatttccaccgccatgcgtcccatagaaagaatatcaataaaattctcaagcttcataattctagtggaggcatcttcaccaaggatgaagacatcactcatgaaatcgaatcttatttccaatcgctcttcacctctactgatctgtctgcctctgatatgcaatctgctttagatggtatcgactctttttgtcagatagtgacaaatctcttttggatgaaatttttttggaagacaaagtagaaaaagcgttttcagctccctacggataaagcccttggccttgatggttttaactctaatttctacaaagctaactgaccccccgtcaaaaaagatgtgttatctgcggccctcagattccttaacagtaatggaaatattggcttgcttaacaccactctcatcaccctcattcctcatgttaaacatcctacctcgatcaaggagtttagacccataagcctttgtaacatcatttacaaaattatttccaaaaatattgcaaataggcttaaattggtcctaaacaacttgatctccccaaaacagagtgctttccttcctggtaggctcatttctgataatattatcattgcacaggaagttacccactcaataaagctcaaatccaaagggaagaaaggttggatggcgcttaaactagacatggccaaagcgtttgatagagttgaatgggcttttgtcacaaccatcttaaggaaatcatatttccctcctcgtttcacctggctcattttcgattgcatttcgacgaacacctttcaggtgaatgttaattgcaaagtctctggtcatatttctcccactcgtggtattcgccaaggcgaccctctctctccctatcttttcctgctctgtgccaagggtttttcatctatccttcggcaacaggaaagaagggggctctcattggcttcaaagtggctcagtctgtatgaaagggccacgggtcaacaagtgaattttgacaaattttccctgtacttctctcctaacgttgcccttagggatcaaaccctgatctcagatttcatgcggatcccggttaaatcctcttttgagaaatatctgggattgttggaattattttaccag

SEQ ID NO: 219682 - DNA, 7030 bp, Cannabis indica
aagccctcttcaactatgtagtcccatacctacacagtctcagaatcatcccacttgaccttccccaggcggtgtgggattgcacagcttacccgttgtttccccttacggatcacgggactactgactgtcacattttccactcttggttttggtagggatgactgtaattccaataggaatcagaaaaggaagtttttcccagcaccagatggctcgagtcgaagtaagaggttccatgggaaccaagttaaaggcggatgtcaagcctattctaatctagagtgtcctcgttgcaagaagcatgatcctgggggatgtaaccggaagacatgtttccagtgtggaatggtggggcactttaagaaggattgcccttagtttaagaaagaggaactagaactaagaggtgaaacccactccagctcgagtgtttgccatcacttaggtagatgttgtcgctagttcttctatggcaacaagcagagggcaaggaaccatttgtatttgccgggtccattcaaggttctcggatttcgatcattttagtattaaaggctaaggatttactacacaatggatgtgtaggatttttagtgattgtgattgactccagcagatccaaaatatttgggcctgaggatgtcaggtggtaaaagagttattggatgtgtttcccgaggagttacaaggattaacaccgtagcaaaaaattaatttcatcatcgatttgacagctagtgcagagcctatttcaaaggcatcatatcaaatgggtccggcagaactcaaggagctaaaaatacaatttcatgggatgttggatctagggtttacccgacccaatgtgtctccttggggagctttggttttatttgtgaaaaagaaggatggatctttatagatgtgcattaattactgggaattgaataagctaatgattaagaataagtatcctttgtcaagaattgatgacttgttcgatcaacttcaaggaaaaatagtttcctccaagattgatttgtactcagggtatcatcagttgagaattcgggaggaagacattccaaaaactgcattccaaactaggtacaactattatgagttcttggtgacgtcgtttgggttgacaaattctctgacaacctttatggcccttatgaatagagtgttcaagaattttcttaataattttgttatattatttatcgatgatatcattgtatactcccagtcacaagtagagcacgagcaacatctttaaatagtttttctatgacttagagatcacaagttgtatacaaagtttaagaaatgtaagttttggggaatattgttagacaggatggaatcatggttgatttggggaaattgaatcagttaagaattggtcgagaccaaggatagttactaaagttaaaagttttcttagattggtcggttattaccaacgttttttttagaatggttttccaaaatgtctatgtcgttaatagaattgactaagaagaatcaacggtttgtatggtctgacaagtgcgaaataagttttcaagaattaaagcagcgattgattttggctccagtgttagctttgccattagatcaagagaaatttatggtgtactgtgacgcatccagacaaggtctgggatgcgttctgatgcaagctgataggtttattacttatgcttctcgtcggttgaaggagcatgagcagcgctattcgacacttgatttagaacttgttgttgtatttgccctgaagatctagtggcattacttgtacatagaaaagtgtgagatttaccaatcacaaaacacaaaagtactcaagtacttcttcactcaaaaagatttgaacatgagacaatacagtggttggaactattcaaggactatgattacgagattttgtatcatcttgggaaaaccaatgttgttgcggatgcctttttgagcaaaaaagatcccgggcaggtttttagtaccacaatgatctctcctcaattggctttaggtatggttaggaccgatattgaatttgtggttggaaatcttcacaacgtaacgctttagtcagatttattagaaaaaaaatagaggggtacaattgaaagattttgagttagttgggattctgtaggaggtattagctggtcaggctaatgatttctcaattttgaacaatgggatgttactttataagcctcgagtatgtgtttcgagcagtgatgagttcaggaaaagaaatactagatgacgcacatactacaccttattcattacacccgggtactactaaaatataccaaaatctaaaaccttattattggtggtgcaaattgaagaagggtgtagtcgattacgtgaccaagtgcttgatatttcagcaaatcaaacaaaatataagaaactggcagggttactatagcctttgacacttcctggtggaagtgggaagatgttattatggactttgtggttgagttacctagaaccactgaaatgtatgattcggtatgggtcacagtggactgttttacaaagttaacacacttttgtcggtaaagacagcctatatagtggatcagtatgcggaattatatgtaaaagagatagttcgtcttcatgaagctccaaaatctattgttttaaacaaagatctgaaattcacatctaagttctaagaaagtcttcggagagctatgtgtacaaagctgaagttcagtacaacttttcatccccagactgatgggcagtccaagaggacgattcaaatattagaatatttgctacaagcctatgttatcttttagggttcatggaataaatatttgctatcgatagaattttcttacaacaacaactattatagtacaatattgatggctccctacgaaatgttgtatggtaggaaatggaatttcgtgattcattgggacaaaactggagaaagaaaatatttgagtcctggttcaacggaccagggaggcaatagaaaagatcaaggcttggacgcttgcttcacaaagcaggcagaaaagttatgttatttataagcgcagagacatagaattttaggtaggagaacatattttcctacgagtctcaccaatgaagaatgtaaagcgctttgaaaaaaggggcaagttaagccctaagtttatagggccattcgagatactcaagaaggtcgtgtaggtagcatatcggctagccttaattaccaccaacattatcggttgtacataacgtatttcatatttagatgttgaggaaatatgtgttagacctaactcatgtcttgagttatgaagccctagaactacagtcagatctatcctatgaggaacaacaagttcaaatcttcgataggaaggaaaaggttcttcggaacaagacaatagcattggtcaagatactttagaggaatagtaaggtggaagaagccacctgagagttagaacccggcatggaagttcaccaactcaaaggcagatacttcactattttttcatatgacagataacgtaattataattgtgttgatctatgtgaatgatatcattgttattaggaacaatgacaaagagcttgttgagttcattactaaattgaacaagcatttttgctcttaaagatcttggaccctttacattacttctttggtatagaagtatgtagagatgactcaggtctgtacctatcacagacaaaatatatcactgaacttcttaagagatatgacatgaatgtcaaaccatgtccaactcccatggttacaggaagatcactgtcaaaaaatgatggaacaccactgtccaatcctaccatctatagaagtgcaattggagctttgcaatatttgtgttataccagacccgatattacttttaccattaacaaactaagttagttcttgcagggtccaaccactagccactagagtggagttaaaagggttcttgcacattggctacaatgaaaggctgtctctagtgggatattcagatgttgattgggcttttttccttgatgatagaagatcaattgttggacactgtgtgtattttagagaggctcttgagtcatagtcatcaaaaaaacaagctaatgtatccaaatcaagcactgagtctgaatacaaagcattagcacaagtggttacttaaattacttagatcgaatctctgttaaaagagctaaaattcaagctacctgagaaacatgtcacttggtatgataatcttagtgctagtgctcttgtttctaaccctgtctattatgttaaaaccaagcacatcaagattgacagtcactttgttcgaaataaggtctaaggaaagaacttgagatcagatatgtgccaattttttatcagattgcagactgcatcagaaagagtctctctcattccaagttccaagttcttgtggacaaactcggtataaaaatgtcacccctttgtttgaggggtggtgttaagaacctgcctaatacctgagcctcacaggagtatcatgcactgccatgacagaggatattcctctcatcattttgttaagattaggccactctagaatattctttccactttattgggtgtaagaattctgttagaatattgttgtattgatttttgtatttgtgtattagtagatgtatgtgtacctaagaattctataaacgaaatacacggttcacttagtaagagatgagctgagatttatccaaaccaaaactctacatattcactctaatattattgagcattgctattaggcaccagtggtgcctagcaccttttcaacatgtcgcgttgcgattggatagcgatacttcataaaagttattatattaaattatatgagacctgatacttagttggaccaataacgatattgacaagtggtaagcaccactggtgtcctttaacatttctcaatattattagctacaaacatcgatttggctactattagttagttttagtataatcaataaagaagagaaaatccattcttgtttctaatatttgttatagtgacatctcgtggtgatgcgtggtgatgcgtggtgatgctgagaaaattgataacattagtgttcgatatataaaattaaaatcaatatatgttcactagctaactaataaaaacctcactaattaataatggaaatcaacaaataaaagtcaattaattaattttgtttgccgttctcattatgaagtttaatgcataatgtgtttatggatatataataatataaattataatcaatcattaattagtattgcatgctatagttatatatagtcaattaatttttattttttattttttttgagtgaatatagtcaattaatttaatcccccaattaatactacgtactgaaattaatatttatggcctcgatgagcaatgcggccgtgacccaactgcacgatcagatttgatttaaagttcatattcacaaaagtacaatatgcatttaactttggccaaatatgagaatttctaaaatttaatctatttaattacactatgtttggtatgaatggaaagaaaagtagatgaaaaaataacaataataataaaggatagaaactagagaagatagaaaaagaaaataatgataaaatcataaaatcataaaagtaatgctatcattttttctggattttctttttaactttttttccactcattcttctcttccttcttattttctttcctactaaacatacaattctttcttcttctcttcacttttctctttgaagttctctttccttccacttttcctgtctaccaaacataggataaatttggttggtgttataatgtatatctattttttttcctttaaaagtggataacgtatatgtttagggggtatatagcattgacttttatatgattataaacctataatataactaaagaaatttaaacgagtaaattaactaattaagcaattatataatagtaattatatcaaatcttatttggcttccacataggggtcatattttagctttgatatatatagttctagtctaattaattattaaataaattagattggtttcaaagaaaataaactagatttatttagtttctctctgtaaatatatatattacgttttttaacgagaagtgctaccgtcaatctcctgtcttagttaatctatatgcccaaaaaatatttgtcagaatattctttttcaattttttttcacagtggtatttgttatgcttacaacattatccctgtaaatttttaaaaaatttcaaatagtttacagtgccaaaaatacgtttgaattttttttaacacgagtggtaaactggaatattaggaactctgttttcggcactataaactattcaaaattttaaacaaatttatactataactataacgaatacttttatgaaaaaaaattgaaaaaaatattttaacatgtaattttaaatgtaaaaattaactaaaaaattataataggagattgtaattagctatcatcatttttaatttgcgtatgttctcaatgcagagtttaaactttagtagtggtacaaagtgacaaataaatattgttaaacatcgatatatatgtcccctaaagaatttgtttttacccactttttattcatggcaacctaattattacactatatatagcccaatgatttttttttctcttcttttctaatatttaataatcttttctgtcgatatatggattatataaaagaaatttatagtataaatatttttaatgattataatatttaattatttatctgcaataaaaatttaaaataaaaaaaaataaatttaaaaatatagagaaattattttatatattatttttaaattatttttttaaaatttacagtttgaatttttaaagtaatttttatagggttgctatacgatgttggttacgatttaaattgctccgttagttacaataataatctctatgtaaaattttgtataaataaaaaaaaaaac

SEQ ID NO: 219683 - DNA, 2754 bp, Cannabis indica
cagtttagtaaacgcatcataagagtaaacctagtgaaaaaaatctcaaaatagaaaagagagtgcaacacactattagcaatcctcacacaaatattaaaagagataatacaaaaacaattacaaatgagcaaggatatccctaataatgcatctcgaatacaactaatacatatggcaattattgatagcacgaaccacattgacacaatcagattcaatgaccaccgcatgatacctaagtcgtgagcacaacaatggactggaataattaattttcaagacttcatcaacaatgggctccaataacccattccatgaccaggtactagaggcaagaacagtactgtgagaatcacgaagtaccaccccaacttcagtcttcttggcatcagatcaagccctgcattgcaattcagtttcatcacacctgacgtcagtctctcccaacatcacaccaccagcggcttcctgatcacagtatgtcaatgagagcagggcgcccattggcagtcaggtgccaattcaaaaaagaaaggctccaattgatgacaagctgatctggaagcaaggacttctcattcagaaaaatgtttaccgaatgtgccataagaaaacaatgaatttttcaaaatatgcaagagatattatccaaacatattaataaaagcgcataaaagtccattacaatgtaaagtggtatgtgcatggaattatttcagtagtaatagtataaatttatgtatgtacatatataaaataacataaatatgtttatatatataatcaggtacatgaattttaaaaggctaatttggattttttttttttgttgttaaaaattcttatcaaactattgagattgttggatttgaaaaactttcgtctaattttactaaagaaaatttgacgtggatgaaaatttaacatccgatattggtaaactttgtcaatgctctggaaagggaataacacttatccaaaggtgtaagcatacattatcgttgatgatcatgtcagttttaattcagtgaactgataaatcatgagacttaaactttcaaacatataatcatgattatattccactgtgttgataatactataatcatgaacaaatatatatattctggacttaatagaatttatacattacataataaatcatgtgaaccatacaacataaaatgatttttgatcttttattaattagtaaatgtgattacactgaaatagattttatttaaggtaaaaaacccaacgcttagttcccctcatatcagtaggaaatctatgctcacctacattggatgtatcttctctgaaatttggattcaatgtaacaatcttagcctcaaaggagtgaacgccaatttagagctatgtgtaaggatggtgaattcaaagtttctcgagttttcttcttattcttatattgagacatgttgtggtattttcaatgtatcattaacaagtaatagattcacaaaaagtgaggtcgattccacgaggattgtagttaagtactttaaaattaaattcttaattctgtatatggttaaataaaattaagagagaaaattaaaataagaaaactagcggaagcaggacgcaataaataaataaaggaaattaacaattaataaaaattacggctttgatttcaattgtatctattgactatggcttaatatgattatcttcttattatcaatttttatgcaatagcaagtttactaaagtaatttatagtcttctcagatatataaatctcaattacatgcaaattttctactctcgtgataaattaaacacgataaccctataatctatctaaaccatataggtactctcgtcctatatcaaaattcagttctatttcactatagcataatcgacactcccttctcagatcttgcatcgaaatcataaaacaattcattgatgaccaggcaattagaaataattaggtacaaatgaaatagaatacataaaaattgagggaaaatatatcatatataaactataaaacaatatcaaacaatatccatctaaccctaagcaactgtttagctactcatgttcatggaaacaaaattacacatattaacttaagaaaatagagaagaaaagaatgctgaaaaccctctgaaaaatgtctccagtattgacttcggtctctgaaattcgtactccttttttggctttttatctccttcccactttcttgaagaaatcaattgaaaatcactctttatatagccatcgagggattaaaaagatagaaaacacacatgctaaaaattctattcagcattgaattaggaaaccacactcgagcccatgtgagatgctgaagagggggcgggccgcggcacccacattgctgggtcgcgacccgtgtggctttgaaaggtggtatgttggttttttaataggcgggtcgcgatgcccacattactgggccgcggcccgtgtgctccagtgcccacgtgtgcaacgcgtaatatctttttcttctggttaggattccgatttttcacattgatatttttttgcaattttttttttatctttttctcttgatatttttcaattattcttctattttaaatctgtaaaaataaaagataacaagcgtaaaattactccaaacacgattaaaactaaattaaacatatactaaacttaatctaaaattagtactaaaaataacctaacaaattcctccaaactaaatttttactcgtcctc

SEQ ID NO: 219684 - DNA, 11524 bp, Cannabis indica
ttttagtaaaaaatttaaacatatattttaagatgcaagatcatgtaagtgtaaaaaaaataattaattattctatattactcaaaaaaaaaaaattataatgcactcccttaaaaatttaaaatctatctatttattattttattttataccatatgaaatagattgtttgtaacactattttttatatcgtaaactattttaaattttttaatattttatagaatatctaagtaaaccaatataaaaatattagactaaaaatgtttggtactgcacccttgtttttaaaggagtgcattacaaaaatagaactgttgaaaatttgaatcaatccaaaccgtccgatcaaaaaaaaaatgaccgttgggagaagacgctccttctttatattctgattttaaacagagcgctttctctctctcactgttcttctcccaacaaagtttgccctaactctctctctgtctcaaatcaaagaatgtcgaagatgaggtcggtcaagaaacctccgcttgcgaaatcgcccaccaggattcgacccagccggattccccaacagaataccaccacccaaacacctcctggttcgttccattaaatcttgattcgattctacagatcactcatctcaattttattcattcattatcgttgttttgattttttttatcctactgatttcaggttctctgaaaccgatccctaatcagtattctgaagattctggttaccacacgatttcgcgtgagttttgggctctagcgaagcaggttcgagtcgaattcggaaacgaagcggagaatctcaagctcaagactggagctttatcaaatccgagttcgagtatgatattcgaaaggggtcgattttacgatgagtactctgctagaaggaatgaaagattgagaaggaaaatgggtattcaaacaggtgaggtgaggagtgttagtaagagcacgcagaatctgggtgttaattttgaatctgctaagaaaactagtgctagtacttcgaagaagattgggagcttgaggaaatcgatctcggcggcttattcggcggagaagacaatggaaactccaaggtatatgttgcgaagcatgagcaaggagaacaagaaaccaccattgcctctctactcagagaaatcggccattcccattggagctagaagagtcaagaaaatctaaccctacaccattgcctctctactcagagaaatctgcttatattagtattgatttttcaatcttttattttcttgtttggtattgatattgatacagtgattttgctactgcaaaaccccaacattattgttattaattgatattaatcacaatcaattactattactactactattgaagggaaattgtgtcaaattgtttcattattttataagtacagaacacaatacagattcatgtttatgaatatcctccatcactaaagaaaaataatcactacactagtacagtaaaacatagatatagtctaatagtttcacacttgtttaaaaagaagaagttaagttcgaatgtccccatccgaaagcgaaaaaaaaaacattaagttaagagagctactcttcttattgtgatatggttttgagttgagactcttttctcttgatcaatgtgcagtgtggatagctagcactgcatatatgatgagaaatggtgctcagttggagaataaattggactgcatcttcaaatttgtagtcactctaagaggttcgaaacatttctaaactaattatttgcaagataaaaaaactcatttaatagaaataatactttgtggtagggaaaaatgacatgttttttatgtaaataaagctccattttcattcaaacctccaaaggctatatataaatactgttcatttaaaagctgacatgacatctctacttcacaacaaagtatttatacataattaactccatagcaaaatctacaaactcaataagagaattatcttatttattcacaccatcctctccggctacaacaatctaccagagcaacttagtcacaccttttctgaagctgattcttcaatattatcttcttctcattgctttgactaactttactcccactgtttccttcaccagcttcatctactctatagtaaatcttcgaaataaaatacatcacaaacaggaaaaggagaaaattagattatgcaatatgtcaccttgacaggagaggagtgattgtagagaaaaaaaagagaacaaaaacataccacacaggtgcgacagggtgataatactttgaaggagttggggcgattgttaaaatttgtctcaggtactcctggtattccttccggcgaggtgaaatggtctgcatcatggccaacctgccagtgccaaattataactaaagtaaattacagttttttgtgagtaaactacaaatttggctaattaagctacccctcttactatactgagacattcatgtttaataatacggtacacaattatttttcttactcttccatgtcctccaaattctaaagcatcgctatcaagcgcaaccctgtacttcccaggcaagtcacacccaaccttgtacctgcatatcacatattcaaacccactcaaaaaaaaaaagaaaaaaaattgctagagctaagatcaaagcaaaggttacccatcatatgaagtttctggatggaaattgaatacaaaaactagatctccacgctcgaagacaatgacctgtaatccgcaaaagtactcattgttttttgtccaagcactagaaaatagagccaaaagcccaattgaaaattgtaactacacaaatagtaaagaaacggccagacatattatagactgtattaccttgtcttcttcattcgtgctgctcactatttgtttagatgatgataggaatgcaaatttatcatcgagcgaattcattgccctatcaaacgcattcataaactggacaagtttcaagaataggggaagaataacaaagataaatcaacaattagtaactggccataaattagataagcaaatcacatatattgccttgagcattatagaaagattctgcaacacaatgaacagtaaacaaacacaaagaaggcttgaagagactctgtgcaaattctctattaaaatccaataggaagatgcttcagggttctacacagaaataataagaaatgggatgcaacaagcctttgaattcttgaagcaaccaatttcatgatgaatttcttgaagaaaacggttgagagctagcgagagaaagcaaaagtgtgatcagtctctttggacccctctaagaccctttaaatagtgataggcctaggcaagtttcacatgttgcaatttgaaaaacgcaactttagagccaaaaatgcaagaaaatggcaacacgccgtcaccttaagtggcaacacatcaatgctactttcttagctacttagtgtttgtatgcttttccacactacagtttcgaagctttctcccctgcctgggatctaagcttagaatctaagagattgtgtgtcccagacaacatgtcgcctattaggtggcaacacgtcgttacataagcgtcaacgttgcccttgggtcctgcgacacatttcctgaattttgacccattattcatgcccaaatcatcccaaaattgccaaattcctcccaacatgtttagatatgtttatatacctcaatgtattcatccaaactcgaattttgtcaaattttgaagccaaatactaaaaattcaaaatttaatttccttgtagcacaaaatttaattttcttaataacacactacttgtgtattatttctattttgtatttagccaattatatcaaatacaacataattaatttcaaccacttacagctttactaataatactagataatgaagatgcattttcaaaagtagttcaaaccttatatcgcaagtgctcaatatccaccaggttccactgtcgtctgcacttttcatagctccatccatttccttctcttgggaagtcaatccactcgggatgaccaaactataaattttttttcaggaaaacgaaaaatgaggaaaagaacataaatcagaaaatgaggtttggcatgcacgttaagacaagaagaagcacaagttcatagaaaaaattatagtacatgaatttttatgtccttttaaaaggtttcagaactttacaaaatatatcttacacttgaggttacttgttaatcatatcattacgtatttttacatagcacaccatactattagtcctgacaaaattgctaagcaactgataggaatttcctgtcaatttggtaagagcagtagcaaatagatcagagaaaatagaggcaaacagctgatacatagatattagaagataaaatgaaatgaacaatggacaaatgggtattcgagagacccagcactcttccaaaagctattgcttactcaaccaaacaattcttcacccaaatcccttttactaccgtcttatatatactatctcaataccctgtaatacccatatactcttttttttttattaaactccaatcctaagggctaagtcctaacagcaacattcctttcacctaaaacataatgaagtaattaagaggtttcagaacttctcaaaatctatcttacacattaaacttaaggttacctattaattacatcattacgtatttttacatagcacaatataccattattcctttcacctataacatcaaaatttaaaggctaaaatttatcagtagtaatccaaaacgaattacatctgaatatagtcaaatcagctgcagtattgatgccatagtttagtagacaagaaaataggctagagcgcttacttcatttcccataaaattcagatagccttcccctcccaatgccattgttatgaagtgtatcatctgcagagtgcgaaatataaaacatgaaaaaattaaactttcaaatcataaaatttataatgtccttgtcatgctataaggacaaataattcatggtctaatcagtaacaaaagataaccattcataaaaatcaacccgttcactaataaagtagagaaaaacatgcaaacgattattactactatatggtaagacaaaccttgtgaagtgctatccctcggtcaacagtaggagaagcttctgtcagacaggacatgcctgaatacatttctttatccatcagaaagaaggcaatagtcttgtcaccgacaattgcctacaggggtagtaacaaaaaagaaattacgaaagcaaagaacatcattttgataagacaaataacggatgccgagggaaaaggaaaacagataaccatggtttacttttttctgcaagacagataagtaaaagtattgaaaaatatttgcaagagttataagacatttactacccaaaaaagttgaaagtacttgatgaagtgatcctgttcatgggaattcatatcaacaaaatcaaaagaaccaaatacctggtcgtgactctcagcataagatatacacttctcactatatctcctattagtcaaactccatgagatttccgtcattaaccactccatatcactcttgttcttcaaataatcaatccacttatcagggacagccattgccaaccggtagtcaaaaccaacacccccctcagagacgggccgaccaagtccaggcatgcctgaaacatcttcagcaattactgttgcatcaggcaagatttcatgaatcagatgatttgccagcatcaagtataccacagcatcaacatctgtggcctcactaaaatactcattgtaatttccggaaaatcccatattgatcccatgatgatgatacaacattgaagtaactccatcaaatcgaaatccatcgaaattatactcctcaagccaccacctcaagttggataaaaggaatcgaagaacttcccaattagcataattaaagagtttgctatcccataatttgtggtaacctcgttctccaatgtgaaagtaggaatcatgtgagctttgaccaacatcaaagccatttagaccatcagtgacattgttactcgcatggctatgaacaacatccattaaaactcgcaaaccaaggctatgggctttgtcaattagatattttaggtcctctggggttccagatctactgcttacagcaaaaaagtttgtaacatggtagccaaaggatgcatagtaggaatgttccatcacagccattaactggactgtgttatagttgtttgcccttatacgaggcaaaacattgtcagcaaattctctatatgaactgacaacaggttctgagctactcattccaacatgagcctcgtagattctcggggccagaggttttggaggacgaggatgtttaaagtgatatctgcagaagaggaagaagatattaccattattaaccacatttcattctggcctttggctatgcaacaacttgggtctataacactctctattgtcataattgtagaactggtcgtatattcatcatatgcaaattagggcaatagaaaagtgaaaaacttgtacctttctgatgagggtgggttccaatatacaccatcgtatggtgctccaaaacttgatgggtcaactgtggcatatttaatccaagcagggatgcgatccgcccaaactccatcactgtgcttgaagcggaactttacacgtgaattatgaggaatggctgacttcccatcagagtcaggaatcttgatactccaaactccaaattggttcttctccatcttgtggttagaaccatcccatccattgaaatcaccaataagttgtgcttccctatatttaaaatcatgactctttgtttaccaaaatggttcacaaagtttaaaaacctgtaattcaaaagctaagaaacctactgagcagcaggggcccattcatggtacacaatgccaccttcttcattgttaaacccaaatttcaaataacctacacacagggatacaaacatgaattgtaagggttttaacaaattcaatctgaagataactatatcacatagttttaactatttaacatagttttaacaaattattaacctcttgcaaattcctcaagccctccttcatgtttggtaaaaagctttatctgatctacatatctgctcattctatatttgaagtgatctttatattgttccaagcttggatcagtgctcaatataccaatatgttccatttcttcttccgctgttattgatgagttgtcatctgttaaaactgctgaggtataaaaacagcgatccacctgaaataagtaagccttttagagcctcattctacacttaaaagttataaaaaagggcaaaaaacgagaggaaagcaatccaatagagaaatgctcaaagacgcgtgcctatcagccttctaggtgttataacgttgttagtgtaattaagtatcgagttatatataaatttaatatagtaacttttaggaaatatcgctaaccaatcatatcttctaaggtgattggcactgcccaataacaatgctcaatccaataatgtgttgcgaaatgaaagaatctcctttcgggaagataataatgagttgggaaccataatgtcactgtgtcacaaaaactgtctactccacaattctatctttgagactttttaacattattattgctcaaataaagcttagaaccccatgaaacttaacaaactaaaccaaaaaaaagaatagctctaatggccaaatttagactgagaacttcgaaaacacttactttcccattaattgagttccttgatggaaacacaactctacggtaagctagcaacggctgagatccagagctcccaactccaggttgcgcaaaaatccgactatttatagcaacctttgtacaaaaatcaattaagattaaaatagcataaaaaacaaaaaaaaaattgaattgaaattgaaatagaatgagagagagagagagagagagagagaccttggaagtttgaagagagagtgtgggaagacgaagaagagtagaagaagcaatcatggtgtcagtctcactatcactgcatcgccattagagaatggtgaatgaaggcaattaatgataataataataataataataaaagtgaagaaaataaaagaattatttaggaccgttggttggagtttgagctgagattgagattggatccattatagtaaagtaataatacggaaaagcactgagattgattgactacttgctttttcttccacctgtgaaatgaatcaaagaaaggaaaagaatttgattgcctctgctacgaaacaaaccaaaccaaagcatcaatcataacatttaatatatataaatatatatattattggaaaataaataagaaattttcatgttcgtccatttcttctaattaggattgaaggcttaaatttttacatctatcacatcatattttttaattttttttgaccgttaaaatttttttctaaaatattgaaattattagattaaagatttttctcaaatttcattcaattttactaatttagtaattatttatgtgttaaatcatgctctccagattttgatatctaccaaattatacctctcaaattttaacatgtaccaaattatatttcataaactttcatccatgttagatttttcttactaaaattggataaaagtctttcaataatctcaataattcaatggagatttttaacagccttaaatgttcaagagatataatttagtacatgttaatatttaagggacaaaaatactaattagcttatactttattaggatatttgtagcaataatactaaaagagtattgctacgaagcacccatagtgcttagcaccagtgtcgccttataatttgttagtggttttttataatatttattaaagtaaaacaagtaggagccaatattgaattgcactaatatcgatattacaccttacaaataatactaaacaacatgagtgtcctttaacattttaatggttttttttttttttttgtaactcagaaacaaattacataggattaggcatgtcccgctcaatagcgagagttacacaagagggattaatcccaatccacatagcactaactttgttcaccaaaacataattggctaaaccatgagcgaccccattcgcttccctatatataaaagaaatacccataacaaaatcatgcaacaataagtttcgaatacaatctaatatcccatccacatccctacacccatcctctttttttttttttttattaattggatagcatgtaggcaatcagattcaatacaaaattgtcgatatttcctctgaatttctaattggagaccttccttgatcgctaacaactcagcttgtaatggagacacttcctgctgcagagaagttgcaacagcaaactgcaccccgcccgtcacagtcacgtaccacacacccagtacccatgctttgccctccctttttgacccctcagtctacattgatcttcatcataccctgcactggaggagaccaacgtgttgttgctctctgttgagtactattctccctctaatcttggccttgaaattcacttaagaacttagcacaccactccaccacatcagctggccgagcctccttccctccatgttttgtgttgtttcttgtaaaccactgctgccagcataacaccgggaacatctcatagtccatcttagtccaagccttagcaagtctcatcaagaaagtcatgacatcttctttaccaactctctgcagtttgttcttgaacacgctcagcttccagacccccttattggttttacagccccatatagcatgaaagactgattcccttgcgttactgttgcacctctgacagtaaggttcaatgttcgtccctctataagcaagagctgcatttgtgggcagccaggaatgtgccattttccaaacaaaatgtatgacttttgggggaattttaagcttccacatcattttccaccactctcgaatgtgactatcatccgcttggcctacctctttttgaagctcaagtgccattctatactcgctccgaaccgaatactcaccattgttgttgtaatgccacaaaatcttatcctccaaactgggattagccacagagagttgaaggatgatatttgcatcttcccggttaaagatgttgtgaatgaactcctcatcccaatctccattatgcagtttcagatctataactctaagttgtgcatggacactaggcttttcgtacaccttgaagcttcgaggtcaaggtaaccaaagatcttccaatatcttaaccgaatttccattaccaatgctccatccatatccattaatattattttccttccccacaccaagcttctccacacaaaagaagcatgtgccccacacttagcatccaacactcccttctccggataatagcttgccttcaaaaccttgctgcaaagtgatgtgggctgccttatacatctccaaatttgcttagcgagcaaagcttgattaaacatttcaagatccccaaatcatagccctccctcttctttgggtttgcatagttgtttccacttacaccaatgtgtcttcttgtgtttttcagttgaaccccaccaaaatctagctgccatcctatgtaaactgttaatagtactcttggtaagccggaagcaactcatggtataggttgggatagcttggatgatggccttaattagtacctctttgccgacaatagaaaacatagacatcttccatccccttagcttattccaaactcgattcttaataacctcaaacacttgcttcttattacgtcccacaagagaaggcaacctgagatatttcccatgattttcaaccaccttcattcccatatattctcccaatgccctcttttcgataataatacattaatattttgttacatttaaagtcaaaatgttaattttgttgttaaaacaataatgtaacaaatacatttaataatttatttgtttagtttatattattatattttttatgttacgtaaatattgtcacgtcatcatttaacagcaaaaaattagtagtttgtacttaattgtaataaaatattaattttttgtattattatcaaaaaaaaatttaaatattaaagtgtaacaattaaaaaaataaatatttttgttttcaactttttatattacttttatatttatactattatttatacattatttatatattgtaaaaatgaaatgaaaaaatttacaaagaaaataattataattcataaaaatatataggaaatgcctatggtagagactttagttttgtgcttatggtagggatatttttctagcccttgattgttgatctaatggtaataaagttgatgaaatatgatagtaatagtggaacctagcttatgatatttttacaccttttttgtctttacactattg

SEQ ID NO: 219685 - DNA, 2550 bp, Cannabis indica
caactgcatagcagatgtcaggtctagtgcataacattgcatacattagacttccaactgcagaagcataaggaatttttgccatgtcctctatctcttgaggatcagtaggacactgttccttagatagacggaatggctcttttaagattacaatagtaagaatcaagaagcaaatctcaagtaggtgagatgaggaagacttagtctcttctacactgctagaggcgtgtagaagagagagatagagagagagctagggcttttgaacttagagcttcaaattgtacagagcttagaacttagtgagattcggtttagtttagtgctctttatataagagaacttacaagcccttaaaatgaggagatatcacctatttgttacacattaaaaataaatagataacatgttaattaatccccaagaataggtaaataactgaagcgtatctcctatttttgttggttgttgaggcccaatacgtaactggaagtgttgtccaggctgaaggctacaaaggcataaaaagtccctgtcaggaaaaaggttggactgcccttcctttgctagaggatggccagcccatgctagcaatagggtcggccaggggggtccgtccaaaccccttaagttggtcagttcattgtctctttgtcccgattaagtatttggactcctcgtaacctggtatgttgtgcatgatgacttggccttcttgttaacaagctgtactctacgtggcatcaatcttgcctacatggacatgccatatcatgcgagtaaacattgaaataacacttgagattggttatctatttccatataataggatagatcctaggaaaaaaaaagtaccacacctttgcttgctatgaagcctaatactactgcttttaacattactctagccagttgtctcttgtttagaacgcataggaaagccgagcaactcattaacatgatgcctagagttggtgtgagacttgacactgacttgttgatagtcatggcacacatatatgagagaaatggaagaagagaagagcttaggaaactccaacattacataaatgatgcacacaatctaagtgatattcaattacgacaattctataacagtttcctccaatgccatttgagactaggcgatctttgttttgcatcgaacatggttttagaattgcttcggaaagcaaaagaagctaggtcctcttttgttattgcatcaatggtagttgatgttgttgaaaatgatggtaaatactcttgtgttcttggtttcaggccaacttcgagccatgaagaatctagatgtttaaaatatgatagaccttttaaaatttatgtgatgtcttacgaggagtatttacgagattggaattttgtgaaacttgatactgaagcaaaggagtgctaaatactatgttagctaagctatagactcgagttgaattgttaacatctgaacgaggtattattcaaccagttgtgaaaattttgttgaattagtcaaggcatttctataagcaagaaagattaaagatttagcatagtttcttatcatggtggatagagaaaagattctctagttttcaatgatgattcattgatagtgcgtggttggttagaccaagcacgtgaccttgtagatgagttgatattggctggtgtcagtattattttttgtatactcttctctcttaaaagcatattgtcaagcaaactagacaggagatgtttcagcacttcttcgggatgcccgtaaggcaagaatcttgctagattccaactcttatcaggcattgattcagtctaagttggtggaagaagatacacaaggagctctccatctattcaaagagatgaaagttgtaaagataccaaaaaccaattgttaagaatttgtgactaattaggccttagatagcagcaaaattattaggccattttcaaaagtatatttaaaaaattactaaaaataatatttttttccttagcccctagactaggtggttacaacctttttgaatttcatacctttctagggttgggtctgagctaaggcagactaggcaccggcctagggcccaccgcccaaagacccaaaaataaaaataaatattttaaaaatacacatcttccaagtaattttttgaaaataccacatttttttaaaggcaaataattttattactacctaaggcctaattagtcttaaggccagcctttttcctataacgaacaccccctcgtttagataagaataaatagtggcataagtacctaaagttttggatttgtaagtggcataaacccaatgtttaattttaagcggcataagtacccaatgtttataaaactgcaaatttcctccagtttcatcagtatagactctgttattgtcttaaacagtgcacatatataagacttagattctagattatttggtctggacagaaatatgtagtatcagtttcatctaaatcttcttttaataaatttaaaacggagcctgtactgacaaaaatagagaaaattacagtttta

SEQ ID NO: 219686 - DNA, 4647 bp, Cannabis indica
ttcggttggagcatttttgtggtgaaacaaacctatttttgggtttatagtgttgggttggagttggattctgacacaaaactgacgtgacaggcagctccacaaaggaacctactttatagtcctctacgtggagcccttcatgtgtcattgtgttgattactgctacatttttttaaataaaaaacaatgtaatagccccttcccagaagctcaaaagtgatgttgtaacttatctgaagttttatgtagtagtgtcgactcaatgtcaaaaaaaattatatggtgacttagtgcaattaattacacatctcagtgactcaaattatagacttaatggatgacgacctgtgatggcaccatatgttgacagaagtaatttttacagcaaacaaaatggcactacttggtgactttcaccataaatccatcacgcccgaccaaaaaatattgctaatagcttatatatgactaaatttgactaataagtaagcactatttctgttgtgaaatatctatctatcagctggggttcttatttattgtttcactaatctgtaatggtatctattcttacaattttgaatgttgatggattttattttctttataatagggaagaaacattcaatacatttgcagaaaaccttcatccaaggactgttgtgcataactggtgaattttctatccttctgtgtacttctcttgtggtatcaaactaaatatataatgttgttaggcataatttatgttttctatgataggttgggtccaggggtttgtccaaaggctgttgccaaaggtttcagatgcattttcagcaatcaaggagtttggtatctggaccacttagatgtcccatggcatgaattttacactgctgaaccactagaagggatagatgattcttctcagcaaaagcttgtgcttggtggagaagtttgcatgtgggctgagacagctgatacatcaaatgtacagcaaacaatttggcctcgagctgcagctgctgcaggtatgcatttgacaatattaattcgtccttatactttctcttgaaatataaaattttctgaagtttctttgaaacattgtgatttcactgctgcagtgtcttgtgtgctgctatgcacttgccttttcattgctaatttaggcagttgatttccagtgaaattagactaataaactaacccaaagagtattggaccaattttataatcaagatgcaacatttttagaaagtcaatcaagtacatactacttgtatatgtatacatggttctgctgtatgcttttaattgatgcatttttttgcacctttattctttaattaaaatattacatatgcaagtattttggctttatctcatcatgctttaagcaaatgttgaacttttcttctttactttcttccttgtagagcggttatggagcagtaaggaagccatatcttctggaaacattaatgaaactgcattacctcggttgcattacttcagatgcctcttgaatagacgtggagttcaagctgccccgttaacgaacaaattggctcgaactcctccaattggccctggctcatgttacatacagtaattctttccatgaatatgtgtgtgtgtgtgagcattcttatgcttcatgcatcatttgcttgtgtaaaataatacgaatctttgtcctttgttagtaattgatgtacattgaagggtagaacagtaaatttgtccctattcgatgtagatcatctatagaagatctttgaatatttggattgaaacaatgggtaattcaaattacatttatttttggtaatagtgcttaaatgtatcacaactgccacatttcaattcaacctcaatggtaagatctcaggtaatgttattcccactcagagcatccttcaaggcgaccctctctctccatatctctttttattgtgttgcgaaggtttctcctcccttatccgcccctgctatattccatctcttctttgtggatgacaacatcctcttttgccatgcttttattagttcttgtaatgctatcaaggagatcttacatctttacaaaaaagtgattggacaacaagtgaacctccaaaaatcctttctctacttctctcctaacatggctatcaaggataaaaacttaatttccaattacacgggtatccttgtgagagcctcctttgaaaagtacttggggcttccttagtagtttggctgatctaagaagcaagttttccaatacatcaaagataagatttggaatcatctcaaaaactagaaacacaaggttttttccaaagggggcaaaaaggttttgctcaagttagtcatccaagccattcctacctacacgatggcttgcttccgaattctagttgccacctatcattctctggagtccatcatggctaacttttggtggggcttcaatgctagtaatatgcccaaggtccactggcaaagctggcaaaaactttacaattccaaaaaggatggcaatttaggctttcgatcactcgtcactttaaccaagcaatgttggcaaagcaaacttggcgaattcttaagcatccaaactcgcttgtggctaaaacctttgtagctagatatcactctcgggcctctttcatcaactgctctcttgtccactcctcctcttttgtttggcgtagcatttaatggggaaaagagaaactgcacaaaggtctcatcactaaaataagtaatgggcaaaacacatccccaattcatgatttttggatcccctccttttgccatgtctacgctatccaaccaactcctaaccttgttgcgtctttcatcacaaacaactcggtctaggatactactcgcctaaactaatgttatcctcctcatattattcaagtcattttttccattcctcttcctctcatgcctactgaagacaaccttttttggaaatttacaaaatcggggacttacttggttcagaccagttatcacttaagtcattcgtccagctcccttcctgacattccttcctcttcttcctcctctccatggtaaaaatcactttggcacctaaatctcccttcaaaactaaagcactttgcgtataaagcttccatatccacccttcctacaagcaagaaccttaaaccctaaaccctaaaccctaaacccttcctacaaacaagaaccttgcccataggaaaatcacccaatcccctttgtgtatccgttgtgttagagatgttgaatctgtttcacatgccttgttcttttgcaagagtgttaaaaggatttgaaaaagtacaattttctatccctatttatctcattcaaatactttttgcttccatgaaattatttttaatattttttctaacatgagcaaagaaaatgtggaattttttctttgtatagcctggtttgtttggaataacatgaacaaggaaattaggaatcagaccacagatcacgcccatgctatcctcaagcttgttgacaactacttacctgaattcaaagcagtggctactgcccaaaaaatcatcttttccagctgccatgctcgctgccacagtcacatgaacaccaccaccacaaggtctcctaaagctcaataccgatgcaacaacctcgaagaaccaactcaaagctggcttaggaggaatcatttgtaacagatggaggagtagtagttgcagtagctttttctcatgaaggaggtggagatgccacaacccttgaagcaaaatcacttctttggtgttttgaagaggggttcccgctccatcaggtcaaaattgattgtaaaacagtttctgatgctatagctgctaataaagaagatttctcactcttggagatctcattacacaaattaaaatgactttgtctcacttccctaatatctcaatcaatcatgtgaagcgctccgctaactcgtttactcataagctagcaaagttggctagggttagatgaagtttcaatttggattggagttgatccttgcaatctcgttgctcttcttttctcataggcaggcccggccctaggcataggcgggctaagcccgcgcctagggcctactcattttaggggtccaaataaaaaggggtccaaataaaaaaaaatatgtatatttttaaataatttttaaaaataccattgatctttataattcgagcccaaattttttttttttgactttatttcaactcaggtaggccttactgatagggcatcattcttctaatttttttttattattattttaatatgctaattaggatttttaccccctgaactttgacatataccaaatcatgccccttgaatttttaatatcgttaaaaataccccctgaattattgaaattgttggatttacggacttttgtcaaatttcattcaattttactatttcaaagattgtttatatattaaattatgctcccaaactttgatatctaccaaatcatgtcccttgaactttgacatgtactaaattatgccctctgaactttcatccatgttagacttttttactaaaattggaaaaaaaatccttaaatccaacaatctcaatagtccaggaagcatttttaacaaccttaaaagttaaggggcaaaaatcctaatt

SEQ ID NO: 219687 - DNA, 1636 bp, Cannabis indica
taaaaattggtatttttataatatgcggtgcggtgcggtttgaaccacatattaacaattcaaaaccgcaaaccgcaccacgcgatttagaaaaaattcaaactgcgaccgcaccgcaaagaatttcaaaccgtatttttttgacggtgtagtgcggtgcgagcagttttagcgatttgagtagtttgatgaacacccttaatgagaaccaaaacttttcaccatgcagtttgatagcaaaccatatgttttatacgggtattacaaagtgctctagagtagacacttactggttttacgtaaatatgacatatgacctccgttcaacaacggtatttttattcaggttaactgaaatggaaatgagataagataattataaagatatatatatttatatatgcatgtgttatacatattagattgtatgaattatatactaccaaccttgttacggtagaggtaccgagtgtatgtggtacattatattattaaggggtatgacatagtactacccacactagtacgagatgagcacagagtgtatagggtaaaacaaacaattgtactctaagtgagagcaaatcctaccaacactagagaacgtatttctgttacgggtttggaactcataagatgtgtaggatgagttaaactttgtaactaggtgtatgggacatttgagctatgagacaaattacttttttatatatatattttatgctttttttactgagtttatcgactcatagttatgttttcatgtgtaggtaaaaggaaaggtaaatgttgagcagtagtgagtccaaagtttgcacgtgattgtacatatcgggatggttaagcctggagtgtttggttcttcgggacgacatgggcttatattttgtagtcgttggacgatgcctttgtgaaaaatatattttgaatactgctgtaaatttttaacaggatcctgaagttatgtaaatatatgtattttctaaagtttaattttaatcgaaaagctttaatttgtcatgtttttcgagaaatcctttgattcacaagagtatgcacagtaatagaaaaatcactatagtgtgtttaagcaattagagcgttacaaaaatattatataaaaaaattacataaatataattgaaacaataaaatatacatatattagcaattaactcattaattgtaagaatatggaaaagtaaggcacgagttcaagtctgaatatgaaaataggctggtctattcaagaaaaatagatatgctcgagcaaagtacgacacaaaaatatcgagcctccaagttatatcgggcatatcgggcttaccatttgaaaatgttagcacacaacacaactcattatttttaggacacggacacaactcatattttaaaaaacaccacaaaatatgggtatatatacatatattgtggctaaactttattactaagaaaaacgttataaatatttgtacagcttgtggtaaaagcaaagccatctttaacacatcgaactaaatctatgcagtgatctttttcgtaagaaattaaaaagaaaaatagcttttttttttagtgaaatatatttctgaacttggactttagtttaaaacattgttttacttttttttttttt

SEQ ID NO: 219688 - DNA, 4348 bp, Cannabis indica
agggcacaaaacccaatagaagtgacattacagaatgtaattgttgacagagagaaaaatgttgctgaaccgaaacatgatgaggcttaagctggggtaattgttgaggagcaaccaaaggagacaagcaaaacccaaaatgattcaggtgattggcatgcacctaaatctaaagtctcgaaaggggcagggtccataaagaaagtcattgagacacaggaacatgttcttcgcaactcgtttgagattttaaatagaaagcaaggtgagaaggtaggagatgagggtccattattgtctttttattaatggatttttgcaatataagtagttggaatgtgagggggttgaataaaaaggaaaagtagcagatatttggagaattaataaggtgagagttggccctctccttcagactaaaataaaaggggtgaagattcagaagatgatggatagtagtttctctagttgggagttctatagtagtttaacagttaaaaggcgcattttggttatgtggaaaaagaagtttattcaggtggaagttttggaggaatccaagcaacataccattgtcacattaaaatgatagggcagaaaaaagattactttgctacttttatctatggagccaactctatagatagtagagttaatctttgggctgccttatctttgatcaatgttactaaagcctgggttattcttggagatttcaatgatgtgtttcatcatgatgacagacaggggaatcttgttagttctgctgagcttcttgattctacaaactgggttgttcaagctactgttggtcctatgaaaagatctggctctacttttacttggactaacaagcaagatgctagaatcttctctcgtattgatcatgtttttcacaatgagaggtgggtggatgattttgctaatacctatgctcacttttcgtgggaaacttgttcttatcattatctttgtattgtccgtgctatgaatactgagaacatcagtttccagccgtttcgtttctttaatttttgggctgaacacagaccaagttgtttctgatagttggtgcagacctttgaagtgtattggattaaaagggatctatctgaagaccatgcgactcaaacaaaaattgaaggctttcaatagcaactatattgggaacataggtgaagcctatgagaaagctaaggattgtcataaagaagctcagctcctttgccaagctcatgctcatgacagaaattacattgagagagagtagcaggtagttgctcacttccataaccaggaaaccatgtatctaaattttttgagtcaacgaagtaaagttaagtggatccaaaagggagacaaaaatacttcctattttcatgccttgctaaagaagcgaaaggaggacaataaaattgtctcttttatgacagatcagggtagcttgaacgactatgtccctgatgttgtcaagcactttctggatcacttccgaagcataatgggcagagctaaagacacaactatggaaatccaaccgagttgcattgctatgggtcccaaactcaatttggactagcatgtatatttattaaaacctttcttttataaagaagttagagctgcaatgtttagtattcctagtactaaatctctaggccctgacaggtttgaatctggtttttttaaatctgtgtggtctgtggtggggaatgatattcacacagctattgctcatttctttgaatccaatctgtttcctgctgagcttcataatacgaccctatctctgattccaaaaacagattgtccttctaaagttgttgactataggcccatagcttgctgctcaactctttacaagtgtgtttctaacctcctgtgttccaaaatggctaaagttctcccaagcttagtggatcagaaccagggtgcttttgtaaagggtcgctccattgcctataatattttgattgtccaggacttattgaagaattataaaagaaagaactattctcctagatgcaccataaaaattgatatcagcaaggcgtatgacactgttaatcgggattttcttgagaagtttttggtggcttactgttttcctgcaaagtttattaggtggataatgaactttgtaagaaatacttcgtactctttgcttatgaatggtagatttcagggatcctttaaaggtgaacagggcttaagacaaggggatcctatctctcctctcttgctagtcatggagtacttatctcgaagaatccaacttgctgctaaagataaaaggttcaagtatcatccctcttgtaaaaagttgaaacttaccaatctctgctttgcagatgacttagtgattttttgcaaagggagtgaggattctatttttgcgataaaagaagctttggatgattttagcaaaacttcaggtttggccatcaattttgaaaattcgcaaatttattttggcggtgttgctcatccgtcttctattgcccgaagtatcaagttaaaggttggagagtttcctcttaaatacttagggatccctctaagaccgacggaatggaggctggaggactgtggtttaatcttgaaaaagatgaaatagaggcttcattcttgggccaaaaagcacctttcttttgctggcagaattcagctaattcaaactaccttgattggcttaaggaactgctggatgagagtgtttcttttgcctcaaagtgtgataaaagaaattgagaagttatggcaaggcttcttatggggtttgaaagagaatagaactaaaattcacttgacaaactgggaaaaggtgtgccttccgaaagcttacggtggtcttggtttcaaagacggctcaaaatggaacaaagcttctcttgctagattcatttgggatttattgaatacaaaagaccttctttgggttaaatggatcaactcgatttatctcaaagggaaggatttctgaaattataatttacaggtggactcgagctggtattggaggaaattataccgaataagaaaagattttagcaaggttgacataatggttgctggacaaggaggaatcttcagagctaataagctttataactcctctttacgccaagtcatggatcctattgccgcagccgtttggagtagtctaaatatccctaaacagggatttatcttatggaaaacggttcatactaagctgctaacaagagatatgttagacaagttcaacattcaagtgaataatctgaattgtgctgtctgtcatgctgaagccgagtcgcaccagcacttattttttcattgcaggctgtcgggtttggtgctggaaggtgtttttagatggcagggatttgttggcttgtcgtcgaacttcagcaggtggttctcttggctgtgctctgtcaagccgagcttgattgagagagtttgtgttatgagtttggctgccactatataccacatttggaggaatagaaacaattgtttgttttataatttctctagcacgattacttgtttagtgaacaaagttaaaaaagatgtaaaatgtagattgtatatgattaaagataggaaaggttccaaagtggaagtagagttattacaaagattgatttgtcactaatgtttgtgaggttgaggcttcttgttgtgagaagtggttgagtgtgtaatttggttgttcgattaatgaagtttcttcttcttgataaaaaaaagattagaaattattttatgttgcatggttcacatgatttatttcatgcttataagttaaatgtataaattctattaaatcccgaacatataattattcatgattatagtgttgtcaacacagtgaaatataatcatgattatatgtttcaaagttgatttgtcagtacactagatttagactgacatgataatcagcaatagagcttacttacaccttgaataagtattatgtcctttccagagcattcacaaagtatgctaggatcagatgtatggagtatacattagattggaccgatattaaatttatataagatatcataaacctactgttatatttatctaagtcaatatcagttagttgatcttaggtcaatagatcttaattttgatatagttaggttctacttaaatgtattatctgtgttcttagagttgtccgttaaagctcgatcgatcgaatacttacatcttggaaacataatagcacaattgaatgggagcgctaatcatagatatggaatctatatcttctacaagtatttagaagtgaaacagtgatttccttcaagcttggcttaatagagataaatgattgagcctcatttca

SEQ ID NO: 219689 - DNA, 7422 bp, Cannabis indica
tagaataaacgacatgtcgcttctgttttcattgtttgaacagtaaacgacatccagatatttgcctccagcgatgctacgtggcatcatctcttacacgaaacgctttctcagatgtcgtttattatgagaaggaaacgctgtcgtttcgtttcagtccaaccatccaactcgtgaccttcttcttcattctctgttgaaatttacaaagaaagaagcagaagaagctgaagctgactatggcggttgtatcggcactaagaggaggtggaggtcgtttgcctctgctccaacatggtcatcgtcaaatgggcagttggattcccttaagatcgaagaaacagctcaactttcgctccaactcaaggaatttcacttttttcgctcgctattcacaagctcaggatgttttctcctcacgcttccaaggtcttatttttttccctgaattttatactccatttacttctctatgttcttcaaacttgttttgctcctgctttggcttctgggttttagctcagttttcttatttgagctatatgaaataagaaaattcgaatgtgaagtcatattgttcgggtttcagaaattgtatattatattattatgctctcgtttcaagtctcatacttttttttttttttctagatagtatagagaacctgcctaaactggttgaggatatagtccaaacatcaataaacacaggtccaaggggtgccctgaggatggcacaaggaattcaagctgttttaggggtcggcggagagtggctggcagacatttcaaaggtaattatagcaaattatttctgatatcatattactattaacatgtcaaacttaccaatcaattggcttgaacaagtttacaaaaaaagtagaaagtagagagtcaaagaccaagacttaattgtgataccattacaagtattaaaacttctgctgccccctccctctttttttttttgacttgtaatcctgcccttgaagaggctgaaactattgatcaagattggagaaaggaggatagagcccctcaatcaagcaaagaagtagtggattgttgggattgtgtgggttagagagtctcatattgatatgtgtggtgacttaatactagatataagatgcatggaaaactccacttaaattagttttgagataaatgccacatttacctttaaaaaaaaaaaaaaaaaaaagatagaatgccatatttcttatcacacacctcacctttcatcctactttctaaaccgcacttccacattctaacaatgacccaaattctatacaattgtggtgaaataaaatattgagagaaattggctcaatggacctttatcattttaggttttcccattatgtattttccatgttgtattgctacgagcctacaactcttgtgccattgtttggacatagtgaattttatcctctatccgtgatttgttgttacttttttgttttctacatggactctttaatgttgagcttaaatttgtcaaggctttaattagggtgttctttcagtctttctttcattatacaatgaggctttcaatttgatttgtaaatcaaacaagcagaagattgagcatctttacattcatcacattcacattatttgggactcgtctttttattctattctttttctttggatttctatttccataatgtagataaatgacaaactggcttattatgcatgcgcttaacttaataacaaatttgttctcaaagtaccttgtattatggatgcactttgttttttcagtcgcaaattcctccactgggttgccaactgaaattcagcttggattgctttcacccttgtatctgaggaaattattcgaacgcatgggagcaacctatatcaagttaggtcaggtaatttttgtgctattaaaaagtaattatatatatatttataatgcattcagtatgcggccattttcattatgcattaaacatggtctctaattatacacttgcatgccttctgtagtttattgcttctgcccccacattattccctccagaatatgttcaggaattccagaattgctttgatagagctccttcagttccctttgatgagatcaaaaaaatactaagtgaggaattagggagaccaatagagagtgtttatgagtatgttgatccaattccaattgcttcagcctcaatagctcaggtctgtactttgattctatatcctctttatttttttctgtgtcaaaaattcaaagaacataattgaaaatttgatattgcaattaggttcatggtgccaagctcagaggctctcgggaggatgtggttattaaggtcttgaaacctggtatagaagatatattggttgcagatctcaactttgtttacgttgttgctcgtcttttggagtttgtgaatcctgaattaagccgtacatcactggtataatgtggatagaatcttcttcatctgctcttaacttgaatagttgaatgtgtatttcctagcaaaaataaatccctctcttttactgatttagctttgaattgtttgcactttgcacaaagagaaagattataaattaggaatctttccaattcactgacgaacttaacatatttgtaaaactatgatgttactcctgctgtggcaatgttaatgttgataaaagcaacatattcagatcgataagtgttctcttttcatatgtatggtcactcttcaagtttcagttaatgtactcatcctttcagtaggctggtatcgtacaagacatacggcagtccatgcttgaagaggttgactttcaaaaggaggctgcaaacatagagtcatttagaagatatttggaagcaatgggactgacacagcaagctacagctccgaaagtgtattaccagtgcagcacacaacgtgtgttgactatgcagaggttgtatggtgttcctcttactgacctagacacgataagctctcttgttactagtccagagaccagtctcataactgctctaaatgtttggtaggacaactatatcacttagtacatgggttttcacctatttgtttaatttgttaaagtttttacgacattgtttggctctgtaattattctgcaggtttggcagtttgcttgcatgtgaatcctttcatgcagatgtacacgcagggaatttgtggctcttgcgtgatggccgcattgggtttcttgattttggtacattttcccccaagattatatatgtgacattttttttattacctctgtatctcctttttgaagcatgtgtttcctgagctgtatagaaacttaactacaataatattggctctcaaaagaaaaagaaaaaaacaataaatctctgcctcgtatcaatttgtaggtatacaaattatttgatcaatatatggctggagaaatgtttctacttttgtagctaaaaggactataaatatttctttttaataggaatcgttggccgcatagcccccaaaacttgggctgcaatggaagtgtttttgtcatcaattgcaactgaagaatatgaatcaatggcttcggccttgattgaaatgggtgctacaaacacagatgttgattccaaggccttcgcaagagacttggagaaaatattttcatcaatgaaggcaagcattacaaattatgcataaggcttgatgtttaatggacgtaaacttgatgccgttttctctctgttcaaatattaaaccatcatttatgcaggacttggatacagaagtagttgtagcgacagctaggggaacaactaccggggcaactgctgtctctgctaatgtgattgttgatgagaggcagatgaatgcacttttccttgatgtggtaagttgttcttctgattttaaatgcttaatatgaagaccttctgtttcatcagcaaccaaattgctttaagtgcatattcatattgctctcattgcctgagacccatagattgctatgaacttctggaacaggattatacgatgcctaaaagacagttgaaatgatagagattccaagctctagattttcattatgctaaaaagggaatgggggatgtcacattgaaaatctatatgcacttctaagaatgctgtcagtcggtcaatttaaatgctgttgcattctgtcatttactaaaactataaaaatttggccactaaggggttttatcaagaaacaatttgaaaatgttagaattaatattcttattatttgaagtaattgatgtgatcattttatggtaagctaaacgacttgtttacttgatcgataggtgcgagtgagtgaatcatatggattaaaatttccaagggaatttgcacttctcttgaagcagttgctgtattttgaccggtacacccgattactggcaccaaacttaaacatgctccaggaccagaggatctctatcgcttcaaaccgaaggaccaactacagggacaacttcagatgaatgcgatgcatagacttgtatgtaaatacaaataaaattacttgttggaaataacatacatcataggagcataaatacagcaggatagccatgtacttacatgcctttggcaaagaggatataataatttgagttatgaatctgattactacttgtactatagtttggttaagtacattccaaagccaaagtatattactattttaatgcccttcaaattgtacttcattattcaataagagaaaatcttccctataaaatctcttgttagtctaaacatttcgacataacaataccgtcatgctccatctattttaataaaaagtgttagaattttatgagcttacataaacaataggtttagttaactgaagcctttcacttagtctaactagagttttctttatattaagtagtttagtattgtactaccatattgagagatcaatcggttctgttcttatgttcaatagattgagtctatattatatgttttatctgaccaaaaatgttctccaattaaattaccagccaaagatggactaaaaacaagttgggacaacctgcaacgctatgaaagtaggatggttggtatggcagcatctattaagataaataaaacataaacaaacaggtttttttttttttcgattaaaagataaacaaacagttgatgaactagaaaccaagaaagttttcattttagctataaaggatgtaaattttttaaaaaaaataattattatacacaaacaaataaattaaatcgaagtctagggcatttctatatacaaaattgaaactctttcttttaaccattttccacatcttgcacttcttagtaaagtatatagaaaaagttgaagcctttgtatgtaaacattggctgtgtcaatccaccaccagcagaagaaaccttggctccatttgaattctcaaaatgccatagtacacgagaactagatacaaaaatctagtattcagtagtaaaaagttttttttttttttttcagttcttggctcgattttctttcagcatagagtatgaagtacttgtccctcggccagatgtaactgaaccaaatatcacgtcacttggagaagagtatcccatgagtcgatgaagtggtgaagttgatctttgtggcagctcctcaatttctgaagagaaattttgtgatctgggtatgttaggggaaggcccagagagttcatatttggacttatttttcccttgagactgtgtgggaatgaactccactctatccctcgaaagatcaaaagaatcttgtgacattctcctgtcaactgtgcttccattcggagtgtgaaaaggtgtggtggagcagcttttgcagcaagagagtccacaatcttcagaacatgttgcaggaccagtaagtggagtttgagaagatgaagccatacttctcccatctatatcatcaccataatcttcggcttcacttggtggtggagggtcaacagtactagcttcacaaggaacaatatgagatcctttatggagtgaaaactttagtacctctgaacaagcaccacacctcaaccgatggcacttctttttaaacaggaggaaatctgcaggtatctgcaggattttagagcatttgtaacaaaccatgataggggctccacctgcaaggggtcggaaatggcgcttagctggacgttgtttctccctcaaataatttgtcatgtcttgacttctccggcgctgatcatcagattgcatttcacgtccccatggaggatattcggaatccatactccactgagggcttgccgggcaagagctcaacatgtgcagtagctgtgaccaggatggaccctgcacggcccactactgttgtaatgtgagggtggaggtaactgagctgagcgctgccaatttggtggacagcaatgggcacaggaggggtcaaattggtgactactactgctagttgcctcacctgaaaatggtatcttcttgaacctacgtcgataagaactgttgcttccagtgctgtatcctccagggtatctacgataatttggaggattaagacgttcctccataggagcttcataattattgtacctggggttgtatcttgtgtttgaagggagtcctgaaattccctcgttctccttatcatgcaaatgggttttgttaagctgatcaaaaactaatgccaacagtttcagctttatttgttcaggatcctcagaccactcatgtgactgaaagcttgagttgcggtggaactcaccgtgcaattgaccagaaggacgtccattctgatagctagttcgacaatttattcgttcaaaaaccgaactaggtggatgatgttcatgtctctctaatgtccaatttcgaacacttcggtcatgtcttgcaggttctacaaattcatctcgaccccactttctgttgttcactgaatggctcttatctgaccaggaaggccttgctggatgttgtaacttagaatcactattcatcataggttgcgccaggaatttgtctcctcttggacgttctccagaatgtcgaaagttttcggccttgtaactattttcaaatgagtgaaaatggcggttaggaaatcgatcatccattccatcgtacgatgcgatactgctttcatatgcatgttgaacactgagctcagagctggggtcgaattcttcagacctcggatcaccatatccatgttgaacacttctccgaggtggtttcagtttactaggagaagatactacagaatcggatgcagattctgatgcaatcctttctcttacagccgtatgattaggtcttgaaccattttcagctgtagccacatagttgacagcactatagtttctgatattagaatcagagccaatcttcttgttggtgtctgctgatggagtgctctcaccattgactg

SEQ ID NO: 219690 - DNA, 3471 bp, Cannabis indica
  modified_base (396)..(396): a, c, t, g, unknown or other
aatcttaaatcctaaaaaggtagattgttttctaaggggctaaaagcttccttacatccagcgagtaaccaagaagaggtcgagactgctctaagagtctattactccctccataaaaaggttacaccagagaagaggttgagaagtccaagtggcaaaactctccctcaaataaaatgataactcataaaaaaagttgagaaagctcaagaggctaacactccctccacgtgacaagtacccaccatgaaaaggagtaagggtagctcctagagccatcactctcccataaaaagggtcataacaaaaagacctcaaggcataagtacctaaaggagcagccacaaaaccgaacgatgggggtaaagctcatcaaacttagtctacaacaatacncaaaagaattcttatagactatggggaaagtgttgacccaaaacattaacaagactaaccttcgagattagtcaacattaattcaagagacaagcgggactagcttccgaaggtagtcacagtaatccgctcggcatgcactcagcatgctgcatcttacagccacacgacatgctacaaccacttggaaggctacagcttgcgtccaatcagcatgcaccacacgacatgcattcactcggcatccatgtgtgcatgcctcttagcacgactgcttgaatgtgtcttgacatcgtatacaatattcagacattacaacgagtaaccacacatttcaaaaagatggccaatgcttagtgagttgtaaggaaaagaatcaaaaggatatcacactcgagtacgaccacgctacctgctacctgacacacccaacacctgagcatagggagatgacaagtagtggaggcatctcacctgcaagctctgatgttccaacaagaggtacactacagcaactacttgtgcccccaagatcacctaacaccagtcaaccgtacaagtcgcggctctgatgttccaataagcttttttttgaaaaaaaatataacgttttccaacaacatactttacttgatattgtatttaacatattggatatcttatatcctaaacttatctagaagactatgtaaagaaattaatttaacaaaataacattcatatttttttaaaagataagtgctaaaaaaaattctttgttgtatcccctttagtattttaatttttcggtgcattatatagttattaaatttggtgaaaaatcctgaatggcctcatgatgcacgtgttttgattgtgcatatatgcatatgataaatttggccatgaaaaatgctaactgtcatgcctgatggtatgtgatactgtctctctctatagagtgtttttcgttcttgagattgttgtgtgtttagtgagttttttctgagagttttgtttgccttccatggcttcatcaagtggcgttaacaaagatctagagcagaaatggaagaacatttgcttggaagatgaggaagaaaatgaagttgtctacgaggaggaggatgtggaagaaatagagttcgatgatcgatggtgtctcgttggaagattgttgacggggaaggtttcagacttcatgatttttcagaatataatggcggatttatggaaactgaggaaaggaatgtatgtcaaaatcatcgaacaaaatcgatttctttttcaattttttcatgaaatcgatattcaaagagtcattacgggaagcccttggacatatgatcggaaacaattgattcttgaaaggctaacaaagggagataatccaagaacaattgcgctgaataaactcgacttatgggtgcaaattcatgatctccaaaccggattcaagacagatcgggcggtacgacaagcgggaaattatatcggtacgtttcttgaaaccgatccaaacaattttcaaggcgtttggagggaatatttacgtgttagagtccgattaaatgttgaagttcctcttaagagacgaatgaaatttcgtaaaatcggtggcgatgcttttaatgcaaattttaaatatgaaaaactgcccacgttttgtttcatttgtggaatcatgggccattcggaacgcttttgtgctaagctttatgatacaccgatagatgatattgtgaaaccctacggattggagatgaaagcgccatcaaaaagacagagttttctgactgcctcaccatggctgcgaacccgacaacccgacgccactccaccaggcaccaccacaccaggcgcaagcactactactccgcccgaacgatcatctgcaacaacaccagcagtcaatttcgtcttcaaggtcgctgctactttcatggcatcatcttctcaaggtgcggcagcagtcacggcttcagtcgaagctcctccagtcgaaccatcaacagccacgaaatcagcactattctcagccttcaatgtccctgctccagtcacgataccatccaccattgatgcggctacaatcacggcttcagacacgatatcaccttccaatcgaattgctacagtcacggctggaatgaagggatatcacacgcagaaaaattagccaccatcaaggttttttgtccatccgaatatatcccttgactctaggaaagtttttacatgcatggaatcttctagtgttgaccccacattaactttgcatgataatgatgccacctatatctctgatatgcaattggatttggttgacttaaaaaggaaaagaattgataataattctttttcagccaataataattttattcttaaggaagtggatactgaagatgaggccaatgatttttctaatcatgatgttgttggtctcctaaaaaatggcagctcggtgggccctggttcctaagcccaccaatcgatatgagtactattggttggaattgccgtgggcttgggaacccacgggccattcaattctttctttgtgaaactttgtgtagaaaggatgtagtggaccgagtgaaatgtaagttgggttttgaaagttctttttctgttgaagcccaaggaaggaaaggtggccttgctttcttttggaaattttctgatgaagcccgattattgaatttttccaacaaccatattgatcttgagatatccctccctggcaaacctccatggcgcttaactggtttttatggtgaaccccaacgctctcttagacatacaacatggaacctgcttcgctcaattgctaatgaatcatctcttccttggtgtattcttggcgatttcaataacattacaactcaggatgatgtgaagggaggtcggccctatcctgattctttgattaatggtttcaaccttgcactccatgattgccagcttggagaacttgacttgaaagggtatcagttcacttgggagagaggacgtgggacctcagcacatattgaaatcaggttagacaaggcatttgcgaatcatgattggttttctttatttcttgatgcgaca

SEQ ID NO: 219691 - DNA, 2405 bp, Cannabis indica
ctctagaatatttttcatttcttctaacaactttttactctctctgccatggatgttctgcatttcatttttggtgtctttggtgggtcactctctttcttcttcttctctactctgagtttttcatttctttactttattttaatggattaaagttttcttcttttttattttgtttatgcaggaaatgcctttgctctgttcctcttcttggcaccaacgtaagtctctctctttctctctctctcatcacgggaattggcttttcagcctaaaaaatgtgcatttcttgttgtgtcaacactagtcatgatattatgataataattcatagtaagttaatcatataagataaaataaggttgtctgaatctgaagtcagtgacaagaactcataaagatttgtttttacttgagttttggctggtgttggtctgattcggtgctaaagattctaactttttcttatttatttttttcccaaaatttgtcaggataacatttaagagaatcatacagaacaaatccacagagcaattctcaggcattccttatgttatgactttgctcaactgcctcctctcagcttggtaaccttctttctctccctctctctagaattttctgaaatacccagatgctaaaaatcatcaaacaaaaataaatgttacatttttgcaaagttttctgaaaatggtatttttaagaaagtgctcaaacactaattctcttttttggtggggtttggttacaaaaggtatggtcttccatttgtgtccccaaacaacatattggtatcaacgatcaacggcacaggagcagtgattgaatcaatatacgttgtgttgttcatcatatttgcaccaaagaaagaaaagatcaaaattcttggactctttatttttgttctcacagcctttgcaactgtggctttggtatctcttttggctttgaatcacaatcctagaaagctcttctgtggtcttgctgctaccatcttttccatcatcatgtatgcttctcctctttcaatcatggtaagtcccaagtttcaatttttaatacacaaatatacacaattctgtgtgcttctaactgggtttgtgtcattttcacaattttttttttacagagaactgtggtaaaaaccaaaagtgtggaattcatgccctttttcttatctctctttgtcttcttatgtggtacttcatggttcatttttggcttattgggccatgacccttttgtcgcagtaagttctttgtttatttattgatttattttttttttttgacaattttattaaattatatggaaaataattcttgtgtcgtttttgtaggtgccaaatggttttgggtgtggtcttggaacagcacagctgatattatacttcatttaccgagacaagggagccaagaacaagcccaacactaagccgaccccagaagaatctgtagaaatgggcctatcaaagcccaactataacaatttccccaataagcagtcaaatcctaatggggcctaaactgggctacccattaggacaggtgttagaccgtgattggatcggcccagcccggcccatgctatgtttttacttcccataccataattaacaacaaagtgtttttgttcacttcttcattttgaaattgtcttatgaagaaccgaatgcaaaacaatgcaaagcatatgtttgtgtttttgtttttgagtgtgctttttattttaggtattaatttaaagtgtttttaattagagcattttaaattaatagaatatatataaatttatatttcattttcaagtgggaattatgtatggggaattgttgaaaaggacctttgtgaattgtggagggtgggatatccatgcagttgtattctaatgccctaataaagacagaaaccaaaattggtttctttaaaattaaataaatacatttgccaccaaaaagaaaaattaaataagaaaaatttgccatcaattaatggaacaaaatttaaacagttgaggtaactttgatttaaggatagatattcgatatacaataattattgtagacgctaaaatctacaatgatcagaatgagtgttagtgggcaccgacaacctgcggaacaaagacaaaggatgaccgtgaaaccttgggacaccagggtggtgccggccgaaggcagtctgacagtcaagtcagtaaatttatcgtgcgaagtagaaaagaaaataagaattgtaaataaatacttcctgtgtttatggttatgtgatgatcgacggtcaaaccttgctcaccggaatgagaaagagtacgtcagatcgtagagaaatgataagtttaatcgtcaaactataaagagagggtaaatatttgtcccccctctcagtcccagtgtgggccta

SEQ ID NO: 219692 - DNA, 2864 bp, Cannabis indica
aaaaaaaaaaaaaacaaagacattagccccattgtaatatgaaaatcaatcaaagattaacccctttgtactactaagttcttttttgaatgagttttttggacaacttgattcttattatttaaataatataaaataaagaagaagaaaatgtagataaagaaagaatgcaaagagaatgtgaattttaactctttttattttaatggagtgaattcttatttatacaataaaataagacttggaaaatcaagtaatcaatacttttatctttggcgtaactaattgactcttcatgattatagtcattcatatatgttatataatactttataacactctcatttggatgtctataatagttgcctcgaaatcttgtgagaaagcatagtgggtcaaaaaatcggtcaagggacaatagtgcaagttgtatgtactcctcattttgatatttttggagattctttaattaatgtattttgatcttgtgtactgtcttttgatattgatattaataataactttgtgaaataagtatgtgttaactcaatatttcgttaacataaatgagagttgataattaataatttgtatttaatgcttagtaaatactatacatttataatttgagaaagagaaatgctaaagggcaccagtggtgcctagcaccttcctgtgtgtcaatatcgctattggtacaattaagtatcgggtcccatataatttaatataatagtttttagggagtatcgctagccaatcgcaacgcgacatgtcgcaaaggtgctaggcaccactggtgcctaatagcaatgctctttgagaaatgggctttttacgtggttttgtagttgaaatctacatactccacgagtctatcttatttctaatattcttcaattacagatacaatttggcagaagttcctttaagttagaaaattagtcatccctttttacaatgtgatcagtgttatttataggagtaggataaaagttattctgatcttatctacataacggttatgaaatgtagatatttctatgtttcctatattttatctaataggtggggaatagcatgcaaatactttcattttaaataagataattgtcttgtttacttggtatttgtattttgtgatatatggttgtcgagacactaaaatgtttgatgtgaaatcctcgggaaactcatcaactcttggatgcatgcctcgggtaacatatttcccgaatatcatactaattgtatttccaaagtgatgaacaagagcaagcttaagaaagttaagcctcttaatgttaatattttcgacaccaagaatattcctaaatgcttatgatgactacttagaacatggtttacaaatactaaaataatggtagaagctcataaaatacgaataactttgattctcgtctaccaagatatcattggactcttattttgattgaataaaaagttattaaaataatatctattttagaatagttcactattgtaacaccctactagtttaggcgtgttttcgtgattttatattaattgtgcagttcgttgctaatcaatgggtttattgaaaatcgtgatttattaaaacttttattaaatttctctttaaatgaaaataattatcttttacataactaggatcccgtatttaaaatatttacaatcgtaatacaaaacattcgatataataattatcgcctagcgaccatccaaaatacagcctgttgtcccaaagatcgtacgttctaggcctaaccgccccaacatgtacaatcttcattcgctcactctcacggctgctcaactttagccttgcacttacctacacatgcaaacaataactgtgagtcgacagactcaataagaaaagcataatcataacataaatataaataggattacgattaggcgcccataccccccaaccataacccttccccgcaccctaggcagtactgagtcaagaacgttcaaatgacagtactatcgaccaatattagcctatactcagtacgctagtcatactctaatcgtaccgatgtgatagcgtcaattaatacttatcatcgatatccaatataattctaaatatattgataccgctattctaatgtaatctaataagcaatcaaaatcatgcacgctaaatgtgtaatcacatatgtatattattatattaatattatcttattttcgaattcaagtgtgtcgatcaacctgggtggaatagttgctcgacgatttataggctcctaaatcgcaatattcgtaaactggtgagtggcatgctaaatcacttttcagagacttaaaaacgaaactaaaagttttcctatcgatggataacatggcaatactctaaatatcgtaaaaaggggaaaatctagggtgccctaatgttttgttgtgataatattgactctgtgaacaacacttatttatgtaagtccatataaaatattctaacagtttcaattaaatccaaagtagaggcagattcggttaattaataaaaaaaatattcctcaacttctctcaaataaaaatttattggatggatttattctatttttatactcaatttaattaggtgctgtttggtaacacttttattttttaattttttaatcacaaaatgaaagtaaaatttttgtttttaaaaaatttatttttgaaaaacaaaaatgcgttctgtaaccacttttgtttttcaattttaaaaacagaaaacaaaaatgtgttctgtaaaattcattttcatttttattttttgattttatttaagtcgggtctatgtccggggtcggattcgggttcaagtcaaaagtcgggttcagcgccagggccgt

SEQ ID NO: 219693 - DNA, 3868 bp, Cannabis indica
ctttctcagttagactagttggaaattaatcttttctcaacaatgcaacttagatctatttgtggaccaacaattccctcatcttcacatgtcataacccaaagctgtaattaccagtaaattttattatgtcgaacatcgtgtttcccatagtgacaatactccaccataatcttgctcagaatttaagattgtaccctttaaatcatcttcaccaactctgattccaattgttaagaaaaccttagacacaccaagaacatacaccaagaactagaacaatctactcttaagtctcaaagaaacataataagcaatttcgattggttgacttgtctcaacccaatctctaaacaatatatggttttattaatcatatggtgtttattacatgtgtctatacaaatgaattacaaagtttttatagacatatctaagtgactaaggtttttactaacataacagtcaacataaaaaaataaagctaacctagactaaaataactaagtggcagtctcagctagcagagtttagactctaaaataaaaataaaaaaaataaaaaacataatagactttttgtttagttattatcaagtaactaaagagacacatttaattaaataaatctgggcaagaacccttgtttcctctttttgttctctccgaacacaaagaaaaaaaaaatataaccatcaaataggtgctaaattttactttctcccattttttctccataatcttgtatttttttcttacccaatatcatatatacactatataagctaatttatttcaaggtttagggttgaaaatatattcttttactctgtgagttttaggtaagaatatcgttgattttttaagtgttttaactaatttcttagcttggattaaggtttatgttgctttaatatatatttttatgctttcgtattatacattatttttattattataatttttttagtgtgtttataggattttaaaaactgtggtagtggtcacgaattggttgttgttgaaaattttgaattctaagtaattttagtgtggaaggatgtatggattactaaatataataatgtgtatttatttatatatattacatatattatatatgcatattttgtacatgtattacatatataatatatatacatagtttgtacatatataaatatttttttttatattttattactaaatatatagtaatgtatatgtatattattttacattttattgtttatataagttgcatattacatatagtttgcatatggtaatctgattgaatgtcttatatttttatatttagtataatttgtatatgtatatttgttatatatatatattaggtgctatgtttaaataatttaaaaataattaatattatataaaatcaatcactattgtatttaataatgtggtttgtagatttaattagtaataattatttttgaaagtagagtaaaattgggtttatttgttcaggtgcatacatttactaattaatttgtttagtattattatccaaattaatagtaaaagtgtttgaatatatcttaaatattcatccgtattaaagtaggttataagattgaatgtgtgtgcctgtgataataagggttcaaaacttgtaagtttttgtaaaatagattatgagaaatttatgtgacatgaaaacttacaatatattctttgttgtgtttgttatttattgaattaataagtacttataaaataagaaaaagttatagacacataggaaatactttacaatattttacaagatttattatttgatatgaaaattcaattgatgtaaatacactacaagaaaaaagacttttctaggcacattttataaaatgtgatggaaaaaaaataaagctttgccgacatttttgatggggacgttaaaaataatttttggtggattgcgttttaaaaattaggtcagaaagctttgccagcgacataagtcaccaagaaagttaaataatgtcaacacacttatgttgttgcactgaaaaaaagtgtgaagcttaacctcaaacacataggaatttagttcgtgaggaaaatcacttttgtcggtgcaatattgcactgacaaagatcacaacaatttggtagtaaatttccctcttgatataaatatggtgaaaatttaggtgggaataaacttttatcgaggcgttaaaatgcaccgcctaaatttgaaggtgaagtaaaatatataacaagcaaaaaagacctattcttctccaacttcccattttccctcttagatgcccacgaactctattctttcttttccctcttcgcctatgatgtctaccaccactgaagatcgaaggtttagactaaatattaatatttttaaaatacactacaagaaacgtaatttttgttagcgtaattcattaactacaccaaaaaagtttcattatacctatgcatgtagtaaattgcaccaccataacaaagtttgcaaaaagaggagtgtaatactttatcttttactttcaccgaaaattatttgcatcaaatctagtgtaggttagtaacattgatgcaattatgaatttcaccggaaaaaaaaaaccataaaaaacactgccaataggagggatggtatttaagtgggaaagtcacttttttcggcagaatatatcgccaacaaaagtgttgagaataatggtaggaattttttttatcagcgcatttaagtgcactcttgtataagtttccctcgaaatctaagattttcatgaaacttttgtcggtgtagtaaatcgccaacaaaagtgtctccgcccaccatacacgacgacttaatttcgattggccaactttcattgacaacttaaagcgctgatgaatgtcatctatgttggcaacatcttaattacgctgactaatttacactggcaacttttgctggcgttgttgctaacacaataagttgattttttccagcaaaaaaatgcattataaaagtcattattcttgtagtgatatatatatatatcatatacgttttagttactcatactttcacacgtgaagtataggaatttcgattaacaaaatgaaaaaaaaagcaagaattactaaatagtagaattttttttattttttatttaaaatttactaaaataaatttaaagcaattatataaagttacttttgatacctaacataaattaattacctaaattttaaaaatgaacttgaattgttaactataataattttttttgttgaatggtagctaattaaaatatgtttggtattgtaagcaaccacatggttgctttaattaattctaagaataacaagaaaatatatgcttcattttgatatctctcccttctctctagaacatagggttttgttttctcttttatatcctcctatcaactaaggcgctactgttgggcttgtccatgcgacatgagctcttggatgaagggagatcattgatgatggttaggcatgcatctactcaatgatggttagatcgtcttactccggtggctgggctcctttttccatgcatcttgatcggcgggtcactaaaaatggaggtttgttgaaggtatggagatttatgaggggtttcaaggatattattcaaatggagggctttacgcttatttccaccagatttgtccagtctgacagcaacaatggcctccctaatagtttactagtgatttctcgatgggtataggcttcgagtcataatcggaatcttagatccaagatggttctccaactgggatccccaatggttgcgttttggggggcttcgtttgagaaaggatgttagtgccacgaggtctctttttgtgtgt

SEQ ID NO: 219694 - DNA, 3230 bp, Cannabis indica
tttgaatgttgatcgtgaagtttagtatttatttatcgcaaaataatttagaacttttatatgaaatgatcaaataagattgataggaggaaatggccaaataagattgatggtagttatctagttcactcctctcatgctcatgcacaatctttgatatgagatgagctacatgtgtcaaacatgaatatgcttgcaattttttgttacaatattttaaaacccaacccttatgaaggtaccattttgaatgttgatcgtgaagttttgtgtttgtttttcagaaagtaacttagaactcttaagaggaagtgatcaaataagattgatagaaggaaatgatcaaatttatatatatatatatatatatatatatatatttatatatcattttctcttgatttttttttattatgcgatatattattggaatacatttgagatgtctacgaactaacttctccaaacataaaacattatcagatagaaagcaacattgtgcggtgccctaatcctgaatatgcagaaaagatgattgctgccatagatactatccgggtgagaggggattccattggcggtgtggttacatgtgttgtgaagaattgtccacgtgtaaggcttctttcttccattttccatttccccttatcaatttgcaaattgaatttacatattttctaatctgggaactgtaggcagtttacttactcatagctgtttatgacgttcaagtatgagcttaatgtgttatataaatgattttgtaattaggggcttggttcaccagtttttgataaacttgaagccgagtttgctaaagctctcatgtccttacctgcaacaaagggctttgaaattggaagtggttttgcaggtaagactttagcaaccttaaattggttcttcagattgtagctgccttcaaaattctttattttgatggtgggtaaataatgaataatttacgtaaattttgaatgaatctgaattgctcgtcaactccttgcaggcactcttttgactggaagtgaacataatgatgagttctatcttgatgaagaaaatagaatcaggacaaggacaaatcgctctggtgggatacaggtacaatcatcaagttcagttgtttccagatgcagtatgagtatagtcttatgaaatgttactattgagtgtgtttgtacctgtactgactttatgttgtcgaatagggaggattgtcaaatggagaaattatacaaatgagaattgctttcaagccaactgctacaatcggggtaagtctgatttgtccatatttttttcttcggcaccagcaatgctaatggagaccctggttctatttttgcattgccttttagtcattaacacaaatgtgtcatgtgctctgcagttttactttttaacacaaacaaatatagctatctgtcaaaaaaaatatatatagctatctgtctagaaatttggaagagccaaagggcttgcagtcacgtgcctgctcggttctcctgctattgtcttactattttctgacctctaaatatgattttttacatggaacatgtatgatcactaattattgcttagtttgatatttgatatcttctagctctctgttctgtgacaaaataaacatctgctctgctgcattaagaaatatgtttattgttagtggcaaagtttaaaataatcctctgcttgatatttcttttttcgtcgaagtagtttgagtgtggagttggttgataatctaaaagagttgtgttgcctaaatctgtttttttttggttgctttttttccccttaaatattttccagaagaagcagcatacagtgactagagataaaattgagacagatttaataacccgtggtcgccatgatccttgtgttgtaccctcgaggtatgtaacttcaactttgatgtatcgtcccaatacatttctttttcaaaaaagaattttactgattttttgtagccaaactttttccactttttcattctgtcatatttatttcaaaaaggagattttaaaattatgtaacttaaatgctttcatctttacataataagtaaacacctgctgctattatatatgctatgatatctcctcagattttgttcatgaataaatttctctaaaattcaataaaatcttgatctaacataaggtatgatttgtgcttggttggtaatgtgtggcagctgtgccaatggtagaggccatggtagctttggtacttgtggaccagttgatggcacaacatgcacaatgcaatttatttcctctaaatgatgaactacaggagcccctcaacttacccaactttgtggaatctgatgaagccgctctatccatgtaaaagtatgccgatgccttttccgaaacaaacaagtgaaaaaaaaattcatggtgcacctgcaaacacaaaatggagttcaattttggctcttgttttgtctgtgcttgtctaatgagtgattagttttgattaatgttgtatgttatacattcttcttattattatttttttatctttttgagtgaaatgatttaacaattttttctacttgatgtaataagctatgtgttgtgattaataaattggtcataagtagtagcagcagcaggcatctacctttaccttcccaattctaaattagaagctaataaagaatccatggttttggatttgaagtagaaaatatgtggtgaaatgaagagccttttggctcctttccttaactaaaaacaattcttataaacaaactattttctaaaattattttaatttttaattaaaaatttaaattaaaaaataaaaaaaataattcattttaatttttttaaactgttgtttttttttttaattaatatttttgatttcgaccctaacttaaattttggaaattgaacccggatccgattctagacttgaacccaccatcgatctcgatctcttaggactcgacttaaataaaatcgactaatgaacatgaaaatgatatttacaaaatacacttttgttttttgtttttaaaattgaaaaacaaaagtgattatagaacacatttttgtttttcaaagaaaaaaattaaataaaaattttacttttattttgtgattaaaagattaaaacgaaagtgttattaaacgccaccaaaaagagtatctaagaaaattttgattgtgtttttagttttaattttcaaaaaattattttta

SEQ ID NO: 219695 - DNA, 4226 bp, Cannabis indica
tttatcctttccaatttctagtctatgacagaagctctagaaacccaagtgaagagtaaggtcaccattaaggtaagcatatctttctgctttattgttgttcgactttctgctacatatatattattctgattgtgatcttctaatactgtgtgggttagagtgcatgtattctagaacaacgactatttttggctggttatgattcaacatatagatcatatagtcatcaataggatagagtgcatgtattatcagatgtttcttgctattgtccttcaagtgtaggcttttgtttttccaaaatatatagcagtttaatgttacatcctaagataactccgtttctgaagtcaaggctctaattataaagtggtgccttctctaacatttaatatattaattgccaaatatgccttgttgaaacccgaattaaaacagctgtagagcagggtgacataagtgtcagtttctcttcacaactgttgagaagttctttgtataagaagggtgtaaacttaaatgaaattataattggttcttacctttacaaataggaaagagagctacacaattgtaagcctggattttttgggaggattagctgcaaatgaaatatgtgaacctacttgtaatgtactttatatgtgaatttaatctctgtaggcgtatatggtgtgtttgacacacaatataggtagatgcatatgcaatttaccatcttcttttaacattccctttagattctgctattagtttatgttaattgttaaggaccaaataacatgtgaaataataaaattaagatctgatgtcatttttgtagataaaacatagatgttccgactgttattgtgcttgtttttcaaatacttcttatatatcttttcagacttattatctcattaacattttatctgaaaatgtcagttaattatccaatttatgttatccctttgtatcatatttatgtttcgttcaatgttttgcagttgccgtttatgggggcctactaagtacttagtagtcaacatttattgatgagaagtgtattataaatgtaaagaatgtgctgtagcaaaatgtaaactttttgtaacaaaatatgatgagggctttttatcatcaattctgtttagtttggaaagaagaaaaaaaaaaatgtatttttgcacatccattggtagtactctatatacaagagtagtatagcttgttatttttcccgagttctagttgtatgtaattgcaactgacaactaaaatgatgtagcacaacctagattgattttgtggatcttagcaaaatatgttgataagtttagtcttagttttggtagtagcttttttgcttttccttgttaaacaaactaaaagacgtaggatatggactcgctatatcaaccttaataattaaatttgttctgggaagtctgcatattcacacacaaagtttcttattgattagcacccactgtagtattgtcctgtgttttcttatctctattcaatttaagtatactcgtgaatatcgtttgttttacattattgtttatactacttgcatgttctttgaatttctgtgttaatattcatctgtgtttaaaaaagagttgtagaggatcacgctgaatgattctcactttttcttttcctttgacttctgtgattgacgcttgtgttcagctgaaaggttgtactgcaacccaagttgactgtttttatttatttatttatctcttattttggagcatttgagtgcaaaatatgtgagaattttgacatgcttatgttttggtcctccgcagggacatctgcacacctacagattctgtgacaacgtttggaccttcatcttacaggatgcagtgtttaagaatgaggaatgccaggaaaatgttggacaggtgaagatcgtagcgtgtgattcaaaacttctcacacaatgaaatgttttaaccgttggagaacatcctaaataagttcgtaaagctctgttggtattagtgagagagggagggtaaattatggcgaggaagaacatccgaacaagtcccactgattcgtaggatttggcaacttttaggagccttaaattccaaagcttcttcttaccttgacaattatgtctatgtgatgttgatgtttgttgtgtgattgttaagaatatttctaggtttcagtttgcctttcagaaaatcaaacaatttacagatcaaacagtaattaggtatatgggaatctatctgcttgttctgtgaaaagctatggaaggacccccttttttattttttgctaatgtggattggaggagggggttgatagtggtttgaattaacaattctcacatattattcacttgaaaaatatttcaatgttctttggaatttaaatgtggggaaaaaaacagttgaacaactagtttctgtttttctgaagggaaatacagttggactattgaacaccaatttcctggtttattaaataaaaacaaacagaaaaagaaacaattttcttaaaatacatgtacacatatgagtttaaaaaaatgatacacactcattgcttttgtaatgacgatatgcagtttggatgatcgacgactaatcatgtaactcgggctttggaaatggcacatgatgtctcattatcatcgtcattgtcattgataaggcttcctccgatcactgttgaagactaatccattttcatttttatgttttgatgattcaaaatcaaatctaaaaaaaaaaccctcaagaatattcacttagaattagaagactatattaaagattttgaacaaaatgataattttgtgatgtataacaatgcttttgcgatagtagcttgaaaacttgttgcgatatttaacaatattttcgtgatggtagcataaaatcttatttttagttaaaattgatgtttaacgatgatattatggacaaaattatttttggccaaaacgatgctttacgatgttttaccatggtttttggcaaacaacattgtaccattatttttgttaagcatactttttttaacttaaaaattaggctttcgtgccacttatacgaaagtaatattattgtaaaagtatcgcaaaatcatcgttttgtttaaaatttagtttttggagtttcatatttaaaaataaagtgctagcaaaactaataaattatccatagatctgtacaaaaaatttaaattagagttttaaactaatattattggagggtttattaagtttttaatttaattacattaacacatcaaaggaaaaaataatgatgatactacgtgacatccatatccattataacaaatatggatgtcacatcaaaaaaaaaatatggatgtaatgaaatttaataaagcaaaattattagaagataattgactaaagaaataagtaaaaatatattaagtcaatagaaatggaaaggtgtactactaagaaaaataactaatagttcttaatattaatataattaaatttaaataatataaataaatatatatatatatggtaagaataattaagaaatcaaatttaaagcataattgagataacaactaataaaatatatagtaattattgaataataataaagtaacaacaaaggaaattaaatatagaacaggctctttacttgtttttcttttatacgttttcagttttgttttatttaattttcaatcatttgaaaataatcgaacaagcttgttttttttaaaaaaaaaaaaaaattacaaattttatttaaggcgtctctagctagttaggaacacttttggtatatatttttttaagatcatatttagtatataaattaagatatcttaagggttttactatttcatttttaatttaagataagatctctactattttttagatttagtgttcatatttttggttagtttgtgccatttggtttggcttttgtactatattatttggctaatttacagtatattgttgactcgtttgctcatgaatacaacctcaaagagtgctattatcgatttttacagataagttttaaatcttacttttaattatattttaataattttagaggaaattttttttctattattttatatcataatttttatcatttatttgtttgctaattgaattttgttattttttggtaaaatagttaattttagttgggatatgatttgttaagtttgattaagggattatttcacaaata

SEQ ID NO: 219696 - DNA, 3297 bp, Cannabis indica
tctctctctctctctctattattgcttttttggtgtttttgtctcgttggcatttttctctctgtctcttccaatctcactttctctctttcacttctctatcatcgacaactaagcaggtggtagttgtggctcaataagtgatagttgtggtatatatattatatattgattgtatttttttagattggactttatctattttttcgcttgttgcaagcggtggtggctccgcgagaagcactcgtagtggttgtgtcttggggtttctattttttttgtacggtggtgggaaatagttatttgaatactgtactttttctcctttattttaccttgtttgcgtgggttttaagggacacaaccaaaaaaaaattaaattagattcctttgcatcattgttaaatgtacacaatcactttattgtgacaattctaaacatatatatgcaacaactcaattaggccagttttaaagggacacaatttcttttaggttttgttttgattttataactagtgtaatagatatatatgtcgatttaaaattgatggtgattaagtgtattcgttgtagtgaaattatcacattttataaatactaacatgattgttgccaactttaatgcagttgcatcacatctagcttacaaatatatagattttgtctcatcactttgtaacgtggtcacatcacactacatgccccatatactaaatgttgacctgctttttcagtaactcaaaatatattagagaagaagagagattgaaacaaaataacaaaaagtacaaatatattttacatggttaaagtttttaatgagactctactccataagttatctgtattacgaccgagttttacagcaatggagaaatgttaatattttgtagcggataatattacatgcaatggttggttatttgtaggttgataggtagggcgaattggcgaacctaatatgggattaacccctaattagcttgactaaatggaggagattacatctctcacgtctttgctttccctaattaaggctcgatgggtttgccaaattaagtgtgtaatctttgttgaataatactgtatcatcaatgtgataggtattgtggttgtgccatctgcaggtggttgagaaaggtacatgcattttgtgttgtattgaatgcatgaattgcaaggtttataccaccatatggtatatctgtttcatcgactgtaaagagggatgggacagtctgtagtggaactatctttttttataaattacatgtgggtaatgtatacctatctaaaatgtgatgcaaaaaaaaaaaactcattttgaagttgattatgtgggcatccttgtataagatgtcctcatgggatggactttagactcttatagatccctttcttgcagtatcgtatctgagtgtctgattgagatgggattgtctgaacatgggtctatatacacgataataaggtctctgtcttatattctattctaagaggtaacaagtgtctctgaaatcatagacaacatagattttgttggaaaaacctattgcaattaaccacaatttttccctctttgtacgtcaaaaatggtatacttatcaaacacaacaataagtaatatcaaatatcaaccaaagcaccacaaacaatataaaatacacaaattaaacataaaactgagatattaagatttttacgtggaaacctaatacgaaaaaaaaccacaagaccgtagtccgctcaaatcatcaactatcaccaaagttcaataatgggattccaaagttcttttctagtaaaactagaggctcacagaaacatcaagattaaacaatcttggatcaccaatacaatcatcatcatcatcatctcaaaagagggatacacaaaaagaaaatttttgggtctcaccaagtgggtattgtagaagagcacattagagaggacaatcaccaaatcggagccggtagatttgaagagaaccttgcaatgattcaccatccaaaatttgagctaaaatggatgagaatcaatcatttgattttcaaagagaaatggcaaaatctctttctctctctagctttcttcctcttctttccctctctttttctttatttctcttggctgctcacgataccacctactgctacttccttttttttaatttcttttaggttttatttaatttgggccttaagcccttaattggtccaagcccactaagaaggggctgacccaataaatctccccctccaccttagttggtggggtctactaagtccactcttcgcctacaagctttgagcttctctttaggcaaagtctttgtcaacatatcgaaatcattctcactggtatgcacatttttaagcgtaactctttcatctcaagcacaccatgaatccaatgatatctaacaccaatatgcttggatcttgaatggaatgttgaattcttagagaggtgaatggcactctgactgtcacagtatacaatgtatctttcttgttgcaagccaaattcttgtagaaacattttcatccataaagcttctttacaagcttcaattacagctatgtattcagtttaatagacaaagaaatacacttttgtaacctcgattgccatgagacagctcttcctacaaatgtcatcaagaatcctgaagttgatttcgtaaaatcacaatcactagccatgtctacatttgtgtacccatcaaggataggttcacgacttccaaagtataagcgcaacctggaagtacctcgtagatatcttaatattcatttcactgcttcctagtgatccttactaggattagagaggaataggctaacaactcaaactacatgagcaatatctagcctcgtacaaaccatagcatacatcaaattaccaactgcagatgagtaaggtattaaagccacttcttgtttatccttctcaagtgtaggacattgtttggagctttgaaatggcctgcaagtggaaaactaactactttagctttgctcatgttaaatatttcaagaactttttcaacataagcttcttgagataacaaaagtttcccattcttcctatcacgggaaatcctcattctaagtttctgtttcactgatcctaagtctttcatagcaaaagacttgctcaactcttcttttagcttttcactctttctgacatcatggccaacaattaactttttatcaatatacagtaggagaataatgaaatcatcatcagaaaacttctttgtaaacacacaatgatcagaagtagttc

SEQ ID NO: 219697 - DNA, 2246 bp, Cannabis indica
atttttataaaaacttaattgttttatttggctgcagtaaataaactgagttagaaaaatgaaataaaaatatataatatggcggagaaaatggcacctaggcacgcacaccgtaggattagggttggagagcagcgaatcagccctacgtaattaatattaatattatttattaattattatatgggaaagagaaaaacaagtcagaaaaattgtgaggtttactttttgtttcacagcaactggggaattatagcggtctcgctctaaaacctcatctctctcccaccagcaccttctctctcgctcaattcaccacacctgagagattgcaccctcacccctcctcctctacttgctcacctcagattcagagggcctgcccaaaacaacaacaaccaggttcgtctcttacattagtttttcagctgtcaaagctaggattttgaattgggtcattggtggtgctgaggtttggtttttgagtatgtatattgctttatagtagcttatgaaaatgttatataagctgtgttttgagtgccttagggttgttaagagatgaagttgttgagattgttctgatgaaggttcaagttttagggggtgattggtgaaattgcagagagaggttgccattatggctattttacggtctttctatggaatgaaacaatagaatctttgaagacgcggaaggaaatatataagtcgctataaaacatggttaagttttggctggtttctcatcgctaaaggcttcaaagattgtaaatttgttaattttattagggcttgggagttgggagtatgcttgtaaatttagatgatatcttatcatcttatgtaactttattttttatttttaatttcagtgattttcttctaatgtcaaagctttacttctaggccccatggggaatttctcgttatgaaaacaaactactcgcatatgactccgacagcttgacacatatttgttagtgctaattacaaagttgcattgcggtctcaataatagatttcatttcacctctcaattctcattatcccacagtaccagtatttggttcccaagagaattaagtgctggtagtttggattgagtatttcatttggtgtcaactaaaaacaaactatacttgctggttttgcttaccctttgagttcacttcaacctgtgaagttcgttgcagctctctcatttctttgtaactttgcatgatttcttatatttacctcgtactatatcttgatttttttttttttgtatttctacttgcaatagtcaatcaagataattgagctcattcatttgttgaagatattttgaatggcgattgtaccttctggaagtacgtgtgctgctcaatggggcattcgtcctcagcctatgttgaagcatggcactaataagatgacatcccaatgttggtaagcatatttgaatgtattgtttgtagaaatggaaatgcttatatatgcatagatatatattgaaagtttaatttgttggatctgctgttcttgtttcattgtatgatgcaagtttatcggcaaactgaattgatttgattgaaaatgtgtatatattcattgttagattaatttaagtatcgtaagtaattaattttaaggacatgtgatgagtttcatattggtgtctcacgaaggcttttactgtgttttaacactcatctagctggtaggataccagggtaaatattattatatactttcatttcagtttaatgattgagcgttgtttgatgatttttatatattattgtttgcagtgttagaagcaaaatatgcaatttcggggcaccaacatcaagcttcttttctcaggattccttgcatgctctgtcatcttcagtgtcatctcaaacttcacagcgccgtaggggagcaagatttatagttagagcagatgctgtaagtagcagcactggtttttatttgctcagtataacagatctaaatgaaatgaataccaattaactgcttcacccttcattgcatggtgctaacttctttttgtatccaggacttctattcaatccttggggtgtcaaaaaacgccagcaaatctgaaattaaaagcggtttgtatcaacattttattatttatattcatccagttaatgtttgtttcttcgccgtcactattttctttcaaatgcttggcttttgtgctgtaaattaccttctagggaacatttattcacatgaatttatctggt

SEQ ID NO: 219698 - DNA, 3393 bp, Cannabis indica
atcatactatagtttctatgctctaaattattgacagtttttacaagagaatgatttaagtgtatttttattagcttgccaacagaatgctatcgtaattgtagtatttgctttctcagaaattattttgcttgatggtataaatcaagcttgttcttatgtttcttataacatcgagctttacggaattttgctttcgtgatatggctaaagctactgaaattagtgctcaatggatatccgagttctatcttttttgtttccttaagactaccatcagataacatttctaacaactattaagtagtagtattaaaggtaaaggtctagcatttagtttagtagaaaataggagtagacttacggagagccatcttttcggttttgacatgatcatgctacactagggtctttataggtgaaaagttttaatctattatatattatgatataatgatgctaggctagactattttttttttcctgttgcgaaaaatgcagtatttggagtgataaacttaattgaactcgtgctcatattaagctgatttggcaaatattaacgagtattgatgatgtgaggaataacgtaaccaaaagaaattgatgttcagaagtagttgtttgaccattttaatgatatggttttgcccttttaatattcatgttgcttgactagatgactattcatattagttgcgcatgctttttagatggatggaacaacttgcttggctagatgactagtcatgttttttgtgagatatatattattattttgataaacatggcaggtaaagtatttgctcgatgaacatgcaagatgtatggtatttatagctagcctgcatgacaatatattttcaaatttcaatgaatttcttcactgctttcagaaaaaaaatatccatgttgcttgacaattgtaatgatatgggatttctctttaatctggttggatttgttggtcatttatgcattatggatcttaactggcaagttgaagagaacctttcgagcactgcctgtttctcttttcttagttctgtttgacaaggctttcttgaattgcactgtaatttctattttagaccagattttatctagtaagggattcaagattttactctttatctgttttgtgtgagctttgctagaggccctatttatggttctcaatattaagtcaaaggttttgaagcttttagtaatgatcaaatatgattgtatggttttggttgtttttatgctttgctaatatgatctctctcatcatctaaaatgtacagattgcattgctagaagaggaacagaaagatgacacggcagaagatgaagctgcagaaaaggtgacagaggaagctaaagcaattgagattgattcatcaaaggatggtaatttggatgagaaacctgacatcaatgatgttcccatggaagaaaaccaggtgaacattcacatgctcatcgggtgcattttgtttgcttattctttccacttattaaatgaactgtctatgttaccttctttgaagttatgggttccgatagtttagagtttagacgtagtaaaatttaatgttgttttctctcaagcagaaccttgtataatctcattaggcctaacattcacacttgaattttcattactctcaggacacaaatcaggtagtatgccaagatctgaatgaaagtactttggatctgagcttgggattcaatgctcatgaccatgaaagcgacaatgatcccgattccaaagctgatcacagagatagctagttgaaagagtgaagtttactgtaatgtacccattggagattggaagccttgcctaattttttgatcatttagattaattgcgcataagatttctgagtcatttgtagtttctattcctgagtcatttgtcatacattacttaattctttagcactgaacgatcgagttttttcccttccggaaattctaattggtactgatgttcgtactggaatttacataggtgtaatgagaatcaactatttatttagcattcacaatcacaatttcacatctctgttaatattttatgaatcactaatggctgtgccaccaaccaaattctcaattagaagtgtaaggaatgaaacgtagattataccaaacattttggacccttccataattccattccaagttccaacaatggaaaataccaagttaaaaactgcaaacaaaagaagcaacttcttaccactatatcatatttcagcatatttttggtaatcattcttttgcaataacacagctttttgaggagtaatcatgcctgtattaccaccaaataaaattcattgtgaattatatacggtcacatttcaaggccatgtttatgggttgctatgggactagtttcgatgtttagttgttgaatttgagatggttttgaagtataaatcgagttgagctttttaaaactcaaagcctgagctttaatgatgttttctgtttaagggctcgtttttaatttatattacattgggactgttgtatatatggtatatatatgtcatataaagtttggaataattatttcgatggcatttaggagagtgcaaaactcgagattcctgtttcctacaaaaaacgatccaccgtttgggagtaaacgattaaccgtttcttgctagggaaccccagggaaacggttaaccgtttcacaaatggcagaccgtttttggtgatgattttgaaccccatttttgtattttctcaaaatttgaggtagggataccctagagaactacagggaaaccttgggaatgaattgttggacctggaacaaggtaagattacttggttaattgttcttttgttattatggcaagggcccgggatagtcgatcgttctcctaacaggtcggccaacatacttgaagcgagacttaaggtaagaaaagtataatgtaccatatggcatgacaaggtaagaaaaggattccaatgatattagcacttaagaccagagaattgttgcaagaaggatgtataagatttctagatagtgtgatagataccacaaaagatacattggaaggatcggagaaggttcggctagtatgtgagttcccaaatgtgtttctggaagaattactgggactactactaaagagagagagattgattttaaaattgaataagcgccaagggctgagctagtttctaaggccccgtataggatgacacaggtagaattgaaggaattgaaagtcgagttacaaaacctgcttgatttgcattttacaaggccaagtacttctccttggagtgcactagttttgtttgtcaagaagaaggacgggtcactacatatgtgccttgactatcgagagttgaacaagttgacaataa

SEQ ID NO: 219699 - DNA, 4594 bp, Cannabis indica
atatcttatctgtgtatatacctatatggctaaatacacatggaaaagtgtggttatttcaaaataaacaacaaattaataagtcttttttttttcttttttgcgagtatatttagattagtaaaagtgaaggaaatattagtaaaaaaaaaaaaaaaaaaagtgtggtacgtgttttacaagtgtggaatggcaattttattataggtaataatagtcttttttttctttgtcgtacatataatcatatatatcatatatatatatatatatttttggaactcaaactattcttacactatcatttttttttaaaactcttaggaaagagagagaaaagtcttttattgaagaaagagaattgtatatttgatattacattgactggtcagctctataaattatatatgtggtgtaagttgaacccttatacctgaatatgtgtaaacccaagcacgaataaatctatagccaaacaaacaaaatgagttctaagacgccccctcaagattgaaggtacatatttgtaacattgatcttggagagtaactccttgaattggaaaggaaaaagaggctttgtaaggagatcgacaatgttgtgcttggttttgatgtggagaagtttgagctggccactttgcactctttctcgaacaatgtgacaatcaatgtcaacgtgtttggtgcgttcatggaagaagacagggttctcaaatatgtggatggtggccttgttgtcgcagtacataagggcaggtgtcgtgtgatggatgccaaaatctttgaggagagcaagaagccatatgagctcgcaagttgtgttggccatggcacgatgctatgcttcgttggaagaacaagagactgtgttttgtttctttgatttccatgagatgagtgactgtcccaagaaggtgcaaagcccgtgacggatcttcgagtgtcggggcaagtgccccagttagcatcggagaagaccttgagttggaggttattggcaacaaagctagtttcagcataggccttgagttggggtgaggagctgctgtagaagaagagcccttggccaggtgtacccttcaagtattgtaggattctttgggcagcgtgtaaatgaggttggcggggagctaaaataaattgactaagcctgttgacagcaaaagagatgtcaggttgagtgatagtgagataaatgaggttaccgattaagttgtgataagaagtggggtcggccatgagggagccggtgtccttggagaggcggacattgggttccattggagtagatagggccttggcacctaagtaacatgtatcatttataagttgtaaggtaaatggtctttgtgaaactgatatgccattagtagagcagccaacttctaagccaaggaagaagcgtaatgggccgagatctttgagtttaaattttgagtcaagtttccttttgaaagtatcggcattggtggtgttgttgctagctatgacaatgtctctacataaattgaaactgcaagaaaagtatcattagtagaccaaatgaataaagagtggtcagaaggtgattgtgcgaaaccatcattaagtaaggtggagcttagcttggcataccattgtcttgatgcttgtttaaagccatagacacttttatttagcttacgatcgacattagggggaagatcccatttgtgtttgtaccctggaggaagagccatatagacttcctcatctaaatcaccatgtaaaaaggcattgttaatatccatttgatataattgccaattataaatggcagcaagagtaagaagaagttttaaagttttaaacttggaaacgagttcaaaagtttctagataatcaatgcctaatttttggttgtagaatttggcgaccaagcgagctttgagtcgctcaacttcaccatttgctttgtatttgattttataaacccacttgcaaccaatgaagtggtgaccgagaggaatagatacaacaatccatgttttattagcaagaagtgcctcaatttcattgtccatagctttcagccattgaggcattttttaaacttggagaaaattagtgggttcagagaccgagtgggcacatagaatggcggcccgaaaagtaggaaaaaatttatcataagataaaaatagagacatggggtgattagtggaatactaacatttgtaatcttgtaagtgatgaggacgaataatgggacaaccagcttatttaggaggagaagagacaatcatcctagctggggccgtgggagggggtggctcagatgtggtgttttggggtacaatattaggtacctgaggataaacactagaggagacattagtatagttaaaaaaaatcatcaatggaaacactagaacatgttattttagttggaaaaatgtattcataaaaaataacatcacgggagtaaaaatttttgttagtcttaagatcaagtaatgtataggctttcataccagcgggatatccaatgaacacgcacgccctggatcgtggactaaacctgtgtgttgagctgtccaaagtggatgcatatgcaaggcagccaaaaatccgtaagtggtcatatgagggcaacctattatatagcaactcaaaagaagattttaagtgtaataaagcagtgttcgattcattagatagacaacggtatgtataaagtaactccaataagaaagagataaatgtgactgaaatgcaagtgcgcgtgttacatttaattgtgttgatgcttacgctcaacaactgacttttgttgaggtctctcaacacaagaatgatatggtgtgatacctttagttgcaaaaaaaaattgtaggtgtagttcctttgcattgtcacatctaatgcctttgatagaggcagagaattggtttaatatgagagcataaaactgtggtataattatttgagcctcacctttgcttttaagcatataaatccaagtgaaccttgtgtgatcatcaacattagtgagaaagtatctatacccctcaatgctgactgtatgaaaaggtcctcatatgtctaaatgtattagattaaataaagaaggtgccatgttattagctgagttaaaaggaatttttttttgcttagctaagtgacaaacatggcaaggagatacatgagaatcagaatcagaaaaattcaatgattttgtaattcgtatagaagggtgtcctaggcataaattctatttttggacagtagtacaatgatcaacagaattacaagtattattgttgaaagtaaaactacatgatttagctgagacttgttggcgatagaagagatgtccaacacgcttagcagtcccaatccgaatattctgggttgtgtcctgaaaaagaagtcattgtgagtaaatgaaactgagtatttgggatctttaataactgcagaaaccgataaaaggttatactgaaaggttggaacataaagtacgttggtaagccgtaaatgacaatttaattgcatagttccagatttatgcacaaggattttaagtccattagggagggaaatatgagaagcaatagggatattatgaaatcaagaaaaacatgttatatcaaaagaaatatggtgggtagccccactatcaacaatccatgatacagatttaccagtgatgtttgatgccattggagtgttggcatcaacagcagcttgagtttggtggatatgctgggtgagttgtgcgatcatgtcctggagagaggccagcttgtcggacaccgaaggataagtaggagcggaagcagagttgacagtgggtcccttggcaggttggcctcgaacagtaggacttgtggaggattggccaccatctgaggtagtgtgttgggtggagttggttttccgtttgtcgccataaccaagaggaaatccatggagtatgtagcacttttctttcagatgccttggcttctcacagtgagtgcaaaaagggcgctgatcacgcttattgtagggaggatttgtcgaagtctcaacgatcagattgggcagcgtgtgaatcttgcgtagtctttcatgttgaataatggtggaaaagaccttggaaagagagggaaacgactcaaggatgagaacttgagcatgaacagcgtgataggattcgttgagcctagtcaagaatcgctggactttctcttgattctgaaataattttacgttgtcagcagatgcttgacaagtgcaaggaatgggaggtcgcaactcgttgatctcgtcccaaatggctcggagttctttgatgtaagctgtaacgccctaatgctaaggcacgcaacagtgatttttaaattatagtattatctttgctaatcaatgaactttctcaaaaatcgtgtaaaattaaatatgatactttataaactttacataattacttatagaagccgagatcccatttctaaacttttacaaaatattccaaaatacatatgtcaggttgcacaacaactacaaaaacgaaaaccccagatgtcccgagatggaacactccaggtcgcgctgccatggcatgtacaacttcatcccagctcagg

SEQ ID NO: 219700 - DNA, 7960 bp, Cannabis indica
ttttttttaacttttctatatgagaaagtgaaattacaaaagcaaagtagtgaaacatcgttcgataaataaaccattcatccatctatccatgctgctattcacagtttgtaattaatgccgccagtctataaaagaactcaagggtaggaacacctaaacagctactactttgtcttctcttactatattcccaaattcacaaaattcaaccccctccattccaatttccattcccctttaaccaaaacaaaaaataatcccagaaacagaaagaaaagaccatcgaaatgcaaaacctttgcccccacatcatcgcattcatatcctgtgattttctctacttgcttcgccgccattgatatttggaaaaaagttaaccatgtacaaaaaatactatagtccgttattgtgattctcttggtttattttgggtcccttccctgttcacttttggttcaaggtgatcataatttgaattcttatagtaaagacaggtcgatgaccttctaggtggcggtagtagtacccgggttggcttcttgtttaggttgttcagttctaacataggttagacttcgcccagtgggagaaggaacagcgttggttgatatcggagccccactctcggctggagaaggctgagcatctcgcttccattgcatgcttctggcacctggtttaatgagtggacgaggacgaaatgaaccaaggccccctcttggataggcaactctaggaaacctgccggtggcaaacatagcaccccgtgatgctcgtggccatgtcatcaaggagttgtttcttgatgagcagcagctctcttcacaacctgcaaaagaaaaatccataggtaaacaaagagaatacactggaatctgttcatatttactcatataaagttaaattcagtttatgttcatcaaagaatactaaataagaattcggagaaaaaaaaaagtagaaaagatagcttgtttctacaaacaactaagtatgggaaccggaaagatcgtgtttggaggatctgagttccaaaagatggaaaaatgagggagcggttataaaagaaaacaacagctgcactctcattaaaacacagacccaatatagcacaaattcaatcataacacagctatgtgagcaaatagaaaatcctattttcgatagttgaaaaaacaaaaggtatttggaaagcagacacattttgttcaaaataaatcactactttctaacattatattaccttgagaagccgtgacatgaaggaggttccgtccaaggataatgcattatctgctgcctccttgcgcatgaactccacatatgctgacctgcacagcatgtaatttagttacccaaataagaaaaaggccaagaaaatttacttgagcaaaatctaaaatgacttaccctgttggttgccctgttgctgcatctgtaactatgacaacctttagtacttcaccgaacttgttaaagtgccttgaaagactatctttggtagcaccaaaatgtacctgaccatgaaaataaatgatgaaacttaattctctgtaatggacaatgacaaaccaaaaaacaagggaggctcagtcacttacattgttaacaaagagcgttcgagaatctgcatcttctaagggacgaccagttgcataacctgcacaacacaatttacatttatacataaataagatgttacagtaaacggacttcacagtacatagcaaagatgttgaggatcttctgaaggaaattcaaaaactatgttttaatattttcccaaaagcaactaatttggtggattttacttttttaaaaacaaatgggatgttttatgacagttaaatcctcaccagtagtagatggcagagttttctgatgctcttgatgagattctgtaggaagttttatctgtaaaaaatcaccaaaaccacaagttcagtacaaaaatcaaagtcaatagtagaattagtttgtgtgtgtgtatttatatatataaatgtgacgagcatatgaacacatgtcttacatttccatttactgtgacagggtttctgttatctttcattattcgcattccagatattgaagctcctacatcacctgcctgcgcagatttccagccacccacttgagcaacttcccttggctcctgataatgggaaggcttccaagtattgacattcacagaaatgtttacaatcttttgtgaggtatttgaagccacagaggtttggccctgaactttatccctgatcgaccgcattctatcattagcattcttagctacactatactcaaccatcattgactcttcatctttgtttccaccagatgtcccagtttgagaaacatctctaatattgcgacccaatacattgacatcatcatacccttctttttcagacaaataatcagaagccaacccggctcatcttcaagcatggtcatattgccaatgtactgcccactctgatcacttctttccagatatgttgaatgattttgcttctgaatttcattgacagctccaaattcagtgtcctcaaaagtagtttctccatatgagacaaactggtcgtgagaccctgatacatccatttcacggccaagtcggtcaaacacatttccagatggtttaaatcttgatacatcctcagcagcttctgccacagctttgattactgctgacataggatttgcaactctggcaacagactgaatacgacgaggacgatcaactgctgatgaatcagtggtggatgtagacacaacagaacggagacgcttcaatgaaggctctgttgatgcattagagggcctagacattgatacaatatcacgcactgcaaattgaagcagtcgtcgaggagcatcaacattcatctgagttgtttccctctgttataaatttataaatgaatcagaaaatgagtgaatattctaactacttttctgtgagtttgttcagatctaacttttggtggaaattaatgtacaacggaagaatattatgacttcaaaaaagtaacattaaattttataaaagacaaaaaagcaattaaggtcttaaatgtgagagtggccaattgtccccccaagggaccaccctcaacccgaaatccagtaatctaatactgtgtaatcaatatcactcttaagaagaaactctaataaagagaactgtaatcaagattcgaacctttgcattgtgtctgtcatcagttcgatccctcttcctttgaacagcaggtcgagcaggccgtgcaggtcgtggagaagaagtcttccttgaacgcctacttctatgatgagatttttcatctgactgaagattttcaattccagagcttcgaagaggaggcggttcggcaggatttctaacaaggcctttccattccctgttgtgccttgttctagattccttattggattttcctctatcagtttcagaatccaaatgctgggaatcattcattccagatttctctactactgacaatggtttagacttaatcaattcactcacacaaggttcctcaggttctacatatgaatcaatatgcgaagccaaatgatcccacaacctatttacgatgaaaatagtaaaacaaaggtgtcaacaacaacatcatcatccataacaaataattaatcaaaacctcagaagattttgaattaccaagacacaaaagaatcactgtcatctcccaagaatacattcaactcgttcttcgcctcttctttgcgcctcccattctttagtaagacaattacatattcctgcccatgcaaaatcataaatcatttgcataaaccaaataagaaatatcacactcaacaacttctttaattcactgtctttcagatgaaaattatgtataacataaagattgaataatgaaacatcaatatcaaaagcttaggatacaatttaattgagtgaataatatgaagaacaatgtaatcccaatatcaaaatctaagatgaaacagatagatacttatatttacaatctcccaaactatagcaacatttgtctattgaataaggtatggtacgaattcaaaattcaacaaaaacaatcaaacataatcctacattgcgaaagcagtaaaaccataactataaccaaataaaatcagaagaagaacatacaacgagagtgtcatcagtgtaatcgcccataaactctttaagcttatccataacacggtccctcaacttctcagcgccatcacccgtgaaattagacctaaatgttcgatcgtcaacctgatcaatgctccccatctgaaaaccctaagttaacagtcttattcaaactgcgtcagtcgtatcgaatcctcgatctcccaaaaaccctaacaatgaatcgatatatctatctatcaatctatatatatatattcaaaagacaaaaagttttgggagtggaagaggtgattatggagaggaaaggctcaggtgagcagtagggttagggttgtgtgtctctctgggtttcatggaagaagaaacccccggcgattggagatggcgattcagatcagtgagtcgcggagcgagtcgagtcgagttgtaaaaaagaagaaagtgtaatgtttttgttatcgtaaacgaaataattatctttatatatatttttattattattattattactaatcctactttcctaaaacatattttgaaatattaatattattatttatttaaatgaatgttattatattataaaaagttaccgtttaaatataaatttttgtaataaataaatttattttgtaacatttaggctaatcagtagattattattattatttattttttttttttgtaaaaaaaatgcaaaattcattaagaaaaatccgttgttatagaaaaactcaaaaattgatgataagtatatgttcagtctccactagtaacagaagttgccagtgtatgggcaacactcttcgcagatcgcgaaatgacattacaagaaccactaccaacaatagctgataaagaataattatataataaaatagactgaaaactaaaattaatgtaaaacttattcatccaaccaattgctattaataatgaagatattgaagccaaattgatgcgcaagaaccaaactcagatgaataacaagcaactctgtcacattaacaaaagaatcacctaacacacatgatgaccacgccaaccaaaccacaccctctgcatcccgtatcactcccctcaatctaacaaatgtcctcctcggaatcaccaaagcatccgtcgctagagcaaagaattcaggaggaagaggcatccatcgcatagctcggtttataattgggttcgcaaggcccaagctcaaatgaaggtctcgccgatcatactccttaaattctaccagatggttattggctgtgtcaggaataatatccaatcttaactgtttgttgtcaaataatattgagttcaccaaagagttgtcattatcaattcaaaaacctcacgaaataacttgtcaaaaaataataggagaatctcatatatttgcccatatgcacaatgacgagcaccaaccacacccccaatcgatccacactaaaatcaaccatgaacaaaaaagtttcagcttcttctccacaatcagtagattatttaccagtggtttatttaaatttcccaaaataataacatgaataaacaaagttaaaagacgaataatgggatgaaaaagcccaaggcccatttcagtgtagaaagaaagcccaattattagtggcggttgttcgttagccaatgaaaagacgccacgtaagcaagcttagtgtagtatcgggaacagtgtataattttgaggttcgtcttcatctacaaccttctttcttcacccacctttatcaatggtgatagatgctcagctgaaccctcttttctttggacttatcatccgattctgatctcttccctcttcgctctacaggttctccatctactccttctccttctccttctttttacctttttaattctctcaaatttcttacttttttctatttattgtttatggcgatgtttaaaggggagggaagacgaagaagaagaagaagaaccagtctcggctgataggtgatgttcttatttgattccatttgatttgtgttttttaattcagctaaattgtttgattgcatcttgtttggtaaaaggtcagagttcatgtattatgattatgattctttaaaatttgaaattgttgaatgatttttatagccatggtagttttgtattgttgatttgatgtttgactttggaaattaaagtggtaagtaattttttttgtattggataattgttgatcttgaaatatttgaaaggcatgaaagtctagcaatataatcaaaccttatgaaatgatgagatgaggggtgtcaattagtaatcacggtcgtgttcgtctcgtgtcgagaccttgatccacaactcgtttaataatcgtgttagaagggttacaagacactactcgtgtaacccgtttataaatagatcttgtttggaaggcatgaaattctagcaataatcaaaccttatatgagatgagatgaggggtgtcaattcgtaatcacaggtcgagttcgtatcttgtgtagaccttgattcgaacacaactcgcaactcgttgacaagacactaaccgtgtaactcgtttacaaatagatcttgtttgaaaatgaaattctagcaataatcaaatctcatgagatgaggttatgagtagcgaatcatgagctttatcactctatctaacccccaagatggcttgtgaaagtttcacatcatatgcttaacaatgtttttctgtattttgtttcctaagtacttaaaatttacatatgaaaatgctatggatagaatgttagttcattttcatcaaaattagaggacaaatcagtgttcaaattgtttccattcagcttgatttatattacatcttatttgatttggcttctgaaattgaaaatgtggagtgggagagagatcttaagataattttggtgtttgcagagatggagaacaaagatacagggtgccaagtaccaccaggtgctcccaaactttgtgccaataactgtggattctttggaaatgcagcaaccatgaacttttgctctaagtgccacaaagacttcatactgaaacaagaacaatcgaaacttgctgcctcatctattgggagcattgttaatagcagtaccaccatcgacaaaagcagcgagcatcttccaatcgaagtagaactaaaagttggctcaaccaattcaattctcatttcgacacagacaccctgcacttcatctttgaacacaaacaacgaggagaagaacaacaacgcgaaagagagtccaaatagatgcggaacatgcaggaaacgagttggcctaacggggttcagttgcaggtgcggaaatctcttctgtgcatcacatcgttactctaataaacatgattgcgcttatgattaccgaaccgctgctcaggctgctataagaaaagccaatcctattgtcaaagcaaagaagctagacaaaatctgaaaaaggaaggttcattcatgtgctgctcttctttatcttatctataatatcccataaaagctttatattttaagtttgatgtttatcttttttgtgttatagaaatgttgaaagccaactcaattattcataaagctaatatatattaccactttggtttcattatctcatacatgcttggtttaatcacctctttactcttgccaactacagctctgtaccaaatattctcttgaagtgtagttaagcaacatggacccatcttaagccagaccatacccctcatgagaaaatgacatttttgctgcttaactgttccttcccacacagtacactattagttcgaagggtaaataccattttagac

SEQ ID NO: 219701 - DNA, 2518 bp, Cannabis indica
ataccctttcgtgcagtcgctgaaaagagataaagtattgcgtatttttaagttgagttctggacaggatgatcatgcaataatgttgttagatgactatctgaatcaggtaaattatgtacttttcaacctccactttttggttttgccgggttgtctaaagcggcttatatggctgttaaaataacttcaaatacagatagaacgagtcatgaaaagatccgaagataggaagcttgacaaccttgaagtttttcagtggtttaaaacacatgttattgattccaagttggaacctagcattgaacatcaagagcttgtgagtcttttgagatttcaaatctcatctgcttttattatctatttcatccaactgtgtagctctaatttatcaatattaaaccttttttattattattgattgatttatatgtttattttgctggaaaatccgttctttttcacgttcatattaaattataagcttttttcgttatattgtcaactcttctcaaacaaaatttttactataattttgtgtaaagattaaacatttagtgttcagggcatctgaattcatcagaatattaaccttttctttggcagtactttgttctaaccttagtcctcatgatcacacagattttacatgttatagattgcaaatatataacttcttttataatgtagtactaactttagaatttgattcccaatagaattttgttaattctattttaaaattggattttaatttttcaaaatgttgtcttcactgcagcgtacgctcttatcgctcgggggaaaggtgaaggatgagcatatctctgtactaattcacgccggtcttcttgtgagtgagtttgctttcttttcagtatttgttcactcctaaagatggttttacctatttgagtttgatggttttttggttctaataccataaacttttacttgtagactcggcaaattatggatccaaacatgtactggcttgcaattccgaatatcggctcagtgctgaagggcctttctcaggtatcaaattgttttgtttttcaatctacttgctcagatcacagcaattggcttgatttgaagtcctatgattataattatacttttaagttcttagcttgtcttagcttaggcccgaccctagttctggttcatgtgaaatgattgtacttacatttttgcttgttcaggggagaaaagaagttctttctcttcttaaccgtaggcgatacaaagaaatgatgatggttactttagagaagacgcgtcttcgatcatcgccacttgatatgaggtttcatcttcgtgatctgattggttcgggtcacctcaaaactatccagacgccaactggcatagctgttcaagtggcgaaacactgaaaaaagcttagctcgacacaaattcatcgatacattaatgtgagctcgtttttcatctttcgatccttaatacgataaacatcgattgtttattaaagagattttaccaatttatgactaactaagtgaaaatagagatatcaactaaaaattagaagtataaaaagataaaattaatgaagttagaggtaaactaaaattagaaagctgtcattatgttctttctggtttaagttattgatgaatttttcatctattggttagataaaagagtttgtaaatttcaacaattataaattcattattcagattattgagaaaatctcattcaaattcaaagataagtttttatttttatttttatactaattttgccaaatatttaagtaaattgttatgtataatatgagtgtggacaaataaaaatgtaaggggttaacccgaaactcgatattcaaatactaaaatgaaaataaaaattttaaatattttttggatgggtggatattttttttttttgtttttcaaatttgaacccgaaactcgaaaaaatcgacacaccatttgtgttcatccatataggttcattatttcttgcatgggaatttccattttcatgattgaatctttttttatttttttttgtcagaaaaatgaaattgaatcttgatttgatttagtttcttaataacttgaccaacaacaattcttgcaatagtcaaagaaattccaagttttgtgatcaaccatttattttattgaccttagtcaacttctagaactttccaaatataatctacatagaatccttatgtaaagaaaagaagaaagggaaaatattgacaaccaatcaattaaaccaaattgtggtacttcaactacttacttttacaaccaattgacctaaattcgtacatcattacattgactcattgaaaacataatccacaattaatttattaaaaaaattatgtaaatgaaattatatggaacatacattacatgaaatatgaactcaaaaaaaaaaaaactaaactaaaaccgtttaaaaaaataaacaataaaaacttaaactaacacctcaaactaaatagtctaataagccaactggctcacca

SEQ ID NO: 219702 - DNA, 4132 bp, Cannabis indica
ttttttttgtaaaaaagaaaaatcttttcatatgataaagaaaattacagtcaatagtcgactcaccaatgtcaatattctatttttgcaaaaattacagatcgccactctatttcattaaattttattaaatgagaatttagatttaaattttacaaaattttatataatagtactctatgctcaattttaagaaacattttaattattgtaagtctaaaattatgttgttttcacgttttctgtgtgttttttacacgataattttcttagcatctgtaaaaatataataaaagaattcgtaaaaagataaaaactaatccctaagaatgtaaaaaaatataattgtaggtattttgtgtaataatctttatttataaataaaaaggtcatttccatcattttctttgtaagagacggtataattatagattgggcctttggggcagacagcccaaggagttgatcacgtgatcacatcacgtgccaccgccatttcatttctaacaaatataaaccaaaaagcctcagaacccaatctcgtctttctgatctccacactactctctctctctttctctctctcggcactgactgagagaaacccccaaaaccctagaagctacaaaccactcttcgcaaagcactgcatagagagtctcttgtagtatctttcaccatgtggaacagcggccagattgtgccgccgggcacgggaggctcggccattccgccgcctcccgctgcccaaccctcttatacggtcttgccatctccggcagaagctgaggctaagctcgaagagaaagccaggaaatggcagcagcttaattcgaaacgatatagcgataagaggaagtttggattcgtcgagacgcagaaggaggatatgcctcccgagcacgttaggaagatcattaggtgagtgagcttcttttggtcttgtgtctttttctttttgaacttcgattaggttaagaattgaagtagaaatacttagtttagggaaatcattgggtcggcgagctgtctggtcgtttgtttcgtttgaacttcaattagcttacgaaatgaagtagaaatgtcaagttgaggattttgatgggttttgtattttcctcaaattcgaatttttgatgatttctcggtgaaatcgtagtcggaacttcgttggaatagcctaaaatttcatttttaaactatgttgtttgctgtagaatttggttcctccgttttgaaatctttgtcatattttatagtatcaaatttaaagatgaacttgtgtcattcacagagatcatggggacatgtcgtccaaaaaatatcgtcatgataagcgagtatatcttggagcactcaaatttattcctcacgcagtttataagctccttgaaaatatgccaatgccttgggagcaggtatacattctgtataacttaatgttgtacgttcaaagttttggttacgccagtctgctcatggcttgttttaatgaattgtgtgattacaggtcagagatgtgaaagttttgtaccatataactggggcaatcacgtttgtgaatgaaattccatgggttgttgaacccatatatctggctcaggtttggtgtttctttttaattttcttctgtttttcctatgtcgtgttgggtattccgtctacttcactatttgagttaatttttatgttaatcaatcaccaatgcatgtcttgtttacttcttggcagtggggttcaatgtggatcatgatgagaagggagaaaagagaccgtaggcatttcaagagaatgcggtttccaccatttgatgatgaggagcctcctctggattatgcagataatttactggatgtagatcctcttgagccaattcagctagaactagatgaagaagaagattctgctgtatatacttggttttacgaccataggcctcttgttaaaacaaaactcataaatggtcctagctataggaagtggcatctttctcttccaatcatggcaactcttcatcggcttgcaggacaactactttcagatctaattgaccgcaattatttctacttgtttgacatggagtctttcttcacagccaaagcattgaatatgtgcatacctggttagtgttcagatttttcttattattgaaatatatttggtttaggccctggaaattctggataattgtggctagttttttaacattattggtttgcacttattcaggtggcccaaaatttgagcccttgtaccgtgatatggaaaaaggtgatgaagactggaatgagttcaatgacattaacaaactcattatccggtcacctctcaggacagagtacagaattgcattccctcacctatataacaacaggcccaggaaggtaaagcttggggtttatcacactcccatggttatgtacataaaaactgaggatcctgatttacctgcattttactatgatcctttgatacacccaatacccagcactaacaagcgagaaaagaaagtgtacgatgatgaggatgaagatgatcttattttgccagaaggggtggagcccttactgaaagatactcagctttatactgacaccacagctgcaggcgtttcccttctttttgctccacgaccttttaacatgagatctggtaggactcgtcgggcagaagatatacctcttgtatcagagtggtataaagagcattggtaagaagagtttctttttattttttttcccttttcaatgcatttgtctgaagttagtctgatcgtattcactctaaatgtatttgcatttcagccccccatcatatccagttaaagtacgggtcagttaccaaaagttgttaaaatgttttgtgttgaatgagttgcatcatagaccacccaaggcccaaaagaagaagcatttgtttcgttctctgcaagctacaaagtttttccaaaccaccgaacttgactgggctgaagcaggtcttcaagtttgtaagcaagggtataacatgctgaatcttttgatacacaggaaaaacttgaactatcttcatcttgattataatttcaatctaaagcctgtcaaaactctgacaaccaaagaacgtaagaagtctcgatttggcaatgctttccatctttgtcgtgaaattctaaggttgacaaagcttgtagttgatgctaatattcagtttcggttgggtaatgttgacgccttccaattggctgatggtctgcagtacacgttttctcatgttggtcagttaactggtatgtaccggtacaagtacaggttgatgcgacaaattagaatgtgcaaagacttaaagcacttaatatactaccggttcaatactgggccagtggggaaagggcctggatgtggattttgggcaccaatgtggagggtgtggctgtttttccttcgtggtatagtacctcttttggaacggtggttagggaatttacttgcacgcaatttgaagggcgtcactcaaagggggtggctaaaactgtaactaagcagcgtgtcgaaagtcattttgatttggagcttcgagctgctgtcatgcatgatgttcttgatgccatgccaggttagtctctcttaaatttattttgattttgacttgcaacagtgttctatggctagttttgtacattgcttttcttttgagttatgtgtttgtgttataaattttattcaatattgacagaggggaataaaacaaaataaagcgagaactatattgcaacatctgagtgaggcttggcgttgttggaaggcaaatattccttggaaggtaataaatttggcttcatttattatatataatgttaatattaataaataagttacatttcttttgtgtgcccttcatatttctaacttacaataacttgtaggttcctggtttgccggttccaatttgagaatatagattcttcgttatgtgaagtcaaaggcagactggtggacaaacgttgctcattacaatcgtgaacgtataagaagaggtgcaacagttgataagacagtctgcagaaagaatctaggaagattgactcgcctttggctaaaggctgagcaggtattaattttcaattaatacagagtggcgtttctactagtgt

SEQ ID NO: 219703 - DNA, 4576 bp, Cannabis indica
tttcataaaataaaaaccgtaattgacccatcggttataaaattgtaaaacccgaccgattttcactaacattttttcagtttagcctgttatatggtccacagtttcaaatatatgctttagtggcaaaatttaacattctgattttgcctgctagattttggaagacaagcctgatttatcgcggtggtcactgaagtataaagcttttggccgtgatattgaattctcgtggcttgctaaaaatatgcaggcaaggatcatatctgcccctccctttctttttcctttataattttctcctggttgtctcgttctgaaattttctttgctatttgttgttattaatataactatggcatgtattactttcttatagcccattccaaatcagaaaatccactggagatctatggagggtcttcctaacaggtagttgtagcatacttcgctctttaatattattttttctcaagcataattgcattgatacaaaggtttatgaactacagcagtagtgtgtaaacaattgggagaacacctttgcaccttttaatagctagggtacagtattgatttatttgatcttagagctaagagtccatttccgttcttgtagtaagatatggaaaataaaaaatgagtactgttgtaaactaattatattgattggccccccaaagagtcctggatttattaaattatcagtaaccatatctttcctgcttttgtatttgtgtgggagttttatgttattgctttatttgcttatctcagttaattagatgctaattgattgttcattttactgtctataattagatgcttaaaatcttgataaactgatttctttcattgcagaggtgctgttcgatttttcccaaaggatccttcatcatgcacagtagaagtaaggctggtttatacaatttccaaaaaaaaattattgttttgtattaataaagtatatgataccgttcttatcatcagtaaggctggtctctttctcttatctcttaatatttccctttcagttgacagtgtcctacgaagtacctcaaattttgactccagtagcatcagtaagcaatattctaactctattttttaatgtgctcaaatatttcttttttgggatttctcaaatggacattataggaggacaatttaccatatgatgaatttgtatgtactcgtggagtttcctgcactaacgcctttttcttgtttttcggtttcaatattattcaggctctgcaaccatttcttgaaagcttacttcaacgcggtttagaacggtttgcaacatttgtgaaaagctatgtgtgaacatatacggaaataataataatttcaaattttctattattcaaatctatatatctctatataagtcattctttagcttttttaatttatctgtagttattaattaattaagaaaaaactatccgtaataataaatcaatataacaatgaaggtttcattttttttttttttatagtaataggattagaattttagaactcgatttcatgttcaaatatgattagatattgttgacgcgaactaataaaatcgcaaaacattagatggacaccaggaatttatagaagttcaaccccatatcgcgatggtaatggggttacgtctttgattagatacgacacaccagagttatgttctcaagagtgtgcggctaaaagtacatcaaaagatttctagatgaaatcttaatcgagatttatgaatgtaaggctcatgggagacttgattttcataaatttgatctaaattaaaagttgtaaagtttttgggaacaataaaccaataattcgtggaaaaaggtgtgtatcaatggtgttttgaggtctggtgttgcctgagtatggtggactcaatgaaccagatgaaggaagcaatgtggtgttcttggttgcctttaagtgattttctaggagaaggtttcagagtagaagatccaaaagagagaaaaaggtctcaaaaagaagaagggaaagagaagatccttttcttagcctcctacttgatgtatatataggctagagagtttgttagtcatccctcatacatcgggatatctcattaacaaaatctcgtctaccactcttttttatgaataaaatattacaggaaatatcaataacaatctccttctatctaggtaaatattccacaaatatttaacaattagtaattttcggttgaggatgcataaatttgaaatggagtgctgaacacatgcgttttggactgccagtgctcgcgcacaacgccacataggctatggcggtgtgccccaccaaccctcgcttagctgcatttcccaattcttgagtaaaatgcacaagctttccttgtaagctaattttggacctgataacttcaaaattgagtcatagctgtcatacacactttgatccgtctcaaaattatctttcccacgcaaattgaaccaagagagttatgcctattttactgaaggcaatttatgttgtcttgtaccagttgcgagcactgccatgcccaagtggcagaggttggctatgcatgttctcggatctcttgggatgtgttttgacttgttttttgatggtgggtcatattttggaggtctcgagaccctaaaacctcatttcgacgtacgaaaccctaaaaggtgaccactgccactagttggggtcggataatggcacaggtcacccatggcttgtgggaagccatgggtggtgtctctcacttgtatttgatgttgaaaatataatttggtccataaattcctcttccgttgtcgtagtaaccgacctgtgccacgtttattatggcagtggtctccaatttcggagggcacaaccatcctcttatggcacaggtcacctatggcgactcttagaccgaaaatgatttttctcacttgtgtcttactccttgatgtcgagggaacctgttcggacaattttcctcccatagtttgcgaagagtgacctgtgcattctcttatggcacaggtcacctaaggtgactcctagaccggaaatgaattttctcacttgttctgtgctccttgatgtcgagggaacccgttcgaacacatttccctccatggttcgcgaggagtgacatgcgccattctactatggcacaggtcaccaaaggtgactcttaggtcggaaatgacttttctcacttgtcccttgctctttgatgttgagggaacccgttcgaacaaattttcttccatgatttgcgaggagtgacctatgccattctactatggcacaggtctccaaaactggagagcactgtcatttccttgtggcagtggtcacttatttctcttttcctgtggttttagtgttattttaactttatacataaatccaagtcattttcatgcctaaagaagtcaagtccttattggtttccttggcggattgaggtctctagggtgaaaacgcttgcacgggcccatgaaccctagtttgggtacacttacgtgtgtgagttccagtgccaaatggttggttgacgctttcgagccctctagaagtgccattggccctgaaaaagattgatttatttgacatttatgagtcttggtcaaagttgcaaggttgactttttcgatttttagaaattgggtataacatttgaccccaaaagtgtttgtcgagaacttcaggaaagacttttgttattatacccttcttgacttgaaaataataagcgttttgtcttttgctttttgttgtctcttggagtactgattgagttgtcgtcgtagcgagtcgattgtgtcttcttgccaatttctctgaaacttgtggaattcaaactttactaggtgaaaagaaatttaatttgtctaaagacgataaatttctattttttttcttcacataatcaaaggtttaaatcacaaattttaccaacacataacaagtgtcacaaggagagaagtgtcaataatacttaaagataaaaacatgtgccatttagaccaagggcatttttcgaaacccttggccaaaaatatgacactaccataaggccttttatttataaatgccactcttccctcttatttcccaaaatatttcatcacttttttaaattttcactcaccaatattcaagaacaccatttcaccactcatctctcaaggggtcggctagggattctcaagtactaatcaaggtaatttttttttcttttcattctctctcatccccattcatcttcttttcctctcttttattaaattagaaactcacaaaatcctaattttccttggtgtggctgtggcactagttaggtgaagagagaagggatttttcaaattttcttcaaggctccttggaaattcaagtaattctttgaagtaatttccaattcttcatgctttcttggtagtttacaattgattttttaccaaaattacatggatgagatcagtgacgaagccagaaatttggctcagtgagggcttgaaataaatattaaagtcaaaactaataaaaaataactgataaaatgtatactttttcaaaattt

SEQ ID NO: 219704 - DNA, 3589 bp, Cannabis indica
aaagagagatcatcgctatggctgccataagggctgaggtgcaggatttttctatggccgaggaggcgggccgaaacatgccccccaaagcctcatgaagtttctttcttggaattgccgaggacttggaagtccggcggcaaagagagctcttcgagctctggttactagggaagatccggatgtgttgttcttgatagaaactaagttaagtggctcgcagatgaatggggtttggagaagtttaggttttggaggagcctcggtggaggcggcgataggctcagcaggtgggacttgcgtttgttggaaatttggggtggatattcaaatttcctcggttgagtcaggggttactaaagcttgtttttctaatgttctgaatggtccggtttggtattgcttctttatctatggtccgccttttaggagtgctagaaaggccttttgggaagcgagaaccttggatatcctggctcttaatcatccttggctcctgatgggtgatctgaacactatcctgaatcagcatgagaagtttgggggtagagatgtggatgaaacagatagcaaagacctgaatgatcttcttgatgccactggtggggtggacttgggctgtgtgggaaatcagttcacttggactaatggaaggggattcaaagacttaatcaaggagagacttgatagagctatatgtgacccggattggattatgttgtatccgaaggcgggtgttcgtaccctggctataaaagattctgatcacgctcctatggccatagatcttctaatggatagggagagttttcatactcctttcagatatttggatgcgtggaaccgggatgaagggtgcaaagaagtcattaaacaagcctgggcaattgaagtcaggggggccagaagtttccagcttgtgactcgtctgaacaatactcggagatgcttggcaaagtggaacaaaacccattttgggttgtgtaaagagaaactgaaggcccttaatagtcttttgctagaagttcaatgtcgggtgccttctgtgagtaatctgcagctggaggcggatattcggcttgagattgatgaagtggaagctcgtcaagcggagatttggaagcaaaagtctagagaactgtggtatcgtgatggggatcgaaatactaaattctttcatgcagccacggtgattaagcgaaaacgaaacttcattaatgctgtccgggttagtgagaatgagtggatagaaggaagactgtcaattggagactattttaggacaaatttcatgtcgattttgtcctcgacgtcgcctccggaacctcagctccatgccctggtctctaatttgatctcggaagaagctaaccatattcttgtgaaaatcccgtctgcggatgagataaaggaagtggtgtgggccatgcctcctcttaaggctccggggcccgatggaatgcctggtaaatttttcaaagaccattgggagacggtgggtagtgatgtgtctgctatggtgcaacagttctttgagacgggggagttcgtgaaagagattaatcagacttttattgtgctcattccgaaaaaacctggggctaactcctttgacgaatttcgccctattagtctttgtaacttcacctataagataatctcgaagattctggctaatcggttgagacccctcctccacgaaatcatctctccttaccaatctgcctttgtgccgggaagatggattgctgagaacagtattatggctcacgaggtcctggattccttcaaaaagcttaagggtcgcgagggttatgtgggtcttaagatggacatgtctaaggcctatgatagaattgagtggtgtttcttggaaaagactttgaagtcctttgggtttgctaccaagttcattcaactggtgatgaaatgtgtctgttcagtctccttctcgattctgctcaatggtggccccctgaaacagtttagccctgggagaggccttcgtcaaggtgatccgatctctccctacctttttattctgtgtaacgaggtgctctcccgccttcttgtgcaaaaggaagcggaaggggcgatctctgggtttaaggtcagtcgctcaagtccgtctatttctcatctgatgtttgctgatgatctttttatattctgcaaagctgaccgggctgaggtggaaactgttatggattgtgttaatttgtatggtacgtggtctggacaacgtttgaatgctcagaagtctgcttatatttgttctggtaatgttctggcaaacactcaagctgaattggctcagtatctggggtttcggaagttaaataaggaggatcggtttcttggaaacccgattatttggtcaaatagcaaagtcaaggatttgaagtttattaaggagaagatttgctctaggattgaggggtggcggtgtaaacttctttcccaagcgggtcggtcgaccttgattcgggcggtggcccaaagctccccagtttattccatggcaactttccttattcctaaaactctttgtaccgaaatggatcaagcggttcgtaagttttggtggacgggctccgcggacaaggatagatttttagcgctcattgattggaactctctatgcttgcctcttgataggggtgggctaaacttcaaaaagtttgaggacattaaccttgccctcttgtccaaacttgggtggaagcttgcttcggatgaggactccttatggtgtaaaattttcaaagctaagtattggggtaatggggacaagtccttttggtcggcgaaagtttctaatcaggcctccttcggtgctaaagggattatggctacgagggagctgattaggaaagaaacctgttggttaatagcgaatgggagtagggcggatgtgtggaattctccgtggatcccttggcttgattggagtatgtttagagctgcctttaatccattaatagagcaaaattcagtcatggtatcgacgttgattggggcggacggtgagtggagaacgagctctatcaatcgctggtttgtccctagtgttgctagttctctgaatcttattaagcggctgcccagctctagagaagatctgttggtttggaaagatgccactaatggattgtttactccgagtgttgcttataagtcgattatcaagcatcgctggggtgagccggatttgttttggaaccgaatttggaagctcaagatcacagagaggttaaaattgtttctctggaaactttgcaaagatatcctcccttttgggagccgaatagggaggatctttggtaataatagcagctgcgttatttgtggcgcatcggaagattcagctctacaccttttctggaactgccctcttgccaagacagtgtggtttgctagccgctggtccattagaagtgagaaccttcactttgattccccgagaaagatggttgaatggattttatctcctgatttcatgagtgatgcggatgtaggagatatcagagagttcagtagatttgggatttgcttgtttgatgagttgtggactgctaggaatcgagct

SEQ ID NO: 219705 - DNA, 2344 bp, Cannabis indica
aaaagaaaatttttagatattcggattcggtatgctactttatcaaacagaataatggtggagattctaaaactgaaagctatataaatgcatttcccaaaagtttcactgtccttcagaattcacctctgaagacttctctcaagtgttttgctaaagagacataatatatgctcatgttgtgctcaagaagttagcctaaaaaaattatgatgttgctatttgatttcaagaggatccgagttccattagttaggctctgatcacacatggttttacatttcttatttggcatgactatttgaagttttgaactgtcatctgcttccttctgacagtataagacattggaggccatggttcgtgaagtaaaaatagattcaacaagttcaacatctacagttccaacattgaacaaagcagagaaaagctcagtaagaacaaggggctcaagctcaccattcaaatgcatttctagcatcgttcaacaaatgagtgtggagagggatcaggaattgtcatcagccaggttccgtattgaggagctagaggcaattgctgctagtcggcagaaagaggtaacgaagctgtcattgtaaaatacatttcttctctacaagtcttttacacataatcaaatacataaatgcactgcataattggacatgtgtatgagtattcatggttcagaataaccattactagaagaaaaatacttactccgtcgcactgaatcaggtgtgtatgctgaatactagactcgccgcagcagaaagcatgacacatgatgtgattcgtgatttgcttggtgtgaaattggacatgaataactttgcagtaagtttaagacttgaaactctcaaagatagacatcaacaactgcatctctcacttgtttgcattttggttttaaaatattctagaatttgatggaccattaccaaattaagaagcttgtggaggatgtccatcagcaaaccgaagactttcaggaaaaggaggaagaactagcccgcttaaggaagcaaattaaagatttaaatgacgaaagagaaaggtgagttccattccatcaatttactagccattttaagatgatttctacaaatatatttctcaatagggtgttccacatatagtgagctccacttatcacccatatctcatcattcttaacaaagtattagagtcaagtagttttagcaagcaacttcaattgaaatcagcctacctagtgcaaagtcaattaaaatccaatagtagtgatctaatctaagaaagactcacgacttcaattattggtgaagaaaaatagccttgagtagtaagaacatgaatgactttactcatcactaaaaaaaaaactcttcaacatatttcacttctcgttttatctacgttatatctacgttaatactgataggttttaagttttgatcagggacctccttgttatttatttaattttggttataagccaccaaatttgttaatcatacaaaaaaaaaaatgaagaatgtaattggtgagctacatatttaattcctttatcaactagattgctcctctaggttggtgaaaaagtcaccttcacagttattgaaacttgtgataatgtgtaatgatgactgagtagttgattcatttacatggtaaatgcatgtcgacattgtcagtagcaaaggaatgagtccttaagcaacaacttcttgtgtttcaactactcaaacgaagctattgtcttgtgttagaatttcatcaatgagaaataatattttcaagtaacacaaacaaagcaatgttcttttcattgtagctgcatactggaaatgaatatgaaggaagacaatttacttaatgcccaaataactgctgaacaactacaagaacgacagagctttctttctaagcagaatgagatgctgaaggtatgtactgaatatgcttttgaataaaaaaatattgggtctgatcttatctgcaaatgtttttatctatagagggacaaggccaaactgaaggaaaagattacagaactggatgaaatggtgaagacacttcttggaacaaaatctaaacaagagccaactcactctcaccaaacttcattgaccaaggtatggcttatagggcgttatgctttgatatgttgaacatatataaacacttaatttacagtgttttttgagattcaactaatggggtctgtttggtagcagaagaaattgaaatcggttgttgatgatggtggtgattttagcaagaggcttgaacagtctgagaagcttcttcgtcgcgtaaatggtgaacttgctcagtactataaatctcatggcgaaggaac

SEQ ID NO: 219706 - DNA, 3096 bp, Cannabis indica
cccagccatgcaacccatctgcttctccatatgtttctcaagctgctgatcccgaaccatccccgtcgtcatcttaaacaagaacaaaaacaaattcactcaactttctcggtatccaaacaatcctctaccaccactcaccgtctcaccacatctcaaaacaacaacctttttactcactctctgtcgcccacagtcgctctacctttactagttactaccacttttacagcgtctcccgtttttctggtcttttaaagtgtgggcggactatggtcttattgaattacctttttacccttaagcttttcttattattccaaacgacttggcggttttactgaaaatttggcaaaaaacttgggtcctcgaagtaatggcgggctttgaaatcggagacccttttattaaaatatattttttttttaattaaaattagattaataaaaaagtgaaagaaggacccgcatgagtgagcctccgtgggtgatacaaactcatggggtctgctgtacaaggactacgctttgaccctgttactccccaaaccccgtcccaccacttactactgttctggatcgttagatctgaacgggagagatgaacggtaatcacgaggaggaggacacacagagagaatggagaagtggtaaggtaaggtgtacacgtgagaacctaacgttttaattattattatttctttttttttctctgaaattgaataacgttttaattctttaatctcaatatcctgataaaacaatttttcttattatttttcgttttaattattagtttattacagaaaaaaaaactcagtgggtgggacccttagctgctgccacgcacgtagtgattctgtagtttcttccacgtggcaatccggatggcgactctagttttatttgagaaaataaaattgagtttttgggatttttgccacgtgtaatgtttctttcgttctgatgatatatactcaaatggttggatttaactcctgttattatttcgaattaattcaaatgtgataaaatatgcaacttgattacgtaaggatatatgattgtcttggtgtttgttgggtgtgtaactaaattttcgtatcaattaaaaatggagaagatcatggtatataatattttaggaaggtgcacacaaataaatttaagaggatttatacatcataccggagatggtgtcccaccatatatttttgtgattatgaaatgttaaaagctacaaaaagtttagtcaaccgcttgaatattacggtattatgatagctagatatgtatgtgtacaaacaaataacgttttttattatgggcttccaatatttttagtagggctgtaaaaaaatttcttaactcctccaaacttaacagaaaaaatttataaaaattacaaattaaaataacttaaaaaaaattataaaccactcaatttataatttatttatcgggggtgttgaaataagtctaatctactcaaataaacagaatgattcgatcaatctgactttgaattttttattttttttacttttaagtttttattatgtataacataaattgattaaatatataataatataaaattatatacttacgtattaattttaaagttatatatattgtgttgtgctttggttaaatctaatatttttaatttatttttttttaatttttattgactttgacttttgaacctaaacaaaaaaatttagctggtttgggcgggttaacccaatcatactgcccaaactgttattcggtttacagatttttttatttttttttaaatttgacaggttgcacttaaattttagcaacttgaattgtaaattgggttaaaaaatatgtaggataaaccgcccaaaccgactgatgtaccatcctaatttttagtatcagattgaatacattcgagtaataacggcaaggtataattgattttctaaaaaatagatctgtagatttctttgcttacggttttagcaattctatctaggattgtgtatatattcacgcatactatataatacataagactacttgctatataggtaaatttatatatccgttcaacaatttttaagtaaccagaggatctcggtttcattaaaattacatagatccaaggtttacgagagaaaatagcaagaaaatgtgattaagtacagtctacatcttactttgcttgagaatttgcaccataaaatttctaaacctagaataaccttatccaagataatgatataatccatagatattgctgattattttaaataaatttcaatatattggcaataaaatcctaactttgagagtaaccgcgcggaacagagattatctagttattcgagttgtgaaacatgcatgtgtaagttaattaccccaatctctaagtctattaataaatattcaaacttcgaggttattaatattaattactaatgatgatagtcatatattaatgtaatggggtctctacgttatgttagatataagctgtaagaaagtttcgagaatatatggtcttgtagtaaaagtctaaagggttttgggcttaaattttagagaaatgctaaaggtaaggctggctaccattttcttaggtgttaatattgttattggtctaactaaatattaggtctcatataattcaatataataatttttagggagtatcgttagtatttcgcaacgctaggtaccactggtgcctaatagcaatgctaatttaaaagtattgctattaggcaccagtagtgcctagcactttctcgacatgtcgcgttgcaattagctagttcaatagcgatattgacacataggaggatgctaggcactactgataccttttagcatttctctaaatttaaactatatgtaacccgacacttaattagaccaatagtgatattgatagatagaaagatactataggcaccattaatatcttttagcatttctctaaatttaattataatcaatttatttgttgttcatatatcttcctctcgagtcttcactacaattattcattagttaatgcatatataattattgacatgcatataataaattcatttgc

SEQ ID NO: 219707 - DNA, 3618 bp, Cannabis indica
agagaaagagagagagaggggagagagtacgactttcagacttagagctatttcgaggctaagtgacttaggtttctaggctagggttaaggcctttatataggacacctaaagcctagattacaagtttaaatcctaattatttacatagtatgctagatattacaaaagactaaagtgcccttgaatttagatattattcagccattctgttgggcttttagggcccaattcgtagcccatatctgttttccatgtgcaaaactttccagcaaagcatgtagtgcactccttttgctggtcaggcccctgtgatggccaccttggccagcgatggtactgtcccaaggctggccggcaagctcctaagagggagctggtctatcgcttgatctctatttgagtgttggggtgtttgtttgctcatgtcttgacttggccttccttttagtgagccgtacttccatatggtactggttctgtccacgtaagcatgccatgtcatgagaacaaaatttggaataacactttgaaatcgacctttaatgcctcgtgcagccattgcccccaggcctgagtgccttgcctacactagtcatgtagtcagtgtaccttctaggttgaattgccttgctcttgctctcgcttcttctctggctcttgatgttctccaaatcttgagagatctggggagatatgcttgtaaatttaaccatgaaggttgtgagagcttggccttttatggccaagctaggttgataagtcaccttatattggccgagcttgatggcccatttgagtggtcggctaggtgctttaggtttttgtgacacctatcgccatggctaggagcttgatgtcaaacaacacttggggaagtatgatgccctatgtttactcaacatcgatctaccctcttatttgggcttatcagacaacttcttttaactttaagaagcctgttcgctcaaggaattccttcatgttactcagagatccttctgatatctttctaaaattcactcaacagcaagatgcctccaagtatggtcgtatatcgacctttttctgtttggcctttgaccttgatgacctcgaccatgaacttttgaaagtaatctttcaaaggctcatcttgtctttgctttacttcgataagatcttccagttgtgaagatatttgttttgaggcatagaactgagcatagaattcttgagaattcttgagagaattcatcccaagagttgaacttgcctggggctagcttaaaataacatttttgggctattttagccatagttgctagaaagatttggcattgcacatctccaactactttttagatatcgattatcatctcaaagtattttatatgtgctaggggatcttctttccctatgcacatcttccaagttgggatcttgaactttggaaggggaagtgcattaatgaatgttgtaaatggtgatccccttgtcttttgatgatctaggtcagacaactttggaccaaacagatctttgatcatgtctttgaattgatctagctctgcttgcacagatgggtccactctaatgtcttcatatctttgagaggtatgtttggttggccaactcttcgctgaaaaaggagccttggccggttagccctggatgatcattggcccatggctgctagcctctggctggacaataagtcttggccagccagccttttgttaattaatgggcaatggctggccagcctttggctagttttacttccttggctggccagaccaatgagattttcctagtcggccaagccagtctacgagttgatgggaggttgatcatcccaacttcttgagtttgtttgatccaccagccttaaactattattctgtggttgaaaaaagttgttttagttctcgctccttgagttattgttgtctggattgttgttggttatcctaggactttgtctgtcaagaacaaggtctctacgccttggaacaacttgttcttggatatcctaggagagaagatcataatgggggccagccagagcctgaccagcatgtaacactccttctctgaggttgctttatcatcttctaatgtcacctggtggcaggaactggctgcttgtgccatccgttctatttggctgtacttgaccgtcatgaggcaagaaaggttctatcctcgtgttcaaggaatttggttggactgtttatcaattgtctaaatacatgtagaccctgcctgttctgtatatgagcctcccttataaaggatcttttatcaagtcctaacctcttctagcagttctctcattgaactgccttatcattacggcagtttaattctgcatggcaggcatagagaatgtactcctggtcatcaatccactttaggtattcatgtctctactgagaaaaagcatcacaaccagcaacacatcattcttttcgtcctcataggaattcacgtctctgttgggaaaaagcatcgcaactagaagcacgtgtttcttctgcgtaacattgtggaatacccatagttgtgttctatggaggttgttccatgttgaccagctcttctatgtgagatcttgtcgactcccagccttggagcaatggcgtgatcaataggattcacatgattggccagattgatggtgttatctagattggtaggtccctctatggtgggatgaacattagcatttagatttactatcatggcatcctgaggaggattcgagggggattttgcttaattagctatcattttttttttagataaatgcaacataaattcttggatttttcaaattttttcaaatatttaaactttctttaattatttttaacaaacagaaatattttattaaatttcagttatttctattttttaaattatgtttttttttaatttaataaatatctaaaattcttaacaatgtttaaaataatctatatatctatatatccatataaaagagaaacatagggtggtgacatggcaccttctatgagttctgttctaatttatcttccttcttaatttttacaatttttatctacttttttaaatttattcatttcactcaaattaattagagaaaggctctcaattaaagcaccgaactattgactcagaattcggtcaaccaatagcagagttgtatttatgatagacaatcacctcatataaataagaacaataaatgataaaagtaacatggagatttatagagatttagcccccttgtttagcggataatgacatactcctcttttagttgtattgattctagagataataccatgtagatcataggtgagaaccttatgattctagctatggctctctttgaatagtacaatagtgagaacaatgctaggcagaccaagaactgatgagttcttatgaaggattaaagaagagaagacttagtgtctaggaggcatagatgagatatgagacatgagagagggagtgagagaggagcacgtgtatgaggcttaagaaaggcttttcaggaaatggaatgacttaaaaggacttagcccaacttaggatgacttaggttttgagagagataaggcctttatatagtgcagggcttac

SEQ ID NO: 219708 - DNA, 4137 bp, Cannabis indica
aaaagttttagattttaaaaatcttctaggcaaattagagaaaacttagctggcaaggcatgtaacaagggaacaggacaagctggaggtctaaatttgaaggtaccaaagacatacagtactatacattaaaaacaaagtagaagttatcattggtattatcagttttggaacttctgtcagtacagttatttggaccgtatacaatattatatacatgcataatttattgtattcagtttttgtcaaactctctgcataatacaacatcatatggatccaaaaatacatttttaaaacagcagggtttttcttgaattatttgggtttaaaaacagttattatgtctttacttgcatccacttgcaggtttactgatgaaacccaaccaggcttaaaggatagcaaagatgcagcaaagaggctaatagatttgggtctagtatttacccctgtagaagatgctgtaagggacacagtggcgagcctacaaactaagggcttattatgtacagtaaacaccacaatctcttagttgagttttgctgtgcctttccctcttatgctttctttagacttattagttggcagtaataatgagtgttaataaagttatggctataattattgaattttcaccctttatatttctttctttgttcttaaagttactttatacttttgattcctttttattatttttctttaaatggtagcatttagcatcctaaatactacacacactacatgtcattcattatctagtattacaaggtcatgtattgatggataatttatgttggccatttccatgcattaatgtaaaccacgtgttcgtatgaaaccaaacgattatgttacttttcacctgtgcacacattaccactaacatgattttcttgtattgtatcattatcagtttgttgagcaaatttctttactatctataactactacacatgtatattcgttaagcatgtgaactttacacagaaaggctccaaaattaatgagtactaaacaaataggctaatttggtttgtgctttaaaaatacgaaattgatgcctaaagacaaatagaaatggtgaataagtattccgaactgcctttacagaattaggtccaccgccctttaaaagcaatgaaatttagacacacttggccatcttggggtgttttctagtggccaagcctaatgacttcttctaagcacgtgatttggggtccttcttgtgagcttgtttgggtagacctcttttgtccactcgaaaacaatggcaggataaaagaaatttttgactcatgttaatatcattagttacacaacattattatgattgatctaattcatagtatattaatcatgcagtcataaaccaacaataacgacaacttattatatcagaatttatattcagtaaaaaaaaaatcaaaaatcgatgtgaagaatctaaatttagttgtttcttttttaataccctttaaaaaattacaatattttggcacttacgatcatttgttacctaacatgttactctttggtatttttcatccatgaatgtagaaatcattaagaaaagaaaaagacattccaaagttacttaaagctctctcttgaactttttcttttggtttggcttttgtttttagtccttatctcatatctctctctctccctcttaaacttttatttttattttttctttgtatttctgaaaatctccaaacactccatgtgctccaccttccatacctcttgttcttgttgccctttggctccaaaagaatctatcttttcctatgagagagagaggagagagacaggcagacgtgcagttccaatcatgtaggttcttctgccactgcatgtgcatcaatggcttcggcccacttcatattattctacacttcttcctcagcttctctttgaactagtctcttttaacatctttatatatcatatattatatatattgtcctgtatatatatatatgtacacaaaacaaatacacaaatataatacactctttatcccaatcccgatcatcacctgtatctaaaaagtacggacatccgaaactaagaacactgttaccagatgccacaaaagatgagcagtagtaccgtaacaccttgcagccgatcatggtgagtagagtagtaattaaataatgaaactctgtctatacagtcgtatgcatatctttgtgaattgggttctgattataatttttgtttttatggtttgggaaaaaggtccataagtgaggactcgttgaaaagatacgttcactttgcgagtgagagctgcatacaagagctgctttctgcttccgactcgaacagggttgttgggatcaatggcgccactggcagcgatggatggaaggttcttacggtcgagaatggagttgagatatctaagcgacggtctggatctcttcatgcctttcgcagccgttggctgcttaaatctctttcacctcagcagttcatcactgttgcaaacgccattgatgctgcaaaggtgaaattttttgttctatgattattggtcatatcaactatatatgcatgcatgagagcatattaattttgatctaaaaggtctttcatttctgttgatcccctggcaagttggaacaacaagactttccaactgaaacaactagtttacttatgctagctagctactttggaaaacatcacaaaataagaaagctgtctactagttgttatttagtctttgattattcttaggctgtcttgcttgaaaaagacaatttatttttaacttttgtggtttcgtggaaggaatccggcaagtttgtggttctgggtagtagtacttccattattattatttatttatttttatttcatttttgttgttttctctattgaaacctgcagcaatgggactctgacttggtagaagccaagtacattaaggacctggaagaaaacttaagcataattcgtctcaggtttggtgatagtgctaagccactgtttagaaacagagaattcattgtgtacgagcgacgtgaaaccatggaagatggcaccgtggtaactaattaacttatttttattcacattaatctctaattaaaacttactttaactaaacactcaacactggtttcttcaaagtcatcttaactggataaaatgcatacataatcttgtacttcatcataatgtaataaaaataacatatttggttttggactagaatgttattacatccatcgtttgaaattacgatagctacatagtatataatatattaatagttttatatatgtgtgtatgtatgtttgtataggtggtggcagttgcgtcgctgccgaaggagatagcggcagggttgcaaccaaagcaaaacaatgcaatcaggggactgttgctgcagtcagggtgggttgtggagcagcttgaaggtgatgactcttgcatggtcacctatgttgtacaggtaaaacaactagctacttgttataatacttgtcattcattattcatttagtatgatccaatttatagcatcatccagttttgttcaatttctattattttgtgctgacttcaaaatttcattatgctatacctagaaagtatttcattattattattattattattattattattatagaaatggaagggaaccttaaaggtccaagcaaaacaagatataaacatattgttattagtgtattttaatattaaatttcatttattttaatttaatgaataatattaaaaattgctaactagttataaattatcatataagtgtagctattaaggagtgttggacagttaaatgtcaaatagcaatgtctaattattagtatagttgagatagattgggaatggccgaactcattattagagtggtttgactcagctcagctcatgactgaggttgaatactactttcatgggataagcatttagtattgaaaagtagtatttttttttcttttatttttattattattaaaaaaaaatgtaggagaatgatttcaagtattattttttaacttttagttacggttactcagttttttatatggatctattctttagtttaaatttaaattccgttaattgctataggaattt

SEQ ID NO: 219709 - DNA, 3419 bp, Cannabis indica
atcaataagatctcgcatccgacttgcaagcactttggagatgatcttatagagaacattacaaagagagattggtctaagatcactcatggcaacaaagttcttcttttttggtatcaaaacaagatgagtgtcatttaggccaacgggcaaagctccgaaaaaaaagaattccttcactaagtgaataacatcggggccaacaacttgccaatgatgctgaaaaaaacctagacccataccgttaggaccgggttgtcaagatgcatagagaacacagcagacttaacttcttcatcacgcatcgattgcaagagtgcatcattgtgatttgcgttgactgaaagttttatattgtcaacaataagctgggaagaggtgtttggcgattggaagagattgagaaaataatcattgataacattatccaggacggttgtccgattcctccaatcaccatttgcatcttgtaattggtgaatttggtttgatcttttcctagcactagcagtggcatgaaaatatttattatttttatcccccgaatgaagccaatgttgttttgatctctgcttccagtacacttcttgttgggcaagaatctcaaaataattggttttttcaagcacagaactttcaacactagcagtagttgtggaattttttcagtttagaaattaactgtttactctttgaaagacgagactttaaattaccagaaatagaacgcccccaaatagcaaactgcttgccacataaatcaagtttgctcataatatgcttgtgctgattagagtgcaatacatcagtaacgatttgagcacaaaggggctctctgatccaagaattttcatatcgaaacagccccatagtagtcccactgaccataattttaggttcaagaaatataggggaatgatcagaagatgaaaaagccaagttagtgagagacacctcattgaacatatccaaccattgttgagtaaccatggctctgtcaagacgaatctccacatttctattagtaccgcgactgcgttcccaagtatactgataaccacgtaactccaaatcgataagatgggagtccattacagctacctgaaaactagaaataagagtagcaggataaggtcttcccctttcttgtcatcgttgctgataaaattgttgaagtcccctatcacacaccacggaagacttgactcagctgccatagaacgaagaaggttccaggtatgatatcgcaggttcctgtttggttctccgtagaagccaaaaagtctccacttagccacgcctggaattctaacttctacatcaatgtggttattagagtaattagtaagatgagtctcatctgatatgcgccaaagcatagataaccctcccttccttccattaacaacaatagaaaaacaacctttgaatcccactcttattttgaaccgctccacaacatctttagtacacaaagtttcactaagaaataaaaacttgggtttcttttgcacacaaatgtaaataaggaattgttgggcccgtgggttcccaagcccacagcaatttcaactgatggtactcatgattcttggtgggcttggaaaccaagacccaccgtatccacggtttttgaatttaccacagaagttgaattgttaagctcattaccaaccttagtttccattatgccatttgtcaaaataataggcccaacatgtgagataccagccatgcgtttcctttttaaataagagatttcaactatctcttcagtggagaatttagctgagttgtcattgaccaatttaacatgatcttttaaggaagtcttttgattcccataagtacgggattggccattaagttttgagattggttgattactctgtggatcacaattatcttttgtcattcccttgaatttcgttgaagcattaacagcaggagatactgatgtagtttgccctgttgtttctgaaccacccttgccggaacgcagccatggaaaggtagtcaagaaactttgtcgcctcgttggagccttcatctctatgctatacggtttcacaatgttctcaatgggagtatcatatattttctcacaatattttttggcatgacccataataccacaaataaaacaaaaagtcgagactctttcatatttgaaatacacgtaaaaagcttcaccacttcagttacgaaatttcattcgtcttttcaatggttaagcaacattgactctaacacgaaccctaagatagtcacgccatacaccttggaaattgttgggatcagaatcaacatattgtccgatataacgagccgcttctcggatagcccattctgttttaaaactagctctcaattcatggatttggacccacatatccaaagtatttatagtaaccaaccttggatattcacctagtttaagcctctcaatgggaagttgtttacgatcgtttgtccaagggcttccatcaatcaccctttcaatatctatctcatggtaaaactgaatgaaaaacctattctgctccaatatcttaataaaaataccttttccaggcttccatagatcaccaataatattttgaaatatctgaaaatcaaaaacttttccaaacatcaaacgacccactatcacctatcatcaaaattcaagcaaaactttatgttcttcttcatcctctaaacatatatctatccattttttcgacaaggaacagtcttctttactagaagaagccaccacagaacacaaaaaaaggaccaacaagaatagacaaaataaccacaacgagcaatcacaataaactctctactgggagggacatatcactctttacaaggagagacagagacttaaatataaaagtcaaattatttataactattaatttataaaaagggtctaattgaatatttaaagtaaaaaatattcttttgctaattgtatagttaattataattaattaatttaaaaaataaattttaacctattagtgacttgttattacaagtaatcatcatagttacaacaaaatgtaacaatgaatcagagtggactataggaaaaaaaaattatttttgggctcttatttaaaaaaatatagtatttttataataaaaaaaaaagaggaaattgtattgtatactcactttactttatatgttttaatttttacctttatttccatattctttaagatatacccacttttatagatgatgtccttattataccccttaagttaatgtaaatcatttggtgcacttaagtggagggtgagggtatattagacaatccactcacaaaagtgagtaaattctaacgaaatataatatgagggtattttcgattgatggatacaaaaaagtattactcaacttatccaaaaaataatgtgtaa

SEQ ID NO: 219710 - DNA, 3455 bp, Cannabis indica
ataaattaatattttttttttgaaagatataaattaatattttgataaggctatttgattttttttcttactgtcgaattgttagcactaccaaaatttgctccgagtggaattattcataatgatgaaatataagaattatgttaaattttatcccatgactgattcattattactacattaatattatatgtgtaatttaaatatataaaaatatttttattaatattaataaaataaactaatttaaattttgattaattattgacaagaaaaaaaaattaaattaatttttttttatttaaattatacatgtgatgttaatgtggtaatgacaaattatcatatttgtttatggttggccacataaatggaataaattttaacataagtattatattttagtgaaatatttgtagtataactactcaaagagttaaatttataaggggcatatataataacctataatttttttaatggtaaaactacagtaagttattaaaattgtaattcagtcattttgaacactaattaaattataatgtccctactgctttataagggtaaaatttggatagttttgccataaatatacttaagtgtataatttagagtgagtaggaaatgtagtgagctcacagcaagggtaataggtccaacgtgagaggtgaggttctgcttaagagggccgccagatcgaaactcgttgctgggtgtaatttgccagaaccctattcctggtttcttgcatatccacccatgcaccttcaaatctctattctcacacgagtactcgtacttgtcatccacctaaattaattaatttattaatttatatattatatctaatcagtgaataataacacaaaaataattaactatatatacacctctcctttgaattctggctctacaggattaacaagaaggacagcctcagggaaagccagctctttgcctctagggggcacccgatcatcaggaagaggcatgtgcctttgcctgttatcacctactgccatatactggaacctattattgaaaacccaataaattccattgtctacgtattagttgcttccaaatttccaataattaaaaaccattaacaaattttactacctctttaagagaggatatcacttttgcccacaattatagctatagtatgcatcttgccgattctttagaaattttgaataattgacagtattaaaatttaataatttgttgtaacgcgtataaaataaaaacaagcacgcgtgctacccatataatttaaattatatacattatcgatattataaattatttagaatttatttttcatataataataaaatatttatttacttgtcctttctgagcttgaaaacaatcctggtctgaggaaggttgaatggaggccattctttcaagtgctcatagatggcatatgcgtaaaagcctgacgaattacccagcattacatacctgatgaattttaattaatatacaactattattattattattattattcatgaaaatatatgtacaatttattttgttaattaattagtaagtatatattaccttatgtctatgtttaaagggacacgttggtctatgagagaggtgttccattttctagtgaatgagatctccaccctttcctcttcttccactataaccttgaagtttgtcccttttatcctgcaataattaatatttaattaacattattaaaacattaatatatatcctaatttgatttacacatgagcaaacaaatattttaaatatatatagggtgtttttataatgcacactcttaaatagaatgtatcgatgcactattaatttgtttcagtatttaaaaaaaaatagtctaatttttttttatagtttaacatgttatagttatttaagatattttgtaaaattttaagaaatttaaaataatttataatataaaaaatattattcaaatagtatatttcacacgagtataaaataaaacagtcatgcatgcaacaaactatttgaattatattttaagtgtgtgttaaattttttggaaggtttcaaagttttattaaattttttaaataactactacctataccactacaataaattgaattaaaaattgttatgaatactaaaataaataaatagaaaggagtaaacgagtataaaagaagagtggttttaagaattttccatatatatttataataacctgtcaaatgtaccggttgttccaatacttccctctttactccacacaaggtcccagtacctgcaaaaaccgaatcaatatatttatttgaccaaattaatcccaaaactaccaattaaacccatcggtccaaactacgtggctgcaccagattagtcaattgttatttggtatatataaaaaaaattagattcaacctttttctttgtttttttttttgtagaaaaataaaaatatttattaataactaaatttaacagagtctattacattgatcagagtagactcaacaataatagattaatcatcatgttgtttacaataattaggtagaaaatccgaataacaacttcaaatactaaacctacaaactgctatagcatgtgaattagcagcatcaaagtgcatgcgaatactattaatttctaactcgaatgaacaggtgcctagctactcaaacatattaatgactattaaccaaaaatctttcaataaaaatgactccaacagatgtagttataatagtggtgttatttaattaggtatattataattattagagccggtgtataataataaaaatataattgtgtaccctctattgtcttcctcgtttataacttcaagtaaattgtcgatgccattatatcgtataccagtaacgattccccctggttttgataatgtcactttaagtatgccgttgtccataacaacctatatattatataatcacgcaaaatgtatgtgtaacgtttaattaatataatattaataattattttcatgctctaatataactaattaaaagaggttattaataggggtgtgcataaatcgatccaatccaatgagaaccgaccgatccaattacaaccgaccgccaaatattggatatccaattgtgatcggatcggattggatgttatttttaaatatccaattggatcggatcggatggtggatggggtgtctaaaaatccaatacatccaacatccaatcgagctaattagtattttcatttagtttggatgagtaattagattttatattgttatacgtcaaatttatatgtatatatgaaaattaacattaaagttttactctttttttcttggattggatggatccagtttgatccaatacatactggatctaaaatattggatggatccaatccgatccaaaaaatattaggtctaaaatattagataaacccaaattaaa

SEQ ID NO: 219711 - DNA, 2887 bp, Cannabis indica
attaatattctttaatatattatgtacatccacacacttgagatctgagtagtaaacgtctacaatctcatccatacaataataatatcacccaccatatatcgcatcaaaattcaaaacttagtaatttatacatactctttccttttcccttttggaaaaagaatctcaaaagtagtaaaatacatgaatcctataataatattacattatattatatataattaacagcctaaacacataactatatctaaatatataattaagcttcaatctgtctaccatgattaggaaatgatttgaccctaaacacatgctcttcaccagtgcatttgtcaactttcacaacccaactatgacttctcttatgtgttttttttccattattaacattattattattgttattattgttattagtactatttgctctaataatttttctattagcttgatcactaccattaatccgagtcaccaataaaccttctccaataggcaacaactgcgttctacaccccacaagactattagattgcgaggaagacccttttctgaaagcgttgtacccaacaaaaacgacgccgtttcgcctctctttattggcgtcgacgagggcagccatttcaacagtctcgagattacaatcgatgagtacaaaatctgcgtctcgatagtgagtcaagagcaagtgttgtgcgtctccaataacaaactccacgtggcaagcatggtctagtccgaggattaattcctcggactgcatcagcccaccattttcttggagaatgcaaatcacgcgtcctccagtttggtgggctgctgccacgagagctagcgcggtggcatcagcagctcccgcgcaggccacaaccattagttgcgcgttgttgcctgctgctagcgccgatatgaactcgacttcgtctggctcattagccttgtgtccctgaaattaaaaaagaaaaattgagattagtcataatatttatcattatcatcatttacaaagaaatataactagaaaaaattagagtgtaatttattgatgaaaaagtaacttaccattttcaaggttttaaggtaggcttttgtggcattctcagctgaccaggaacccatttttgatttcttagcttgagtatagagatgtacgattgttatttgagtttgttgaatctcttggttttgatgggaaataaaatagagaaaagggccttttataggttggacttggagtatccgaccaaaagatgtaacttgtagtttattaatgacatcactactgaccatgttaattaattattataatcagcaaaatcgtataaatatatatcagctgtgatatacgtcagtttttctaaattttatatccaaataattaattgaacttgatttatatacatgtacagtacagattgcaataatcatatataatattttgatatggaaaataaaattattatgtgagcttcgaggagcgagggccagttttcttattattatcttacaaattaatatattgcaactttatatatgtattaattaattattagcacgatattttttagaggctccacacgatttctcaagtcttgtataataattttgcaattgtttgtcctatttgttaaagacaacatcgtagtattaagtgatttttttgtttaattgtattttccaaacgacaaacttaacagttatgcatgttagttgaggagcagccaacacatttgtactactaattagcgttaaagctaatacatatatacacatttatggagatcgaacgttatatatacaaatatattataagagttagtgtagacttcttttacctgttttaaaatctataaatttctagaggtgtatatttataaatttttcgatatttggctttgtgcaatttttttaaatatcacattcagttttatgatttcttaaaagttgttcgttctacttacactatccaagccaaaatgtgaagaaggtatattagagttaatctcacattgttaattaatatgtagaaataataaattgtctatataagataaataaattattcatctcattaccaatttattttaagataaaacactgtaatcttatcttaaattttaacatatatattattaaattgggtatatctcacaatagaaattacataatgtatatgtagaaagttgaatagcaggaaaaataattaaataattaagaagatctattaaaataattaattcttgtggatataccgttccgtactgcaatttaagctgatcagatcaagttgttaaagtatttatatatatttaattagctgtagttgatttaatatttcaatattatttataaaaataatatcaatcaaattaattaatgttgatgcaagtaaacaagatatattaactaattacatgtgtttattaaaatgtttttgaaattgtttacaaagttaaatagctggctccattttgtgaagactgaagttacctatgagaattgtgaggggtcgtgttttgcctccccaaagatgaacatagatctagatgcgatcaaaaaacacattggaaacaaaacgacatgatttataaattcttttgtctcttgttttattaattttcatatatctctcttgcattattataaggtacccattagttatatattacgaacgaaattcaagccaatttggtcaaacttgttaatttgcattgtcatcaatcaaaccccctttaatcactcttcttaattttgttttctttcataattgggtgcattataattcactacttctcatgaaacacacaagaagtttgagacgaaagtacgtatatgtgatgagaattcttttataaaagtaatgagaaatggggaatgtataata

SEQ ID NO: 219712 - DNA, 2529 bp, Cannabis indica
ataaaatatgacctttcatccttggaaaaaaaaaaattgtataagttaaattagagtctcacatcattacgcatttatttcgtaaatctatatggacaaagaatagcaatattcaaaggtcaccaatagttcattttgagacggtgaagaagaaaggcatataagtcaatcatccaatatttcatccatgccctccaagctttcaacgcgataaaaatctctttctagaccagatcatctgtcgtgtggtcttatttctctttaagaaaaactggaaaaatgtcgaaaataaattgactcaaagacgagctgattacatacgcaataccttcctttcaaagatgattacatattgcctttgtgaagtcagtagtagatgaatttccacctaaatcggctgttcggaattttccctcagcaattgtgttgagaatggcatcttggattcgatctgctttatcatggagttccaaatgacggagcatagagacagaacttaacagcaaagcagttgggtttgccagattctggataattttaatatggaagaatgtttagaagcaagtaaaaaccaaatgggtgctacaataaaacatcattaaaggacaccgatgacacagtaacaatgaatatgtctagtaacacagggctcgcttgaaccttcatcacccacttgagaagaatcaaatcaaggaatttcaggcataacgacgtcactctctacaacttatgctctggtttatgcactcaaattaaagaatagctgaaaataggtccaatagaagattaccacagtttccaaatgaaggcttactcaaaccctaacacagttttatttaccgggcttgccctctgcttaaaaaaagcaagcaaaccaaggttagagaccatttgtgtcatgttctaagtattgtgttactggttctacaatatacagatgtagtttactatactatacgattctattaacttgtgtgctggtggtattttctctccagtaccaccatgtgtgtgtagtaaatcaaaatttctctgtttattgcaagactcagcaggacaatacttgagacctaacacaaatggtggtaaaggcctccctcttccaagagcaacagctcctaatccaaattcatacaattcataaagtcctttcaatctctctaacactattttattatactccttgtatccataaagtcttttgcacttcctaaaaccaccaacactcttttatcacaaaataaaacccaccttctaggaaatctttgacactccccattgcgtaaattacttattttatccttttattggatgcctaagataaagttttgatattataagattcagctcatgttctagggaaataactgtgactaaaattttcagaatcagaatgagcctaattgtagttgaatctatgtctacgagtttcagaaaataaagcatatgttactagcatttttaataatgagtacaagtgaaactgagttaacaagaaatatctgcaaatgcatttagcgcagctacgtgtaaggataaattcaagaagattaacctttccagcaatatcaggtgctgaaccatgcacagcttcagctagggcaatacctccctcaccaatattgcagctgctcaaaaacgaattatgtcagataattaaatcagtagtgtcagagatgacgaaaagtaggtagttagttacctgggagttaagcccagtccgccaatcaaacccgcgcagaggtcactaataatgtcaccataaagatttggcatcaccaacacatcaaaaagagcaggattcttcacaagctgcagaagaagacaaagttagtatctttccaattaagttccaagccttaaacgctttcacaggttgatgatttcaatgcacaccgtacatattgtccgtaccatcatgcagcaattgtcaatgacaacttcctcatatcgaatctctggatacttctctgccacttcacggcaacactacaagtgaaaataaaccaatttcagatttcagtacaagaatactaggagcaacagacaataaatcgaccccttgatgaaaagagaagaagagaaagcaaaccttgagaaaaagaccatcagttttctgcataatatttgctttgtgaattgcagataccctctctctcccatgcgccttagcataatgaaaagcgtactcagctaccctaagactcgcctgacgcgtaatgatcttaagactttcaacaacccctctcacgaccttgaaacagcataaacaaattactcaaattgataaaaacgtattcattatagtaaatcacaagcaacgcaaaaattctatgaagaataacttaaagagtatttgtaagtcaccgtgtatttaaaaagtgtgtttaaatggtaactggttattgcatttaatatatctcatcctcatgtatggcaaagcagaaagtataatatttaaaattaatagtatctagtcataattacacaatgtatcaattcccatgaataggagagtatatatatact

SEQ ID NO: 219713 - DNA, 4519 bp, Cannabis indica
ttaaaaatcagcccaagcccaataagacttcttctagggtaagacgtgagtcttcttctccacatgacgagactgccgctgaaacttgaagcaactcaactcaatcaatggattaatttaaatcccttcattgactctattcaccatcttcttcagtgactaagtttccctccgttgtacttctgctataagctcctccgatagtcgtcgtttgtttctctgatggacctctgctattcggcgcgaccacgcctctctctggccgtcggtaatcactccgttcactttccttcgctctaataatcttcaaatgagttcatcatttttgcttggaaactccgaacgatgaactctacaatccatgccagatctgattggcgttacgaacggcgaagtgtcgaccgccgctagtgtcaaatgttggtgttcttcgagcctagaatgtcgtctccgacctcagtactctgcaagctgccatcattgacgcagatcgagccgaaatcatttgcgatctatgtggatcaaacctaatgaaaacttcgctgctatccagaatgtagccgaaaaggattgtcgacactgtccacagctccaatcaggatcagtaaatgattccccactctctctggttcacttgcgccattgatgatgtggttctagatctccacagagaagtagttgactcttgagattaaggatccgacaatgcctccgtggatgtgcagtagttttctgaaacgctaagatgtgtggacgctggttcgacaggattgtcgatgtgatcgtcgacctgtgtagaagttgttttattcatgcggaaggtactctcattgcacattctattttctcatttaatattctaaaaatccttattagttaggaaaaaatttatcaaaattaccttttcacgaattgaaatttataaaataacattttgtttattatgtataggtgatacttaattaaattaaaaaaatttcattaatattaaacaagttttaaaacctcataagacaaaaacaaaaaaaaataataaaataaaatagaaattaaaaccatagaagaacgattctttttctacccttctttgttctttttgctggtaagacaaaaaagataaactattttaccatttttcataacggttacaagtgaataattctttttttttcttcttcttcatttttctttaatatcaatattcttcatgaattgtcgcaagtggtgccgcaagtggtggcactgtagataaatgaatttggcaatcatttcactaaggataaactttaaataatttcctcatatttcctcattctttcttttttttaatctttttcacttgtagctattaatttttttcttctcacaatctcttatttacaacaactaatcatttaaaattataatggaatcaacaagtgatatatcaaccacaataccaccatttaatgaacacgaacaagtaacatatttatttaattacagtcttttacattataattctaatttttttaattttgtagataaaagaccttgaatttgttctgaatgataaatgatcttaaatttacactaggcgatcatcacgatcttttatgttcaaccaattttaaaaaacttgaatttgctctgaacgaccataaacaactttgaatttattttatgcaactatcacaggtttttatggacttcaaaacttgaatgagctctgttcgatcataaacgactttgaatttacactatgcgactatcgtgattttttatgttctcaaaccgattttagagaactttaatttgctttaaacgatcataaacaatcttgaatttacactatgaccatcatggtcttttatgttctttaatcaattttaaaaaatttgaatttcctttaaacgatcataaacgaccactaaggtcgcacatggttccacagtctaattttgattcttttttaaattatgtgtgacgaccttaaaggtcacatatgattgcatagtctattttattccatgtgcgaccctgttcaattagtcaaatttgtaattcttttaataatttttatatttatattcttatcgtttatatctatttgtccattttatacattattattgtagatacccaaaactatattaacaatagaacttttaagtatacctcgtgctaattactactaatacagttttaaaatttaaagttaccatcaaattcccactatgtgtaataggctaaataaagaattgttttcagaaagtttgatcatactatttttaaatattactcccaattgggttgtctcttggacttcgacactaaagggtttttttttttggcacattagtaagccagatagttttgaggagggtaaattgtcaaaagaggtatgagttgtggtttttgattaatggaaaatctgtgaagttttctctctaagagtttgcaatagtatctggattgtatactaatagtggcccaacacttaaagaaatggaccttgtttcttctatgaacaagttaaagaaaaaatacttcaagaacacgatgtctattaaaataaaagatgttgtcagtactctagataacaaatctagagaagtaaggattagggatagagtgaagttgtgcttaatctatttgctcaatgtatttctaatactgtcaagtccttcgataatagatcttgaatggctataattagtggacaatctaccaatatttgacaattattctgaaggaaagttgacatatgagaaagttatagagcatatcacaaaaaaagatatgaagagtaatcctgatattaagtgaaacatctttagttgtccttggatatttctggtaagaaatttgattatgattatattttattcagtttatttatttttaaatattttttttattatattttgagttataattttgatatgattttttcttttatagatataaatttgtgaaacaatgctaaagttagtgaaatggtaggagaaataattctaggaaaccatattccattgtttggttggaaaaattaaaaataaagataaaagtatcacaattacaagattatcaaaagtattagaaaataatattaaagtatttattcacatgaaaaaaaaaattattgtctttgtattataaaaatatgattaaggtaatttatgttagtttcttttattcgtatattaatttttttgtgtgacttacattagctccaacctcaaaggagaagacaaaatttgttttatgaaaagtttggtggttatgaggataatgaaaatgacataattgattaaattttttcatttttagtgggtgatgtgattttatgtaatcaacagtgtgttgcgacacatgtggtgcctccatcttcgaatgtagggctatcattggatatgaagcctctatcttcaagttttgaactttcagctaccaatgtggagtttttatcttcaaattttgaacttttaactactgatgtgtattttttccaattcacttcaattcctcaatagcacttgcatccctcttcacaacctcgctctttttatgatgctcgaaatgagttgttggagtcagtgaagagtttgatagccgatcaagaaaagttgtagaaatcaagatacgaggagattgaacgtgtaattagagaaaggtacgagataatattgacaaccatttctgaccatgcttacttggatagagtgaggcatgagatgctattatcaaaattagatgatttggttcacattttaataatagcatctcatgcctcactctattcaagtaagcatggttaaagatgactgtcattattgtcttgtatcttgacttgtgcaacttttcatggtcggttattaaatatttcactgatctaacattcgagcatcataagaagaggaatgcaagtgcgactattgaggaattgaagtgaattggggagggtccacatcagtagtaagttcaaaatttgaagatggagactccacattcgtagttggaagttcaaaatttgaagatggatgcttcatattcaaagatgtccctacaatcgaagatggagctaatgtaggtcgcacactaaaaatgaagaaatctgatcaattacgccattttcatagctaccaagcccttcacaaaaaaaaattggtttttcctttgaggttggagctaatgtaggttgcacaaaaaaattatatacagagaaaagagactaacataagtcaccaagatcatattttttttaatataagacaataaataattttgcatgtggataaataccccaatattattttctattacttttgataaatgtgtaactatgatatttttatgtttttcattaattttccaactgagtcatctaggaatattgcttccttgggacattatcttaccatttcaccaaacttttaccattgcttcacaaatctatatttataaaagaaaaaattatatctcaaaatataataaaaatatccgaaaataaataagctgaataaaatataatcataat

SEQ ID NO: 219714 - DNA, 3275 bp, Cannabis indica
aaacttgttaaaattgtggaggcaaggaagatgtttctgatatcaaatattcgaaggtagtcaatgacatgtggctggctctcctgtttctgctttgacctaacccgtattccttcgtcaattattattattattattcaatagaaagaatggcagttttgtgaagtaggtctttttaaatccacacagataaatattcaaaaacaaattgacaaaatccacgtagagaaaccactggttcagtacctaaaaacttttcaaagtattataatataaatacaaattttcaaagggcagcctgattattatattattatacatgcaattgcttaaagtaaagaaggccaagtagctgcaagggccgccattaaaaactctttccttttgattttcgtaccgttaaacctcgacctcgacccatatctatttcttcaacattccattttctttattgtgtttgctcatgcttgacaacaatgaccgcgtatagccgaactccgtgtcgtgtttcaagaatttggcttgtcgttttcgttgtctgtttctttgctctgttttgctctgccaaggacaccatttctcaagaccagtctatacgtgatggagagagctcctccgggaatctagtgtccgccggggacatatttgaactgggatttttcagcccggtaaattccacgtcacggttcgtcggaatatggtaccggaatcttcttgagattacggtggtttgggtggcaaacagagaaaatgctatcccagatagaaatggagttctgacactccaaagcgatggaaatttggtgattttagatggaagtaataattcgatatggacgagtaacagtaacatgtcttcggttgtatcgaaaaacttaacagcgaaactttctgacgatgggaatcttgctctctctaatggagaaagtggtgctgttccttactgggagagcttcaacgatccaacggacacttatttacctggcatgaaagttgaagtgagcgctgcaaaaggagaaaacagggtcttcaattcatggaaatctatttatgacccttcaccaggtaacttcactatgggggttgatcctcgtggatcgccacagattgtgatatgggagggatcgaatcgacggtggagaagtgggcattgggattggcagatcttccttggtgtaccgaacatgacagctaattttttatatgggtttaggctaagcaatttagatcaagggaaacagttcttcacttatgatactacaggtggtaaaattaagttgaggtttcgggtggagtggaatggatttgaaaaacagtataggttgggagagggtgataaagtgtgggagctcttgcaatcgcaacctgctgagaccaatgagtgtgagctttacaataagtgtgggaactttggtgtttgtagctcatgggaatcggtcaagtgccggtgtatgaaggggtatgtacctactgattgggaagaatggaacaagggaaattggtctggtgggtgttcgaggaaaacatcgttaaagtgtcagaatagcataaatggaacagagggggatggtaaagaagatggctttactgcggagagatgggtgaagctgccagactttgctgatttggctcagatagttccccctacatcggcgaaatgtgaggatgagtgtttgaagaattgctcttgtatagcttattcatttgttgacggaattgggtgtttggtatggaaagaaaccttactggatgtccaacattttcaacgaggtggagctacgttgaatattcgtcttgctcattccgatctaggtacactttttcattctcacgctcttaataacccattcaacttatccatattggtatatcacgcataattagtttaattaaggagtaacttacgttttgattactactggtatatctccaaatccattccttgagccccgtggttttttttttttggattggattattaaacctgccctttaatcttgtaattaaggcttctttttttctttctatgcaactagttttttttttttacttctctttttagcacactatcaaggaatggacaattcaatacttggtttgttgctttgtgtcttcgaaaacaaaaccaattcaagttttcagtggagtaactgttaaaaaaggaagaacataatacgaaagacaaaagaattagtatattttatcaaaatgctacttgtggctagctcaagtggttgggtgggtgggtgtggtgggggttttccctgattttatcaaaatgtatagttgatcaaaagtttgaatgatatggtacgacttatttatcacattaaaactgccgtaccgtaaaaaacttgtcctcggttgaatgtgatctaaagatgtcagaaacaatctgatgcatcttttgcaaatattgattttaattttttttttttaaaagaaaaaattaccttacaaatgtacaggtggcggcagtagcagaaaatctaccactttgataattgtattgactattgtgggagcagctatcttagtctttatatggctagtgtggaggttcagatataaactgaaaagtgagcattgaatatttcatttaccttattttgtacagttattatgattgtctttctagacagataaagaaaacaatgtctcaatatgagcttctaacatgatctctcatcttgttatattcagttttgccaacctcttcttcaatgccctggacaaggagcagtgaaataccaccatcctctggggttgcaaagagcaaagaatattcaacagaacattcaggagcagttgatgttctgacagaatgtcctgatggtagtggcccagaactaccattgttcagtttcaattttgtagcaatctcaacaaacaatttttctgaagaaaacaagctcggacaagggggatttggacatgtctacaaggtatttaaatgtttaacatgtctacaaatactgattataatttgaaataatggtgctaaatgtaaatatacaatcttctgttaccagggaaagcttccagggggacatgaaatagctgtaaagaggctttcgagaaaatcaggacaaggagtggaggagtttaagaatgagattatccttattgcgaaactacaacacagaaatcttgttagacttttgggatgctgcattcaaggagaagaaaagatgttgctctatgaatacatgcctaacaaaagcttggacttttttcttttcggtatgtcagtttgccccttatctttgttttgt

SEQ ID NO: 219715 - DNA, 5822 bp, Cannabis indica
aaaaaaaaaaaaaactaattaagggtgtgcttaggatttaggattaattcgagataattacttaatttgtgggtttatttcatcatattttcaaacagtaactaactaattagaagtaattacacttttcatttctttccctctaattttaattagagtataattattaatttttattttattttattttaaatcacaaccaaacacttttttattttaaaataagaatattttcagcgaaactctcttaacatttacaattattacacatatgatattaataaaaaaaaatgatagcaaaaatatcatatcttacaattttgttgcagttgtacccttttatggccattaaatttcaattcaaaacacgtagagacatattattagactatgtattaaatagagaaatgctaaagggcaccaatggtgcctagcacactcctatgtgtcaatatcgttattggttcaaataagtatcgggtctctcataatttaatataataacttttaggagtatcgctagccaatcgcaacgcgacatgtcgagaaggtattaggcaccactagtgcctaatagctatgctctattatataagcttaaaaatatgtaagtacgtatttatgagatgacccttaatgaacttaattgacttaacaattaaataatagtttgactccaacaaatcttaaaataaaatactttttgttacatttttttttattaagtgtaacaattacaaatattaaaatttaatcacaaatatctttttaaaatattacagtctgtaaaatatcaatcacaatggcattaatagaaagagaaatgcgagcacatgcataaaaactaaaaaaaaaaataataataaaaagaattatgaaaaatctgttacttaactaccaataacattgcaataataaaatttgtcaaatttttttttcttttcgaagaaaaattgacaattaacaaaagcatcaacacgatgcccacttaacgacattgttcacacacattacatagaaagacgaaaaaaagaaaaaataaaaacttaaaacacttttgttttcatatttttgggtttggtatggtatgtcttatacttttcctcccttttaaatttcatacaagtaaatgtccttgtcttttctcatcatttaagtaagcttgcttccaacaacatcaacaacgaacctgtacctaacatcattcttttccaatctttccaaagctgtgttaatgtaatccaatttcactgtctcaattgtggaactcaacttcttctctttacaaaactcaagcatttcctctgtttcctttatactcccaataaagcttccagtgatgcacttcctccctacaaaaacataacaaagagtaaaacaataaagaattactaacaccctttttgtcggtgtcaaattactattagtgtaattaagtattaaaggattaagttaccaagcataaccatagggctgacaaattgaagtggggtgttgataacacccatcaaaatcagcttcccatcaagtttcaaaagtgaaagataaggctcaagtggatgaaaaacagggattgtgtcaattatataatcaaaagaatcaaattgctcttgcattttggctgagtcagagctaacaaggtaatcatcagcaccaagatgagcaagagcctcttctcttttcttgtcagaagagctcagcacagtcacatggtgtcccatagctttggctaatttcactcccatgtgtcccactcctcctaaccccaaaattgctccttttagcccactttgcatcaatccaaagtgcttcaatgggctgtagatagtcactccagcacaaagtagaggtgcagcctgttctgcccccattccttctggtatatgtaccacaaaccttcaaaaaaataaggacatgtttggtaagacaataatactcaagaatcgaggttatcctaaataactataatttataataagatgtacctttgatcgaccaccatggcctcggcgaagccaccttgagtaggcttttgatcggtgtagacatcgttgtaagaccatatttttttgttgcagtattgctcattctcagacttgcatggcttgcactgttggcaagagcccactatgcagccagctccgactatgtcacccactttgaacttggttacttctgatcccacttccataacttcaccaacaacttcatgcctaagaaaaaaaaaatcaatatttgataaaaaaatcaattaatttcaattgttatgtgtgtgtgtatatatatatatataccctgggaccattggatagtttgacatgcccaaatcatttttgacttggtgaatatcagtgtgacaaactccacagcatgtgacttttaatgtatacatcttcaggaccagtttctctgcaagtttaagtataatgattatgaataaagaattaaagaaaatgaaaattaaaacaattgatttgggtgatgatgttacctgagtgtgtaagtgtatggtgagagaacaccagatgagtccctggcagcccatcctgttacggttttctcagccttaatggttcccatttttctactgataaagacaaataggaagaaaaaaaagcgtatttgggaagaagaagaagaagaagaagatactgtttggaaaatgattttgaaaaaaatgaagtaatggctgtatttatatatagagtacaagacaatatgacctttcttttcttctaatttcttttttttttttagtttttgatgataatgacaaatgacaatgggaccttacttgttatggaataataaatttatttagagtaattaagggccaaattcttttatattttaatttgaaacatctttaaaatgtcacccttgtatatatatgtgaatcaatttttttttattaagaaactaaattattattaagaaatgaaaaggagtatcataaaaaattgaggtattttaggaggttaattattgacagcctcatatgagtcatggtgggtccggtggtagtaggtggacacacggggacttatctcctgcggaggagcacaccggagcataatatattatttgacctcatatatctcaaaattaaataatagagttgaagagtgcggttaagtttgagaaaatgtgaataaaaataatggaaaaaagtgaaaactcacaaaaattggtaaactagcattgttgaattaatagggcgccattaagaaaaataagaataataataataatgaagtgttctacaataataataaaagttgtaatatatttaaataacagatgaaatttgagatgaaatttgagaaggccaccatggatgcagaagaggaataacacgcaaattagtagcacacactttagatggaagacgacaaagaatttcaatgtgattgtaattttggccaagtattcgacattgaaaaatctcaatattatctttaattctattattagagcgcgaaaagaaaaacacatctccgtcatctggatgaagagcaacaaggcaaaagaaactcataggacaatcaaacctcatcgtcatatgataatgattatgcaccaaattccaactatacgtctcatcgtcatcgttgtcacccccatcaattagttcccatgccttaaaaacaaagcactcttttttcttatatgaatagaattgtgctagtcgcaccttacctcgaaccaccccaatatgcaccctcgaatccaaacagcgccaatcacgtcctaactcctccttaggcaaaccaatcaaacggtatcgttttgaacaaatattcagcgaaacaataccttcatttttatttgaggaaccataaggcaagtatacaattccattacttccaatgatggtagagcgagaactgcatttagtcaaagcttcttttggaaattcaaaagttgaatgactccattgtcctgtctcagaagaaaaaatatctaaatcaggtagggattctgaaattctatcgaaaactcttcccgccgcgctaatgatcaccaccttatagctaatcataaggttattactagtattagatactactaaaaagcgtctactataatatcgatagatattcgaacaccatggaagcaaaatgtaatgccttagaaaaggattgcatacataaaaacagagaccactgcgatcggggtataatagttcaaccagcaataaatcttcgaacgatgaacatatatcaacacggtcagattttacgtccttcgaaggtaaaaactttaatgatggtgttagtccatagtcgagaattgttgatctcggagagaaatatgcaagtgagaatgaataatccgggagaaaagaggcaatgaagaatagggcaaatggaagaggtgagtcgggagaattattaagtcttttttgacggtgatagtgattgaatctgccactgaaatatagtctagaacaataaataagagagaaccaatgtttgcatacacaagcacaatctattatagacttaaaatctggaagacgaagtagtacctccaataataaatcatcactaataatattgaaaatttgtgtactcattgtctccaagcactgccgattattagcactactgattaacatttttaggtatagctgtacgtacataaaccctagctacaatttgttttgaatttatatatattcttagaatgattgacggttagtttatttgttttttttttaaaaaaaagtatattaaattatatatttttgtgtatagttcggtgagattgttgttttggtaactgtttaattatctaagagtttatacatacatagtataatattaatttcgtaaacctatatttgtggaaattggttgaaaaggaataataagaatttaagtggcttttggttggattggaggtagtaaaatgagggatatttttaattatatacgtgtatttgttaaaaagatatcttaaattttctagtatccaattgcaaataaatatcttaagaaaaaaaaaaattaattactttcgtatacatagtttcaaaattattgataaaaagttgtggaataaattaatcacttatttttttgattattttattgtgcacaccgtataccaagacgagagccaattcaactttttcttttttataatttattatttgaatgaaatgagaaatatactttctcaaattattctctagttttttttttttttttttaaattaattctagctataacactaatcatttgactcaatagtggtagatctttttttttttttgacataattatgtgagaaatataatatttttactgaataaaatattcaaaattaaaagtcacattataattttttttatatatttcgttaataaaaaagaagtaatcaataattttttttaaaaaaattaatacgtcaaactaattttataagttaataagaattatatgtaattgcatatgtaaaaattaccatatagtatacattttacgtaagcttattttatagttatagagttatcaataacatcatacaaaataaaagttacacttattttgctaatataagctatttgaaatttttttctttttttctgtaagtcattataatgtaaacataatataaaaattgctataggagtaaataaaaaaaaaagtaacataagtataacttaattaacaatattatataatttaaaaataaaaatataattttaaaagttaattaattggaataagtaaccaaactatataagataatattatctcacaaactaataatattgaaaattgattgtgtcattgtctccaagcactgccga

SEQ ID NO: 219716 - DNA, 2516 bp, Cannabis indica
tcacaaaggccaaaccacaacgatagagacagcacatacacctacttaagtaggggacgcgtgtaaaatctgcttcgaagatggaggttagtgcgagaagaaccttaggaaataggctcaagtacagatgctagtgggttgagatcaaggactcataggcagagcagatcgactaaaactcatgcacgtgaaagataaacacaatatggggaaggtacatgccatcactatcaaggtgatgaagaaagcataagattctcagagttatcaatctaagagttattctgcaacaaggtcgtttaccaattacgacaagagaaatgaaaggcgacgcgaccctaatctatgcaaaaatttaaactgtagacaacctgacttgcacgaacacttgaatcgtgacgttctaaatctgtgaatcaaatgtagatgatattgatattgaactagaatatatactaatgacaaagagcaatattattatatgtaaaactaagatctctaccatcgaggtttatacatttctttaaacactaattaggattttcaccccctgaactttgacatatacaaaatcatgccccctgaacttttctagccgttaaaaattttccctaaactattgagattgttggatttaaggatctttttccaattttattcaattttactagttctgtgattgtccatatactcagggactggcccaagggtggggcaatcggggcctacgccccaggccccataattttgggggcccaaaattgaatgaaagggaacttcgtcattcgaaaaggagctccaaaaggctagcttgtccatccagatgaaatcttatggaaagctggttgtcgtctggaaaagagttctggaacgctagctttttcctcaaggaaggggttctggatagtccgttccagtaggctttatgcctatttgggacgtccttccaaattgcgcttcatcaatttggtacgtctgtccaggaaacgtgatacatgtccggagagagctcgatgccaagagtcagactaaagatctcgttgtaaggagtcagttaagtcggttaagttttaaccgaatttactacttagttgcttaagggactctagattttatggagccagataaaaaactaactctatgaaagatgaccgagtatcatttgcttgaatccaatgacacacatgtactacgaaatacccttaatgatcattagtattcacttttaatatttaatgcatgcatatgtatgtaataataaagtcaaacttaatttcaatttagttttttcagcaatgtacttggatgttatgcaagatttataaaatgaaatcaaaagaaaagaagacgtttacaaataatgagaataaaaaaccaaacacaaaaagaaaaaatttgtacacgagaatatcatagtagtagaacaagagagtctcaagatgagtatttgtaaatgacgagaagaatatcgtagtagagcaagaactaccaaataatgcttcaaaattaagaattaatgaagagtgatcagctcgagagcataactgcaaatctcgataacttgctagcagattaaaatttactggtagatttagataaaataattttttcagaatcaataaaagcgctcataatcataataaattctatatattgtcattaacaacatgccgtttacaaaaaatattaagtgaaaattacaaaccatatataatagaattaacactatattaattccaatccttaaataaatggtataataattttggaagaaagtggtctgaaattgtgagtagtgatctctttgtgatttgatttatactagtgtttgtaatactcaaaaattaatttattaatattcggccaagtcataatataggtagcataggagtagtacgtaggagagtgagaatgtgattggagaaattaaatgcagaagaattattgttaatatatatgtaacacaagtaagtagagagtgagagtggtatgttattctcttaagttttgattatggattatttatgatatataatgcaaatgttatatatatggtctttaattgttgtcctgatttggtttaatggttatggtgttaacgtacagatgcggatgggaactcatcatcatctcataataaatttcattaattattctttgggaccaaattgagtcagattgttaaataagatttactaattaattaattaagaagcaaggtaggccttatataaattcatatcaattccaaaccagtaggccttatatatatcttctcttggaaatcatgtctatgcatttggaccgagatttcgagcaattaaaaccgatcgttcgactctccaaaacaagtatatatagcttacgtactcaacccacaaaatttaaaccagaaaagttactaattaatttgaaactaatatatattatatataaagagatcaaacaagtccgcattaaaatcaacagatcatcctaattaattaatttgtggggattggttttctgcagaaatt

SEQ ID NO: 219717 - DNA, 3947 bp, Cannabis indica
ccattcaaattttttatttcctctaagtatgttgaagaaaggtacacatttgtctatggaatttgacacgaatctgcttagtgctgctatgcggccagttaagctttgaacttcttttatctttgtgggcgacttcatgtccaaaagggcttggatcttctctgggtttgcttttattccctgggcattcactatgaagccaagaaacttgcccaagcctactctgtaagaacatttgaggggattgagtttgatgttgtactctcaaaggatcttgaagcactcatttagattctccatatgccccaatcctttttggacttaacaagcatgtcatcaacataaacttccatgttctaaccgatcaggtcgttgaatattttgttttacaagtctttgataagtagcccttgcatttttcaatctaaaaggcatgactttgtaaatttacaggcatgtatttgtcaagaaacttgtatgctcttcgtctagtggatgcattttgatttgattagagcctgaataggcgtccatggagcttagaatttcatgactagttatagcatctaatagttggtcgattggtagtgggaaatattcctttggacaagccttatttaggtcagcaaaatctatgcatactcgctacttgttgtttggtttgggtaccaagaaaggaatggacacccatcgcgggtaaaaagctctaatgatgaagtcattgacgcacaaccttttgacttcattttttaagcttgtggctctttatctagcaacctccttttctattatacagattgaaagtttgtatctatgctttaggcatgagaaattacgaatggattgatccccaccatgtcttcatgctaccagcctaagataacgaggttttcccttagaaattttatcaatgttaattttatttctagtgctaaatctttctcaatcatcaatatcctggttggaagggtgggattgatctctacttattctaattcctctactggtcaaaagctttctacaagatccccaaagcgaggttttaaatctaccttctcgctttgggctgaacatcatttcccttggctgaactctttgttagagctcttggcaagcatcttttatttcttggctttggataaagccaagttgtagcagtgttgggcagtctgttgatctcccctgaggcaccctacccatgccttattgggaactttagacataggtggtaaattaacatcataactttcaagtcgtacagggttggctggcctatcattgtattgaacgctaatggcacatcgatcactatgaattgagcctttaatgttcttattgtgggactttccctaactatcgaaggcagtcagatgtttcctaggagtgcaaggccttggccaaagaactcgtacatcaattgtgtataatgtgctagatctgtcaactggagccccaccttttcataggttgacttgaaaagtatgtttgagggggctccattttttatcatgcaattagccaatgtcatgctccctatatgtgttgttatgaccaaggggtcattataagggaacctggcctgggcaacatctctttttgtgaaggagatggcaggttcttcaagctttagctgtttgggatctctttcctctacagccaagacactgctttttttctcatgatggagggtctgagcatagcgctccatagctttgcttatttcgcctgaaatatggggtcctccaattatgacccctaagtgacccgccactggcggtggtattgggtctctattttaggcaccttgtgcctgtatctggtcgtcttgtacataacaacacatatggggatttttcttctaatcaagaactcaatttccaactttaagtacttgcacttgctggtatcatggccaaaatcgttgtgaaattggaagagtttaaaactgtccctcttacttatgtcttcctcatgggaggaggcttcctatacggaactatggactctgtagccacgtcgactatttcaggagttgttgttaggagggtgaagcatgtaaaactttcctccttctcctttgagtcttgtggtgtgggggaattattaaatttcctctttttgcctttcgcttggccaaatttattgctgttactcttacctccaatgttttggcctttggagggctgaccacttatgctggcaggtgtgctgggcggagctgagggctatcctccacttaggacatgtccagcacctgcatgtctcccattttgggcttgccagacagcttcttcaagcttaacaaagccttctgcctgatcaaggaaatcaaccatgtttttagtttagtgtcggcggatgtccttccacaactcactcaaaggtagtatgccactcatgatggtcgtataccttccttccatcagattcttgactttggtagcttcagccatgaatctttggagatagtcttttagaggtccccctggcctctgtttgacttcaactaagtctataagacatttgcttggaagacgagaattgtgtgtagaactttcttgttaacgagttccatgaatcaaacctcccaacagctagtttgaaaaaccactactgtgcggtttcaaagaaggctactgggaagattcggcatcgggtatcaacctcaacattttgcgaatccatctggatttcaaatatttgatgtgagtcaagggatcttctttccctgtgcacatcctccatgtaggcatttaaaacttggtaggcaagagcagtgcattgatgcacgtacagaaaggtgacccttgggtcctgtccaactctaagtcagacagttttgggccagacaggccttgtatcatattcataagttaatccagctatgcctgcactaaaggatcaaattagcttgcactttctcggaaaatcctatcctgccaacccttgcatggccaggctggccggtgggtgggcaggaggtactctgcgagggttggccaattttggcctgttttgctctattggttgagtgtttaggggcaggacatacccatctcgagcattcattctttggttcaaactagaccaaagatctaccctaacatgagggcccattctggcaaccataaaatctctagatcttgggtcagaacgtgtacctagccattttggggtggaacatcattggtgtaccaagtattctgagttctacggttagtgtgctcaccacttgggtgactagtggcactatcatcataggattgggttaagactccccaatatgagaccttctttgcccttacattggtgggatgtcttccctcccctcttcatctctgggtaggccttgaaatcggtcaatcctgccatatgatctttcaagcaagatcttcgcatcattaggctgataagacgacctttttaggatgcaattggctctcctggccttgaggtttgcccataatgcctggggtgctgagttccctctgggacacaatgaccttttccctgataaggatccctgatgagggatggctcttcgatctaagatccaaccttctcattgaacgatttggccaggtcattagcctccctattttggtggttcaactctactattgggcttggaggattgcggcttattaatccatccattcttggaattcacatctctgttaggcaaaagcatcgcccatagcagcgcgtgtttcttgttggtcatggtgaatgagattcgtatgaccctgaacttgtcctacaacctctttcagcctagcaagttcagtatcatcccctaggtccacgtggggttcattaataatagggttaccaaccctaagcccagtctcaccagcataaacacgaggtctaacccccgtgctaggaattttagttattggctggacaatgggtccaatcagtggcggacctagaatttaaagtga

SEQ ID NO: 219718 - DNA, 2921 bp, Cannabis indica
ttttgccaaaaaaaaaaataagaggattaagtgtattaaaattaaaacataaggaggtaaaataagaaagttaagtgtataaaaattaaaacataagggagttttgccgcaaattactctaaaatataccctgcaaatctcacttttaagccggtcagatgatctacaatcaggagtcagtagctgccaaagagaattatagcatcaaattagaaccaataatatcgggaatatgatacaacaagtggtctttcactttattatctcaaagcttttgattctcacttctttaactttcttatcttggatgaaaacataatcgacctcagcatgatctataataaaatttacagctcctggccctgcatcagaaaaaaatattacaaggttaaatcaaattggtgaagctgaagtttctgctaattttaggattgagagattttaccaagggtgtcatagagaggcacacagaccaaactgtgagcattgcaagcctaaaaaaacgtatagcaaatgattacatgactagaaaagttttttggtaaaaaaaaagaactatatgtggcgttgtgtttcagcaaataaacctccattgccacaatccattcagggcaatttgatccataaatcccaatacgagagccctgtcacagtcacaaaatcacaatgaaaaattagaagaaaaggcataggaagaagaagaagaagactttgtactcatatgtttaggccttacaggctcagcaccagaagcacgtaatgcagaaccgatttgaagaacttcctcatgaacttccttgtatgttttccaattataaggcccccactacacacacacacacaccaaaacatgtaaaatcacttgaaattacaatcactaaacataacatcaatcttatatgttatgatatgctatgttatgttatgtaatgcttaacctttccatcaacaagttttcgccatccgagcatacgattatcaggatatctctcaacggatttgctgcaagccaagaacatcttatcaagttttcatgtcattaatatgaataaatagaattaacaagattctagttataacaagtacctgaaaatatcccaagctgtacttaattcaggatcagctggaggaaagttattcttggaaagcaagtttctgtacactggaccaactgaaggcttcccatccttaccttcctttccttcttcaacttgaattgaaaattgcttcagcatcttctctctctcaaacctggaaaattaatagtctctggacacacagaaaagggactttaataactaagagaaaatgtgtatctatatatgtgtgtgtgcaaagaagtcaaggttttgagtgaacagaagaaattcatagtcaaagccaaggaaaaaaaagacagagtcatgaatgatcgatactgaccaccatgtgtgtgtgtgaagtagttaaaatttaggaaaagagcccaaatggtacatgtatatgtggtacatatatatatatgtgacatcaaaacaagactacataccaaatcttcctttaaatacatcagaagattgaacagcgtagcatgattacccaggaaaaaaaaaggaagaaatgtaaaacacatgttagctgcacacacatgtaattttttatttttattttttcattatatttattacataaacatatataccatgttgggctaagtatgaggaagctaaagattgtgaatgactcaaccatccacaaaaatagatgaaacccagtttaagagattatatttttatgctaaaacttacttagttacggcaaaatagcagtttgagctgcgccttttcacattcagttatgtcatatgtttagaaaaaaaaaaaaaaaaaaaaaaaaccagtgctcgttttgatattttatatatattagtgagtgagagattctttttaaatatattatatttgcttaattttgaccaaaatgttattattatattttttaaaaaaaaattaaaagaaaccccaaagacaacagccctgtatatgttattaagtcaaataaggcacatatacattggatatcttaaatatgaaaatttgaaacattaattatatgatatgaacatgtacacacatacacgcacttccatatatatatatatatataaagatatataatagaactattatactattacttacagtgatgatgaagtgagagattggaagaagatgatgcagtgtagtgtttggaagatatatgatgattaatagtacaagagatggagagatatagctagcatggtgtggtaaatgagttagttgtaacctccttatttattaatctcatttatggcatttttttatgctaacttctatgaaatgcattaatattaatccaaaacgatgatggaaaagacaaagtcacttcttacacatttttttttatttattttcattttcatttcgtgactttatttattttgactattttagccaaaaaaaaaaaaaaacactttatttattttgaatagagacaaaaaaaaacatacaaggccacaaatgtacttttttctctacttgcataattaagattccctacgatgataggcacgaaaaggcattggtgtgagaaaatatttcttataattagttattggggtgggaatttgggatcgcattttttttattatttaaacgttactactttatatattataatgtataattttgaattcgaattcaaaattttcaacacatacttttttacaattatttgagctaattttaagttgttaagattgcattacgatttatgtaccttaaattgtatttattagatgttttaataaaaaaaattagacgctttaactaaaaaaaacttattatttaggtggcgtttggtaacacttttttaatcagttttctgtttttaaaagtaga

SEQ ID NO: 219719 - DNA, 2773 bp, Cannabis indica
aaattaaatttaaaatttaaatttattaccgtaaaaaaatattgtggtttcaattttttattttttttaataaatatgtatatagattatattatatataacttagatataatatatataaatattttagttggattagtcgggttagttcggatatgggttggtattattttcaatccgtctaatataaaaattagataagttatattttcgttaagtttttcagtttatatttttctttgagttatttactttgatttgggcgagttattctggttggccggttcataaaaacttacattcagcgatacaaacaataaccagtattagataaattaaaaaaaaaaaaatagacacaaagtgacataataagtaaatatcaggtggatttatcttcttaggaagctttaatatttatggtactataccagaaaagtatttggaggtagactctccacaactgccttgccaccgaaaaatccacgaccaagagggctatatggaactaccccaattccaagttcactgtcattaattaacattttaaccaaaactaatcaatcaataattactattttaagttaattaatcgatacttataataatctcataaaatatagattaaataccggcaaagtgggatgatttgttcttcaatatcacgagtccaaagagaccattccaattgtatggcagtgatgggatgaacagcatgtgctcttcttattgtgtctgagctagcctcagataatccaatgtactttattttaccttcttctaccaacttcttcagctctcccatctacaaataataattgtaacatatatataaatagtaaatgatcaagaactagctaaatttttttatattaatatatatgatgaaaaaatgtactcacagtatcctcaatggggattgttgtgtctactcggtgcagatagtagagatcaatatagtccacattgagacgcttaagactagcctcacagcaggaccggacatattgaggacttccattcacctcaatttggtcagctcttatttccacaataccaaattttgtggctaactgaacttgatctcgaggcaactccttcaaagcctgcaaaatatcattaatttaagagtaaatactattttgaatccagtattttgtaaaaattataaattagaatctctgttttgttaaatgataaaatatactttatattttttaaaataataaaaatagaaccctaagctcaatttttaacgattttattttttattataaccaactttaaaataatttttaataggaataaatacagaaaatgtaattttattatttaataaaacatatttgaccttaatttaatttatatatgtatacataacatcaatattcctatacaataaatttgattcagtaccgagaaataacaatattttaagatacgaatatgtttggatttaaacaaattaagtataccttgccaaccaaaatttcattagcagacttctctccatagatatctgaggtgtcaaaaaatgttattcctctgctgaaggcatatttgattattgatatgccaacctcatcagggactggtgcgttgtagactccggtaagtcccatacatccgaatccaagctttgaaacctgtaaaatcagtatttgatataatttccaactgggttttagctaaaatttatggttttgtagtttgtgaacttcatcacaactttaaatctgaacaaaatgaaaagttcatagtaaagattttgatgggttctagaatttacctccaatccttggtttcccaatttcactcttggaatattgacacttttctcttgcgccatagttggttatttgggggttggatttttctaagtagtcttattgtctgttgtgtgttgttcttgtgtactaaaatggaaacttgggactcctatatatatggaatacttgtaagtatatgaggcggtgaaacagggttaaagcattcaattcattgtttttgttatcctaggattttagtgtgtgtgtgatcattgatgacttcattcatacagattagtcatgtattacgacactatatagtaaattattaaggtttcttttttaatatataatttgacaaaagggaaatcaaaagatcaaatataaaagatgttatggtcaaattaaattttttatagggtggtggtggtgggtgggtacaaactttttttggtgaattttttaaaatccactcttttttaatattttattttcaattttaatattttaaatttttatttataaaaatactttttttagttaaaattacaaaaatacatatttctaaataaaaaataagaaaataattaaaaactatataatgaaaaaattaaccacacaacaattttaaattagttatataattacgaaaaacaacctcattctatctataactaaactataaaacaactagaaaacaatttattacttttactaaaaatcgtatttttataaaagaaaagttagaaagcatataaataattttttttctttcatattaatgtattttggtatttttttggtatttttaaatttgtagtaattgatataaaaatatttattttttttaatttattaatcaatcatcaatatatcaatatatatatatatatataaaagagtgtttttaggagttgatgtggcagctaatctctcttctctaatttattcctaattttttaatttatctcaatttttattctattttgcattttaattggatgatt

SEQ ID NO: 219720 - DNA, 2026 bp, Cannabis indica
tttttttttttgaatttttacactttataacaattttttattacatttttataaaaattcacatagcaaccaacgaatcaaccttaatcgtaaccaaaattcatatatcaacccacatagaaatcaccgtagcaacccaaaccgtaaatttgaacaaaaaatattacaaaatagtatatggagtaattactctttattttttattatcacgtatattataataatttaagattacttgtaaattttttaaaaaaatttaaataatttataatactgaaaataaaattcaaacaaatacttaccataaatataaaaattatagggacacgattttgtcccgtaatatactttcacggaatgtattatgtggtacattagatgagtctcaaggtacgttacaattttttaaccctaattacccctaaatcaactccagccctcagatcaaataactcccccatctaacggttgtcatacatcactaaatatattccgtgaaagtacatcacgagacaaaatcgtgttccaaaaattataatagtgtgcaacaatatattttaatcttaattttgaaaactatttgataattttgaaaaatttaggaccctaaataactacaaccaacaataaaaaagaaaaaaaaattgaagtaaaaaaacttattaaatgtgacctcatggtggtgatattagacacactattggtggtaaaaccctataagccaatttgagccaaacctaatggaccccatcaatcacccgcaatcttaaatcgcattgtcacctcagccaacactaaaaagacaaattgaaaagataacactaagatgattgatgaagaagaagatgatgatgatcatgatattgatgttaaaacaacatggatggtttagcctaaatgggcagagtaatttcttaacacaaacatacaacttggaaaatgaacttgacaattcaaaaaataaacacgtgatggtacattacatacatacatacaacaccatatatttcttttagccccacattttctcgagaaagcaaaataaaattgtattatgtatccctttctattgtgtatatttatatataaatagtaaaaggctgacagtaatttgaatccatgataaaacagtgtttttgatgcattgaagtctctgcagatgttggagagacattaaaaaaataaaaaatagttttttttttaatttttttaataaattatatttatttatttactcaccaaccaaccaaccctgctgagctgaatgagatgtgactttgtgacaaaatgggcaacgttcgtcttcttcgttctttcacatgagattgaagttttttttgttgttgttggcttgggaatagagaaaaaaaaaagcacaaaatacaaaaattaaatacacaaaaaaaaaaatgataataatgtatcattagatagaaattaacaaggaccatccctttaaggttgaaaagaactcttcataacccaattctattaatataaaacaaataataaataataaaataaaaatggtaaaagataatgatgattatgatgatgagttattaatttctttgagtaaatataacaaaaagaagataaataaacattatcataaaaaaataccaaaaaaaaaaaaattaaagaagaagaagaagattgagccttcccgccaatatcaccccatagaaaatcaccatcatcatcaaaatccatagaagaagaagaaattgagtaagagaagaacttgattcaagaattggagcttgaaaatggttgacttgcttcttctactaatacatttagaccaataatattcctcctcatttagaatagaccccattattaatacaacttttttcttcaagaaagaagaaaattcatagcttttttcttcattgaaaatccaaatggggaatgaagccatagcccccaccaccaccatgtttcccacctcctcaaccatccacctatggtgtcaaaacacaatgtcgtttcagtcaacaataacaacaacaacaaaatttac

SEQ ID NO: 219721 - DNA, 2349 bp, Cannabis indica
agaacgttggttctttttcaagtaaactaaaatgaattaatcacgagaaagtaaagtaaaaatttacgccaaaattttacaagtttcatttgcactaaagacacattccaaccgacaagtgtttgggttgagtaaagtgtaactcttactaatgaaatcaaaatgttaaattatagtaacagattctaaaactcaaacaacatcaatcgattacaagattacaaattacccatatcatgagtaacaattcaattaaaaagtacttccaactctcttttaaactcgaatccctcaattcaagactccaaatctccttgaatatagcagttgaattccttcactagcaaaattctaactccctttgaattagatcagatctcacactaactctgcacgagaacctcccatgcaacaatggtgaatcagtaacaaagagaagaaagaaagaaaacaaagaagagaaataacaaaatgtattttctcgtgtaacaaactattaaaattaaaaaaaaaaggttcggttaacaatattaaactatttatgtaaaccctaatcactacagtaaacaagagatgaaactagacactcaatagttcaaacatagttatataacaaaataaccaaacaaagactaaacacctgaacctacatatgaaataatgaaacaatttaaccatattttgacattaaataatgtgatcgatacaaattatactaactaacaattgtggtgtataaaaaattacatatattacattgtatggcatgatttttattattatttttttaaggtatagcatgaaacatcaactcaaaataaattttacaatttggtcataaataactaattcttatacgatatcaaacatattgttttgcttagcataaaaatgtggagcaaatttggttatttgttccatagtaataagattattctttcaagttcattgttcaaaaaaaaaaaaaaaagattattctataactctttctctataaattatttttatttctaaaataagattataaataaaataaataaaattgctatctcacttttctactcactcttatttctaaattattgtgtcatagtgagcaaaaattgtaaatacaatgcttattttattgcaaagtaattaatcttgattctaactattaagtagaatattatcattactttaccgttatgaaaatattatatttcgttgattttattatttttattattaattaccattataattatttttttttagatttaatattactttaccatactcgttattagaatattattatttttggatttctttttcttctaccaataccgttatcgttttattctattaattaataatacgttacaatgtatatatctagattctatcaaaaacaaaagtatctatctagatgtagtttgtcattaataatgtgttatatattaattgagctacaaaaatttacgaataagttagcataaatttaagaaaatacaattatggctttttacgagaagaagtaacttacgtttatgtctttattatcgatcaatacttttttttttgctggagaatcgatcaatacttttgagacatgtgtttaacaaaagtgtcattttgttttttttacctaccattttttgtggagttgacataactacctttaacaaaatcataaggattctcattatagttacaattctaaatcaaataattgccttttcatctaggaaatacattccattacttatccttcctctcatcacagttttagtgccttgtgcatgtgcaatattcattacaccatcctcaactttgacaacatatagtttatcaaacttaccaatagagagaagatttcttttgagatctaaaacatacctgacctgctgcaagattttcatgactccatcatgattctttaacaagattgttgccacatctttgatctcacacactttgttgttcgcaagaagaattgtgctcttgactctctgaaagagtcctaaacagttttttatttgatgtcatatgaaatgaacaccttagtctagaatctaatcttcagttgaatctgatatagacatcacaagtgcatcagatgacactacaagtgcatcaaatgactcataaccatctgcaacatcaataactccatgccttttggacttgtgataattttctatctttaatttagcctttagagacaaataaccatctcttaagtggccatccttcttgcagtaatgtcattgatttcctacaactccattagagtttggccctcctgtggagtttctaaaattggatattgaatggttacctttgtagccatttgagttttgattt

SEQ ID NO: 219722 - DNA, 2518 bp, Cannabis indica
aaaaaacgtcgcctactttgtttagtacgattttaaactgtcgggagtattaaatttttcccaacggttttaaatagttacttaatttttttagcgacggccccgaaaaaaaaatcatttttaggaccgtcacgaattctgatatttgtagtaggcccagacctccccataccagttgttacattcaaaaggttgtgaaaagagctgataatcctatcgaatagagtaattgagcaccatgaactgttgtagttattttcttctaaatctcttctttcacttgcactatttgacgccagtaccaattattttgattgaaacctttatagtcccacaagttgtttctttctatatagacactatgaatctatttgacccataagagttcttgtttcgttgtaagtgcccaaacatatttgctaagattagccttatttcaaagaaaaagattacgagatcccaaacctccctctttccgagtcttacataactcttgccaaactatgtaccccaacccattgtactctgttgtgtccttctaaagaaaagatttgcaaatagcaataattgtatttttttgatagggacccaattttaaaaattaaaaaagaacttttaaaatatttaagataattttatattaaattaattaataataatacatattggtgtaacttactctattataggacaactcgaatgaagaaattcaaatttagtattaaatcaacagtaaaaggatattatttcaacacttaattttttccaattccaactacaatactaaaaattacactaaaaaatatattcttcataattactttattttattaaattatctcacactgatattttaatattttaatattttagtgatgaactacttcattatgtgtaatttattgaaaacattagaataatataagacataaaataaaatatcaaaataatcacaaaataataaagagtaaacctgattttcatacaagatttctttatatttgtatttgatttgatttgatttgaaagagacaaatagtacatgtggaaaaactggtaaccaatggaaaatgattaacgtaacccgtgaaataatttggaaaagcgcgctgcggctaaccgaaatctcccaaatctatttgatcacatgttcaatgtccccacttccatacataattacataccattccaaaaaacatttacactctttactcctatttatagtactactcccacataacaaagtctcattcaaaacaataataattaaaagaaagaaaaaaaaaatgacaatcaacaatggcaatggtcaaaataccactaggtcgaccacagtagaggaagacctcaaattagttggattctcaaacttcgtccgtacaaatcccaaatcagaccgtttcactgtgaagcgattccaccatgttgagttttggtgtggtgacgctaccaacactgctcttcgcttctcttggggcctcggcatgcctctgctcgccaagtccgacctctctactggaaattcctctcatgcttcctatctacttcgatccggtgagcttgatttcctcttcactgctccttactcacccgccatttccacccatcaaacctcttccgcttccatacccaccttcgaccgctccactttcctttccttctttgcggcccatggtctcgccgtccgtgctgtagctctcgaggttgaagacgcggagtttgctttcgctactagtgtcgccaatggagcaatgccttcatctcctcccataaatctaggagatggagttgtcattgctgaggtacgtctctacggagacgagttttgcgttatgtagttcaaagttcaaactctcaaacctggagttttccaggttttgagtcagtgctcactgctgagtcagatcagcctttggattatggaatccgaaggctggatcatgcagtgggcaacgtccctgaactgctacccgcagtgtcatacgtcaagaagtttacgggtttcacgagttcgccgagttactgcagaggacgcggaacgagtgagagcgggctcaattcgaagatgctggctaacaataacgagacggtactaatcccaatgaacgagccggttcacggaacgaaaaggaagagtcaaattcagacatttttggagcacaatgaagggcctgggatacaacacttggctctggctagtgaagacatattcggaacgctgagggagatgaggaagcgaagcgggttgggtgggttcgagttcatgccttcaccaccaccaacttactataagaatctcaagaatcgagctggggatgtgttgacagagactcagattcaggaatgtgaggagttgggggttttggtggacagagatgatcagggtactctgctccagattttcaccaaaccaattggagacaggtaggttttaataatataatatatctatattaataatggtttaattaatggttgcatgaatataattaaaagagcattgtttttttgaatatta

SEQ ID NO: 219723 - DNA, 4542 bp, Cannabis indica
gggagagtgttgtgtgagagagtgggggctcacatgcaagcccatggggggtttgcatgcgaaacgtgtgtgcatgtggggggagtcgagtgtgcatgtaggggaatttggatgtttgggagtagggagtcaaaggtgaggtttcgtggatgtattttggagggatgtgcatataaggaaagaagcgaaggcatgtagacaaggatgaggttggataagagctccaaggacaaggcatgcaaaggaagagcgtaccaccacgccttctgaagaatgagagcaaggaggtacaaggaatggcgacaacggaactgcaatgcatgaagacccgaccaagggtataccgcaaccactctccaacactctatacccgggaccaccgcgcgtgcagttgtagaccacgcgcatgtacccagagaccatcctcctgcagcctgaaattggggaccatctgaccttagacaaaggtaccaagtgccaagccacctctagcacctatgattggggccacgcacatgtacccagagaccatcctcctgtagcctccaactgggaccacgcgcatgtacccggagaccatcctcctgcagcttgtaattagggaccatctgacactagacaagagtactaggtcccaggccacctccaacacctgcagcatgcagcgggaaagcaacatcttgtccccattggaccactttgtacaccaggccattagagccctaaaaataccctccatctcagatgtgagagggggttggaaaattattttgtgtaaccgagatattgaattcaatatagagaggaatatttagatatcttttcaccttcatctttatcttatctttatcacatttctgggcaagcttgcctttttcgaccactaacttagttaacgagttctcaccgtaaacacactacttgaaaaggaaacggaatggtaaagatcgctacattgctctaaagttggatataagcaaggcgtatgaccgtattgaatggtgtttactttaagctatgttgcagaagctgggtttcactgactattgggttcatcttacactcaaatgtgtaacatcaactagataccaagtaatacatggtagtcatgatatcaaccctatctttccatccaaaggtattctccaaggataccccttgtctccatatctctttaccctttgtgcaaagggtttctcggctctccttggcaagtacaagactcgtgagtggttgcatggatgcaaagtggctaatggagctcttcgtttttcacatatgcttttttacaaacaacaactatttgtattgcaaagctacctatgagaaagccattcagattcaagaaattctccacaaagttgagttggcttcggtgcagaaggttaatttcaacaagtcttcaattttctttagctccaacactagtgaagaagtgaaagaaaggctcaccgagttgttgggcatcggcattgctttggagggtagtttgtaccttggcctcccaagttctatgagtcgtaataagattgcggccttgggttatttaaaagaaaaaaaaatacaaaaacgtctccatgcctggggcactaaattcctttctcgggcaggtaaggagattttgataaagaaggctgctcaagctcttcccagttatgctatgagcatctttttattacctcttgagattactaaagagatggaaagtatgttagctaaatattggtggcaatcgtctaatagcttctcttctaggattcactggatgtcttggaagcatctttgcaagcacaaaactaaggggggtatgggttttcgtaacttgcatgaatttaatttggctcttttaggcaaacaaggtaggtggctacttgttgatcctaagtcccttgtttcccgagtgttcaaagctagatattacccccatggttcgtacttgacagctaccattggctccaatccaagctttgtttggcggggtatttttggaagcacaatcagttgtaatgagaggcacccgttgggttgtgggggacggtagaagcatagttgttattggggaaccgtggctccctgatgtggataatcctatgattatttctaatcacccaagcctccatcatgttaaagtctgttatctcttgtcaattgatggctcgggttgggatgttgagattttagaagacttgttagtgcagcgtgatcgtcaactggtgcagctaattccaatcatccacatccggacagggatactttgtgttggtccaaggataaattaggcctatacacggttaagagcacttacaagctcctccaagagttaaatggtgaagctgttatcgatgattcagttgtggatcgtttttggaggaggttatggcaattgaaaatccctccaaagatgaagaacctgtcattgagagttgccaaatgttgtctcccaactatgtctcagctgtaatcgaagcgtgtggaggttgacattttatgtcttgtgtgttcgctagaagctgaaaccatttcccatgctcttctcacttgccctgctgctgtcctatgccagaaccgggtgtgtattggtacaataatggagcaggatacgtccttcttggactggtgtatcgggcagtttctggtgctggatgtggagcaaaccattttgattatggctctatgttgggccatttggaacacaagaagtgacaaggtatggcctaaaaagtcagtcggggtggatagcatcgtctcattggcaaagaactatcttaatcaatggcgtattgctcaaaaatcaggtaacgatttattgttcactgggtatattccgggagacgggactgagcagtggatcgctccaagtacaaatagtattaagattaatatcgatgcggctgtgtttaaagagacccatagctattgtgttggtgttgtagcccgggactcaaatggtttactggtagaaggctataccaaattgtttcatggttcggtggaccttgtggtggttgaagcaattggggttcgcgaagccttgagtgggatgaaagatcaccactggccacatgtgatcttggaaactgactgtctctcggtgattcaagccattcgtagtactattgttatgatttctatgtttggtaaagtgattaatgaatgtaaggctttattatgtactttgagaaatgtttcaatttattttgtaaaaagatgatttaatatggtgactcattcatttgctagagcctctaacatcctgattgtcgtttcagtttggacaatattcttactggattgttaccttatttggtaaccaagattattacttaataaaatgtgaattttttaaaaaaaaaacttaataatttttaaatatagaactaaaatttatatttattctattagttacgtttactagttatttattataatgatgtggttatgcgtaaattttccttttaggggtattatgcattgttgatgctcttataattaatggattttaatctcatttccacacaataatttgctgttttcactattaaacaacgtcagatgaggtagtcctactcctacgacgaggagtgtctcgctgaaattaaaattctttcaaagctaaaattcatgataataattatatgattttccttttgaaagaaaaatggcaatgattaaagattccaaaagtgaagagtatgaacaaggtgggatagcatttcaaaataaaaaagacaaggtgggataaaaagtaacacagtttgaaatttatattcattattcacacatttaagttttttaaaattttaataattaatccactaaacaagcattatggtgctatagatttttcttttatatatatatatattcattaattgtattaattataattatacgcctctaaagattaacaatggatcatgaccctcgtcctttactcacacctaacttattgattagacaataaatatcacaagagcccacatgtgtcctccaaattttattatttttattttgtgtattttgtgttattacccttaaaacttacacattaaaacttacacaatacactatactactaatgtaaatacgaacgagccgtgttttttaacacgacacgaaatcgataccagtctagaaagtatgagcataattaagtacgaaaaaatatagatttatataaaatacgacaggatgatataaattagtacaacttgacaagaaaaatttatattaaagtacgacatgacaaaaaaaacacaaaaaacaagatacataagcaaaaataaattaatctaaaaggcagaatacatgacaaatttaaaaaacactacgcaacatattaaaaaatacctataatttattagtaataataaatatgtatttcaattataaataagttaaaataataacaaaatttaaatataatactcaatattataattttataattaaaacatgaaaataaaattatataataatttatttaaaaagtgtgacataaaaatttaagtatttataagtgaatatttaaattctaacaat

SEQ ID NO: 219724 - DNA, 4152 bp, Cannabis indica
agtttgagaaggataactgtacaatgtacttgaaccgagtacatttctattccatatttttcacttattgtaaaaattttctatgtagcttaatatagagagattattttaatgggttttctatacacttatatatatttatgtaccatatttttacagcacaaactgggtaggggccaccgtgacaaagtgcagcagtttatagctataactggagcaaggtacctgagaaccatattacttttttctattcattttcatctatgtgaataaatttactttagttagaacaatgactttaagctccccccaacatattatataaaacaaaaaagaatttgttcaaaagggaaacgaataaacagtggcgaaaattttcagaggataagataacctctcgttgtgaatttcactttaaattcacaatgtgttaataaaccttgttccagtagaaagctggagatccaataaagttggttaaaattgacaaaggtgtatacaagtttcaactggttatgttgcgttgtcagtttctctatgtgatacattaagccttttatgttctcggtactgagtgagctctagtttcattcattatcttctctgcaccaatctctagttttgggttcagtcagaagtttcatagaattgtttaagtgtaacgtgcttgtgattggtctgtgaaatggaatacatacatacatcaagacatgtattacatgtgtttatatgtatatctttgtgtgtgtcattgtttttattattttttcttttatgattaagctcgagatgacttgtgtcatcgtgatgtaattatgttttggacttctttgaacttttctctagagaaactcttgtgaactatcctttttctattccattatatgattgtaaaattgttgtataggttttataggcaggatggctatgtaaatattggcaaaatatattctatgctccattcaagaggttaaagaaatcaatgatgttaatataaagttctgttacccgaatccgattttagtaaaattttgccttttatcaatataaggaaaaaattattttcttcttgaatctttgctatcataaacttctgtttctttctgtggaaatattttggaagctagtttttgtaaagtagtgatatgtaatatttttgatatgttgtgaaaacaagcaactttttttcccttcctgttttgaagttcttttgaactagctaagtcctttcatgggtacatattgtttgttcatgtatgttttaacattatatatcttgtatataatattttagatcttgtcttgcagacacaaacatggcaacttctattttgattttcttttagcaagccgatgtagtttaatttctcatttgatatctttagataagatgagttctacctacatttactggatgtgttgtgttatcaaatctgagaacaaatactcctcagtgacaaatggagaaataatgatatatagtttggtcttgcttggaagtcatattgttgttttggatatgatttgattgtgcatacttgtgttgtttcctcctaatgtgttttgatttccttgttcatatcattgtacatgttctttatgtctttatcttacatttattttacaccaaatttgctggtgtggcattgatggcgttgtttttccagcttatttaatgaccttctaatctatatgtgaattttaatttgtggttcgattcatagaaaaatgaaaattttattttgtgcagtgaaaaagttgcactgcaggctttgaaggccagtgactggaatcttgaaggagcttttgatctattctacagccatccacagtttaaatcatttactgattctagacatttagaggaactttacaaaagatataaaggcaggtttaagtttacatttgcttgttttcccctacaagaagtagttgcacatttttctctggtactgtacagaaaattgattgtttttgtatatgaagagtataaggaccttgatttgcttaaagcactttcagaaagaaatgataaataggttcatttaacttttcttaacatgtgtgggcattagtatgtggtattcaccttataaaaggaatgccatttttcgtatgtgtcagtgttgcattttctctgtccatgtgatcattgatagacattattttttttattgtgccttgtgttatgattgtgtttcttaaggatttttgttacctctaatttttcgtgtcatggaaatggagattggcttcagctgtcatctttttcttttaaattacatggttttatgcttttgattgggttatatttcagaattgtgttaataacttcgtacttagaaagtgaattgattatgaaatgtttttgacaagtcaataacttcaagtaagtccttttattgggtgtctcctggattgcatatgtgtgtattgtttagaagaatttctgctcactcgaacaattgtctgtgtgcagatccatatgctgacatgattctagctgatgggattactctcctttgtaatgaccttcaggtgactcttttactgttgtcgaacctcttttcagattgtggttgattaacagaaatttcattgtgatgtgtatttggttatcatactaaatcatggtaaatttataatttggtggtgtttgatgtctctttattcaacaggttgaccctcaagatatcgtcatggtatgtatatttaatttcttaatcatctcttaatgtatggatgtttattctaaaaattctcttaggtttcttgaatgtgatgtcatttattttgtagacagattttagattttttctaattttttttctttttagtgaggaaacagattacttaagttgcaaaactactaaacaaaaaattatgttgagaatacagtaacttatgaaacttggtcacagtctgttccattttatttccctggttcaaagtgactatggagtgttaggttccctctgatgaaatttacatcactgggtgtaccaggagttgttaactttttcattttatttttactatgaattttgacaacatgatgcaatttcagaataattgcttatccaatgttgatttcccagggtgaggatggggtgatggcaaaacatggacttggataaatactgttaagagtatagtataacctaagttatcctacgagaaaaggggggcggaaatggggtggggtgggatgggatgagggaacttgagataccatcttattaatcaaaatgaagcatataaaatcaaacgtgaacaaagaaataggagctcaatctgttcaaggaaacaggtcaaacctaataagaacgcgtcaaaattacctatattggaactgaaaggaagtttgttgttgactccttggatatggggaccaagttacgaaatgcaactttcttagtttaacattttctctctttaaaatatatctgttaatgtttttaataggggaggatagactaaagaggattgatatgtaattatgttctcatttttattttcaaattttcaatagctgatcttggtctagggtttcatgacttgaggtcgaacatttacagaactcagcaaaaaattggaaaaatattgctgtgatgtttatgatcttttgtagcaatacattttctaccccaattttttcatctaaaatctatttagttttgcagtttctaaccatccattccccctcagctttatttttcatctaataatttggttggattttctggaccacgggttattgaaacagttagttgtttcgtggcatatgaaggctgcaacaatgtgtgaattttccaagcaggaatttattgggggattacaagcactagggtaggtaatcaaatgttttgattattctttcgtgatcacatctaagtccaaatggctggcctggaactactgaaaaattagctcatgttccttgttatttatttgtgattaatttttgatggcaggatagatactcttgaaaagttttgtgaaagaataccatttatgcgctctgagctgaaagatgaacgtacgtgtaaaagctccttagttttcatttataaattatacgtagattgattacacttttgtggcaacttttccatctggagcaatacggataatatattattttgtcgattt

SEQ ID NO: 219725 - DNA, 5618 bp, Cannabis indica
ggaactctctaaactattaaattgttagcaaatttaaggtgtcatatattcaccatagttaatggtcaacgtagatgacttatgtgtacacttttatacacgtgacacatttatattaatacacataatgttattatttaaaaattataaaaaatccattttaaaagttaaagtataaaattaataaaataaaattaaataaattattttttttactttttaagaattataaacttattaaaaaataataaaaaagagtttaactttttcttgtgaccctctttcccactctctactatatcatcgtgttcttccttgccaatgggtcgaccacgacatgtgcaagaaacaatgatgacaatgacaacatgcacgatcctctatccttcccctcaaaccagtggaataaaaagcctctaaggtttcatttggtacatcgtattgtattgtattgtattagattagattatactatattgtattgtattgtattgtattgtattagtattatttaatacaataatatatttgatattgacttttattaatagcttctgtaaaattataatatattttcaataaactcgatcccaacaccaactctaggtcgggtttgggttcggtctaggtttggggtctgggtcttgtctctcgagtccggttcgagtctcgtgtcccgagtctagtctggtcccgagtttggatatcgagtttgggttagggtctcagatctatctccagtttaatctgggtctgggtcttgcgtcttgggtcctaagtttgggtctcatgtccgatcccgagttcgggtcacgtgttcggtcccaagttcacgttcgagtctcgtgttcggtcctgggctcgggtcccaggtctagttctgagtcccacgtccggtcctaggtcccgtatccgatccaggtttgagtctcgagtttgggtcccggtccagatctaggtcttgggtctcgggtttgggttgaggtccatggtccaggtcccgggttcggttctgtgtctaggttcccgagtcccgagccctgttcccggtctgggtctaggtctaggtctaggtcccaagtctgggtctcaggtctcaggtcccaggtgtgggtctggatcttgggtcttgggtctcaagtcaacgtccagtccaagttcgtgtccaatctgggtacgggtccctggatccaggtcgaagattagagttgaacctagattctttgtaaaaattataatacaagttaatacagaccattggttatgtactaaatattacaacttacattgtattaaaaaaaattatcataataattaatacaatacattgctttatctaaatatagtattattatattctttaatacaattagacccttatacgacctaccaaacgtgccctaaaactgtaaaattagccttaaatcaattaatacacaaccaaaattagggaactcacagactctaaaatgcaaaatcaaacacatatatcgggtctcatcagcgagtcgagcgcaatcttcaatggttaagaaatttctttttgggactggatcggtgataatcgaagcagtcaacaatggctaatatgaagatctcaacaacaacaacgattggtaaaaaaatgtacaaacaaatccattatccagttgttaaagagctctatcggtgtttttgttcgttcatacaaaaggatgagtatcaagctaaaatcagataaaacctagacatgaaattgaaaagagaagaagaagaagaatgagtactattaacttactagtgtttgtttttactattttagttagttttctcaactaactctcttttgccttgtaatactgtgataaaaataaagggattgtgctcatattttgagctaagcttttcagctaaattctctctatttctttcctattctctctgagttttctttctttttggtttctaccatttttggttcagcttgtttagcttctacatggtatcagttgccttcaatggaatcgtcgattccaatctctgatcctgctccacagacggtcacagcacctacactagatcggtctgctcaatctttctattctacttcctctgcctagaatccgctccctagttctctctctacttctctcacgatcaagcttgatcgtgccaacttcctttcatggaagcctcctcatttcttgatcaatggtggaatcaatcctgcttatcaccaatggaagaaacatgatcagttgcttttgtcatggattcgttcatccatgactgaaggagttcttacttcagttgcaaatcaccacacctcgtctgtagtatggcgtgcccttcaagggagattttctagccaatctcgtgcaagattactccaattgcaaggtcagttttccaatgtcaacaaaggaaatttgtctatatcttattatgttgataaatttcagtctcttgctgattctttgatcattgctggatcgaacataagtgagcaagatattattcttcagatcttgaatggataaggtgctgaatttgatcctcttgtctctagaattacttcaagaagtgattctttgacacttgatgaggttcaagccttactcatgtctcatgaaagtcggttagagcatcacaactctatgatatatctttcaatgaaacttcaggccaatcttacagttggcaacaataaatctaactcaaggagatacattccaccacctgctcgaggaaataacactgaatcttcttcaagtaatgttggaaggggttctactcgtggttcttttgtcttttagactaggctcatttgtcaattatgtctcaaaagtagacacactgctgctgtgtgtcactatcactttgacaaaaactttgtgcctccaaaatttgcccctcctcgagcctatctcactgagcttgaaatggataatgaccatcaggtacctaatactactgtcttacctgattttggagatgaaaatctctggtttgttgatataggggcaaatgttcatgtcagaaatggttctgagtctcttgatgcccccactccctatgttggcactgagacactgtatgtatgtgatggtaagactcttttaataactcacataggatccacttctttgtcctcccccaattctcatgctttacacttaaactctgttttaaatgtgcctgccattaaaaagaatttaattagtgtgtctaagataattcatgacaataatgtgtaccttgaatttcacaagaattgttgttttttcaagcacaaactcagtggagttgttcttctcaaaggaccaattaaagatggcctctatgtgcttggtgattctagtcaaagctctcatacacttcaatgtaatcttaccaaattgtctcagtctaccactgtcccaaattgtaataattgacaatgttgttgtaataatctcactgttaactcagtaaactcttgtaatgtgccccgtatcaaaaaagaaactacttctatctattcttaacattgttctccatttgtttcattaactacttttaatcaagatattaatactttgcatcaaaaattggggcatccttcacctcctactctaagcagaattttaaaaactatacaacatttgggtactttaaaagatttacaattctatgttgtatgtcgaaaaggcaagagtcacaaacaaccctatccattgtccatcagtcatgcttcacagccccttcagttaattcacactgatttatggggtccttctcatgtctcatctcgagaaggttatcaatattacatccattttataaatgatcacactaggtacacttggatctatcccttgacactcaaatctcaagcctttgatatctttttaaagtttaaaagcatggtggaaaaacaattcaatttgcctattaaaagtgtccagtctgatttgggtggggaatacagaccatttgctagatttttacatgaccaaggaattcattttcagcatccttgtcctcatgatcatgaataaaatggaagagctgaaagaaaacataggcacatcattgaaactggcttggttttactagcttaatttggtctttctttgtcatattggtggtatccttttcaatgtgttttttttacaattaatagacttcctacagctgttcttgacttcaagagtccctatgaaagtttgtttggaagtctacctgattacaagattctcaaaccttttggttgtgcttgttttccacattttagaccttacaataattacaaacttgagttcagattagatcagtgcatctttcttggttattcatctcatcacaaatgttacttatgtgaaaattctaaaggcagaatttatattgcaaggaatgtggtgttcaatgaaagttgtttccctgcttttacaacctcatgcccttcacagttcaatcctcaagctcattaccttcttctacatatgtttttcctactgttattcctacatctaacacatattctggttgtgctgcttttcaatcacaacctcctatgcctaccactaataataacctttccacacaagcccccataccagaaaaacaacccatcaaccctctcactaccctgcccattcacacaaatatcccaaaaccataacctcctaacctagatattccacctgtttctggaaatttcccaatcctatctcaccagcagcctgaaatttcaccccagcagcctaaaatttcacaccaacagcctgaaatctctcaccagcagcctgcaatttcataccaacaaccaaatttaccacaccagcaacctgatttaccaaaccagttgtctcatgttccacaccggcaacctaattcaccaaatcagtagtctgttgttctacatcagccatctggtttgcttgatcgaaatgtcttaaactctcgtgtgcagcctgctcaaacaacacaggactcaagcattttatcaagaattcacaaaatgaaaacaaggtctcaaagtggaatctataaacctaaggcctatttatccacaagacattcccttgttgagtctctaattcctactgaactaaggtccgtttagtaggctctcaaagatttgaagtggtttcaatcaatgcaaaaagaaagtgctaccttgattcgatccaatacttggacacttgtcccacatcaacctcatatgcatgtcattaacaataagtgggtgtatcagattaaacttaatgtcgatggctctcttaacacatataaatccaggttaggtgcaaagggatatttacaagaacctggtattgactatgaagacacttttagtcctgtggttaaaccaattactgttagaactgttctaactttagttgtcacttcagcttggtctgttaggcaattggatgttagcaatgcctttttaaatggtgatttccaagaaacagtgtatataggcaaccaagaggctttaaggatccacgagcatggaatgaaaaactgaggcacacactgttgcaatgggatttctacgcttccaaatcagatacctatctttttgtctatggttctgatacaagcctaataattctcctagtgtatgtcgatgatgttggaattattttacc

SEQ ID NO: 219726 - DNA, 3508 bp, Cannabis indica
taagtccgttttttcggtatgtatattatagtaggtaaaaagaaaaaagaaaatgaataggaaaggtagaaaatgttatagaaacttccacaccacacgcagccgccttccccgaggactgcttgacgcgacaaaggtcgggaactggcagccatgaaggtctgcccattgcattccccagatgactacacatttcggataggcgaacaggattcggtgctgttccgtttatcactcctgagattggaagaactcagtttcaattgttgaaatgttttaaagattaatcattctgattgattaagtaagaaccctttacctttataggatggattggttagagcttcataaattaggttcactatgtcatctagatgaatccatgaaaacctacacaactatgaaacagtcaatcttttgagatcattgaaagccaatttgaactgatcaatcacattacattccatgtttgatctcaagtgttcatgtgacaatcaaaattggaagagtaagtgtcgtgaccgatgagagtataccattggtttccggtgcctaaaggtccgccggcaaacatcttgaatagagggatcattttagctgcaaagatacatgaaataagtttttcttataatgttactttcttgaatttcgtaaataaccaagcaaaaacatgtcgtgattttcgaaagaaaggttaattagcacattttgtttttgtagatcaagtcttaattgctacattgatcaaagaacagtaatttaagttggttaaaagaaagtgtcatacctaaagctaccgccatctttcccaagaactaacaccgattcgaattagagctaacctaacatccttgtttactttgagagcagttccttcccattctctacaaacctagaaagacttgcatgttaagattttacaacagaactttcccactctcttgaaaaacattcaaaattgaagtgagaattgtattgatagcttcttttaattcaacccgaaaaaagttggcctttgattacctcagccaagtaatcatttcctgatgggctattttcatcaaatacctgtgtttcactagtgcctgaatatgagaacagaaaacatatggtaagtacaaatatattggagagtaattctcaactagaatgtgcaaatcataactaattttcacaatattttgcagataaaaaacagctcaaatatgtggaatatacaagtgctcttatccatggcttcaaaagtaaagaaaaagaatacaagaattcggggataggaacggaccatagtaaccaacagccgtggcactaaccaaaactgtaggccgaactccatctggtaaacggtttatcaattctacaatctttgcaattgttacatagttagacaaagtaccagaaataaaattctcatcactcaacatatagttacatcttttaagtgagaatacaaagtgtacgaatgcttacttttgatgtaacgccaatcctgctcgtcttgatctccttctttacctacaaaacagtaaaaattgacagataaaatggcattttttttttgtataatagcagacaaataatgacaaccgaaaacatggctgcattcactattctagcttcatttgtaagaagtttctacttaactgaactagatccgagataagtaggtatatatattcagtgttgtgaatcactgcaaataaggttaataacttaaagtagaacaacatgaaaaaagaaatttcggttaacacattaatactaacttcagaagaccatcttgtacttatgggcaatccagccaagtttacaacaccatctgaaccttggatgcagtctttccactctacctcctctgcaatccttataccaggaaactcccttgctacaaaaaccaaagaaatcttcaataccggatacaaactttaagaacatgtcaacattggctacatatctcaatgcaagtattgggataaacaatatcaatcattcactaccttcttacccggaaaaattgactcagctttagttctagatcgtgtcaagacgcgaacagtatgattatctgcatttcacaatgatcaaaagaaaactgaaagtaagcttatctgtatatacattcatattatctctaaggctctagaatataaagactacataaaaacaaataacagaatcatttaaggttttaatgtatttgtaatgatgagaaagatgagagtattacctgcttgaagcctttggaccaatcttttacctataaaccctgtagctcctgtaattgatacaatcatcttattttcctacaaagaacctaaacctaatcaataataaatctttcatggtatcaaaggcaacaaaataacaatgcccaatatgtgtgagctagtgattgaaattctcagggcttgattgatttgtgagtgaaaaactaattcaattttgagcaataaagcatgcatttagatatacaactcatcaaccatataaatcttttccaatttcctatccaactatataaaaagcaatgttgttgtacaagtaattttcaatcaaaacaacaattatgcaaaaaaacatatataaatttagatgtgataaaaggatgagcagtgaccataagaacaaagaagaagaggaggaaagcacaatatttggtttttggggttttggataatgcaaaaaaaaaaatgataaatttttgaaaataagtttaaccaattaatgtctgtgggcctccatttttgtgtttcaagatttataatgaataaaaaatggagcaaaatataatcttgactgatgagaacaccataactttacccattacctaattatgatatcattaatgaccaaacgaagaacgacccatcattttgcaaaaagattcaaactttgaagaacaaaccttggtttgatcagtggcacaacaaattctgagtctcttggtctcaaacctcttaagaaaaaaaaaaggagcattttgtgagcaaagaaaggaaatcatattgtaaaagaaagaaaaataagaaatggggtagtaaactaaccagaaggggttgaggaatgtgaagagtggtagagattgtgtgagtccatgataaagcagtgggtctgtggaactccattgaagaaaggtttgtttgtagagcttaaattaaaggatgaagcttttgtgctttgtgcatttggaggggtttttagtgtagaagactacgtagagtgatttggaaccacaccaaattttcaaaccatttccatcacccgttttatatgtactctaattaactaacactacttcttaattcttaattctttttctaatatttaattcattagtgatgattgatttctaatataaattaattttttgtggggcattatttggtaattcaaaaagatatttttttttcttcaggataaattacatcttttttttatctcgcccgataaaaagtggtgtctgtgttaaaccaatttaagtttaatacgttaattaattttttattta

SEQ ID NO: 219727 - DNA, 2732 bp, Cannabis indica
taatttattttagtattgtgtttatatctttattgtttttctccttctattttgttaatattcacaaactatttcaaattcaattatatgcaatgaaaagagaaatctttgcaaaagtttctagaaaatttacatatctaaccacttgatgagatactcaattgattgtgttgtgccaaactgttttctttttaatggttgttgtaatagttagttagtatgttaagaaccgaagacacatttagtttagttctgtaactaattttctatatgaatttattcttgtaattacagctgtgtataagtaaaagctttctcattagtgttgtcaagtttttacaaacctgagaagtttctaaactctctctagatctaaacaaaataagtgtacgttgtgatttagtaattcaaaattggtgactaaaaataatcaccctattgtaatataatgttccacaacatggagtttataagtttaagaatattgagttattataagtattatataactccactttactaattaattttgagataaaacagttttataactaatcttttctttagtttcttctttaataatcacaactctatataaagtgaataacatgtgatgcaagaggctctttataaagactttttctaaattctctctaatagttttgtctaacaaactgttattttaagttaagtattaagagtatataagtttacttcttataatgatcatgtttattgataatatataatgcatgcatatatagtaccacaaaagacaccttttacaatgggtggctatatatatatatataaaaatatatgtatatatataggaggtattacctttacttctgaaataggattcaacaattgatgatgttcctctttcattttgttgtaacgctcaataacagatttcatgctataaaaaagaatacaagcaacttcattagatttgatcacaattaatgaattaacttcaacttttaatattaatatataaatcctaaagattatactacaaaaaaacttacttttagtcacaacaaaatttgtgatatcgattaaaagtaaacaaacagtgactaattataaattatcattcatacattgtgactaaaaaatttatggctaaaagtattaagacaagttgagtatgttgggtttggagtatgaaaatacaaaaataagaatgaaatttttttttcatcttaacatgttcttccttttttaattcaaaattaaaagaaaaaaaaaaatcactcaatcatgcacaatggtggaaatcgttagattgaagtacattttaatattttaaatgcaacaatataaggaaaattaattctttccgtttctgttagtctttttcatttccaattcatgcaacaataaattatagatttagaataattagtatgattgaatcatgaatctcttgagtaatgatcaatagagttttgtgattagttcgagtaagtcatctttttataaataatatatagagtttacacatctttccatgtcaagtgaaattcttggattgtatttttttgataaataaagtgaccaaagataattctccttgatcaagaattaatgaaaattttgataaatggatcttgatcatcgatatatataatcacacaaaacttgttgttttgaactttctgcacttaccactgacatctactgtccttcctttaattttccattactcaagaaatgcaaactacctattcctaagaaaagaattaatatataggagggtactaatattcccttgatcatatattatataatttcaaagatatatgtgtagctagatttaaatttattatttgatcagtacatgcatgaaacaattgcacacgtacttaattaatttattgttttgccaacattaattaatggctagctgtttacaagcatgatgcaccacttttctttttggttttagggaaagaaatagaagaagaatatggcctctactcagagttcttgatcaatcagtattttgatcatatatatatatatatggttgtttttctcatttcaaatatatatgtacatatatactgatccagtactcatatcaagttgatgtttaatttataaacctcttataattaactagctagtatacatattaaccctatgataatattaatgtttacatatatatatttatatataggacaataacattacttttgtctctagattttttatatgatgatggtgtataacttataattatagcatgcatctcttttagaaattagatgcattaattactagggtatattctattcaaaagtggtaatttaaactttattaataatttgatcttttatttatttatttttttaaaaaaatgtatttcttttttctttaatttttttaataagatgaattcttgacccttctgcaggagggagaactggatttagtaaaataagtttattaagattaaaaatgtataatttagaaatactagtaaatgcattccattaattcattaatggaacactaatcacatctctattttgcaatatgttgtttataaaatgactacaagattattttgaatacttatatgagttagtgagagacatgtatattaagaatatgtatggttttattacaaaattaaatgaagatatttatgttaattaatatgtgtcaattatatgtaagttaattcatgatatacaacttttgtttttatgatc

SEQ ID NO: 219728 - DNA, 2766 bp, Cannabis indica
aaataaattttttaaaaacaaaaattttactttcattttgtaattaaaaaattaaaaaagcaccaaaactttgaacaaattttcaataaatttgaaggttaaaatttgaaaagcaaaaaatattaatttttttatttaacatcaacatttgaagaagaaggagagccttacgttggggatctggagcctagcgtggatgaaggacaactttttttgagatttttaaccaagtggctcaggttgtctccattagggtctgtatttatgagttttaatgcttttgtattaccttttaattgctttaaatggtggattgggatgattcatgatttgtgctatggtgtatatcttgaatgatttatgtgcaatttatgtgtttgatgaaattcctcaactaaattttatgtctttacaaaagctcacacttatcaacttatccctatcaaaaacagaacgaagaaggaagaacaaattgtatggcagcagagacaggaacaaagaggaagctaatggaagagaaagcagctagtttttccaaaaagacatccaattggcctctaatcaagcctaaacaaaatctcaagatcactcctatcaaagagtctgatcttttcacagtacatactcacttcccatctctttaaactttgcatatttccttctctgcctagattatccctcttttgttcttttttttttttccttttctggtgttttgtataatgggtttcatattgaatattatgttaagtctgctcttcaagtttaaattcagctgacaattacattccttggaagtccattttgattgtaagaccaatattatatttgggatttatgatttatgatttgtgatgatgatgcaaatttgaagaattgttagtcatcttgttagtagcatggaaagatttggcttgggaatttagtagtcttttgttaattttccttctgattagacttgctaaacaattttgctgtaaacggaagatataatttgggattctagtatatgctaaaattcaatatttctttctgggtttaatttgtagtggtatttttgtgttaggttcaaaacttccttacctctattgaatcaaatgcatttattagagttgccgagtctattggttttactcaccaagggagtctaggtccaacaatgggagaggcgtaccgagataatgatcggatatcagtgaatgatcctgtgcttgcagatacaatatgggcttctggtcttaaccaattgttctctgatattagaattcgaggaaaagttgctgttgggttgaatcctaatatcaggttctacaggttggtataattttttttccctgccttaatatttctctaaagtaatgatacacattcaaaattgaaataagtgtactctattagctgagcaagattttactttatactttgaggaaacatctgtttttaggcattttgatcactctttatgtaatgaattctcaggtacaaagtgggtcaacgttttggtaggcatattgatgaaagtacaaatcttggagagggaaagcgcacccattatacattgttgatatatttaagtggaggtgttctcaaagggaaaaataatccaaagaatccaaaggaatctcaatcagagcctctagtaggaggagagacagtcttttatgggtcaaggaatagtgttgtagccgaggtgaatgcctatatttgtttgctgcttttcttttattgcagtttctcttatacctatttctcatttttaaattctttgaatttgtatgttttacattgtacgtttactttggaagcttttgaaatagctcttttacatgatcctttatgaaatctgtaggtggctccgattgaagggatggctcttctacacattcatggggacaaatgtttgctgcatgaagctcgaaatgttagtaaaggtgttaagtatgtatttcgttcggatgtagtatttgcttaaacaccgatctaaggtgctcattgagtttgtctaccttgtgttaatgaaacttttttttttttgaaatattgaggtttgttactttgtcttgtttagaagcattgatcatcactatgtcttcattattagcacttgcaccatggacaaatcaaatgaatggcctctcctagttcttttcactaacccaatcatcaacaaatttagctagataactcaatcatcaacactttgttataaagcttcttgcttgaatttttttttatttttctttgggtttatttaattttctattatgaaaagttttcggataaaatattatattttaattgataaaggtaaaggtaaatttcattactaaaatattacaatgttgagattttatggataatgaaaagtaaaaaagtaaaattgtacatagtatataattgttttgatattggattttgtaggactgtgattttatttttattttatttttttaaatatacttactaaagaaaataaattatatttcaaatactataatataataaaaaaattatgtaaaattttatgaaaaaaaaaggtaatacacaatttaaaaaaaattaatgtaagtaaaattaaaataaatattgaaaatctacatatctatatatctatatataaagcagagatatgaggcggtgacatgacactctacaatctctctaattagctttatttgttttccccttaattctctcattatgacactctacaagggatatttgacaatttatacttaattaactttaaaattatttttgtaaacc

SEQ ID NO: 219729 - DNA, 3457 bp, Cannabis indica
acttaaaaaaaattaaaaaattaaaaatagaaaataaaagttatagaacacacttttgttaacttttttaaaattaaacaacaaaagtggttataaaacacatttttactctttaaaaataaaattttaaaattacaaattttactttcatttttgtgattaaaaatttgaaaaacaaaagtattacaaaacatcccctaggttaacaaaatttaaaatccaagctataattaggggtgttcatcaaaccgcccacaccgcacaaaccgcccgcaccaccccacactgcataaaaaatacagtttaaaattctttacagtgcagttgtagtttgtattttttgacaaaccgcgcagtgcggtttacgatttttaatttaataattgcggttcaaaacacattgtactatatattacaaaattaccaatttttataatatgattttttttttcatataagaataaatagatgtaatatatgtttatattacactattttttagagacgaatcaatataatgacttgattattaatatatatgttatgatgttaaaactttaataatttttttgtattgttaaaactttaatagattgatttttgagtttttattataatgtttgataatggtgatagtataaaccacactgtatttttgaggtttgatttttgcggttttaggatctcacagtacagttgcaatttgagaaattactaaaaccgcatatccagtatggtttgaaaaaaaattacaatccgcactacccgcaccgtgaacatccctaactataactcatggtagtgttttggtaattacataaatctcactttagtgttattttataaaaaaaaaatcaaaattcaaatataaataaataatttcatttcaatgaactaattaatattttgaaatttttattaatatatttgtattaagttagagtagttttgttaaaaaaaatggatagtttgactttttttttggtagaaatttaattttgctaatacttttgtttttatatatataaaagatagttttattttggtaagtttctactttttcttatagttaaaaatataagataaataaaagtttaatttattttttatatttggataactactatataattgtcttttattttttttttaataaaaagttgttttcaaaatgtttagatattattaataaaaaaatataaataaattagaaattatgtaaataatttaattttaaaaataacttctcaaaagtccttttgcaataagctgaaaaatcctaacttctcccaataagacttttaacttaaaaaataatttttatttttatctaaatcccttaaaatgatttttttttttttgaattcttaaagctaaaaaagaatttataaaaacgaagtcatatagaagcttctatagattagggaaaacaaaaacacataaattgaaataaaataaaaaaaaaattaaaatatttaatgatgattgaacatgaagcacattcaaaaatattttaaatagataaattagctcttgctctcatttttctctcttccatggtgaagaataaaagagtgatcaggaagccagttactcgagctaatcatgagatcaaacaggagaagattactgattgtgttgagaaaaaaccagaaggactcaatttgatagctgaaactcttcaggcaggggatattgtcgcacacaatttgacaaatgagggtgaggaatatcgagaagaagcaattaaatctctgagctgggtagaggagatggaacaagaaggatttcaagcttctgctcaatatcaatggaagaaaatcacttagggtaagatctcttattttgaacgtaagttgagtttttcaaaaccgattgtgaaggatagtcaaaaaattgctcaagtagattgtgaagaggttaaggcttaggctccaaactagaattcaacgatcatttgtatggttctaggagctaattcaccgatagcagtgtttgagggctttattaagctaatttggagacatttagggattgctcagattgttaggatggcaaaggggctcactatggtgaagtttaatgatgagacaactagagaccatgttttggaaaatggtatgtgttgacctcatatttggtcaactggcagcggagccttatttatgatcaaaatcactacgtgtaaacaattaaagcaagtaaataaatagatacaacaattttatagaggttcgccctccttggttaacgggtagtaacctactccccttttagttgtattgatttgagagataataccactcagattataggcttttacttgtaatttttagagtggctctctatgaatagtataatagcgagactatgttagacagatctcgaatgagtgagatgagaaaaagacttagtgtatcacagcgagactatgttagacagatctcgaatgagtgagatgagaaatagacttagtgtatcacatatagcaaggggcatgtgagagagggagagctagggttttgagatgaaagctttagcactcaaaagcttaggaagtagaacttaagtttttagtttagcctaatgctctttatataaatgagaaaagatctagttcaaagtaggttaatatcccttaaaatgaggagatactacctctttttcgtatattaaatatatagaaaataactaattaattgttcctaaagaataggtaaatatctgaagttgaactcctacttttgtgggttgttaaagtagattcgcagctgagagtgagccattgtttgtctagggtgaaagctgcagaaacatcaattgtgtctgccaatatggaagttggtccacctaccctttgctgccgatacatgctactttatggcgggccaggggtggtccagctagaccctcctagttggccattttgttgtatctttatcctgcttgaacatatggactttccgtcaactagtaagttgtgcatgatgacttggtcctcctactaacaggtggtactccacatagcatcaatcttgcctatgtggacatgccacgttatgtggacaaaaattgggataaaatttgtccccaagtccctatgcggacgtttgtacagatagggactttccaacttcaattctgactgttgaagtcttaactgggcagcttatggtgggtcagatacttgggctcttcatatgacaacttcaattataggaactcttttttgttgttcatgttgccactagggaactattgctcttctacaaggctatttggtgggatgtgtaactgcctactacatgtttgaagaaaggggcatgccagaacctatataaggttcatttggaaatacttcactttcacgctactattctctctctatcttcttcaaagtctcttgagaaaaaataaaaaggaagctctccattttccttagaagcccgacgcccca

SEQ ID NO: 219730 - DNA, 2928 bp, Cannabis indica
agttttttttttttttgtgaatttaggaagtataagagtttactgtcgagtgaggccatttttgcctggacaaccaaactctttgagcactgtggatcacatagaagatggaaacatcacaattaatgccccttcaaggcatgggaaagggagaaagttgttcagctttaacaaagtatttgggccatctgctactcaaggttagtaacattctcatgttgttgctctcttaattgttgccaagttatcttgttcttattttaatatcatcatcattatcattttttgtagcggatgtattctctgatatgcagccacttattcggtctgttcttgatggttacaatgtttgtatatttgcatatggccaaactggatcaggaaaaactttcaccatggtacagtacaagtgtttataaaattcaaatttatacactgtcttctgcaatgcaatgtaacattttctttttctttttgttttctcttcatatgtctagactggaccaagggatcttacagagaaaagtagaggtgtaaattatagagcattgggggatttgtttcttatagcagatcagaggagagatactttccgctatgatgtttctgtccagatgatcgagatatacaatgagcaagtcagggatcttctggttactgacggaactaacaaaagatatcctttttaacttgtgtttattgagctataaacatatatctatattacaagaagtatataagctacatgaaacttgtcttttataattttatagttgatagtatggatacctaagagggatgactgaaataggtggtatgcttgtttagagtccttttttgggtactgcatagtgattgttatagtttattaaacagagtcttcctactagggctgttttttcttaactaataacacattagaaatccgtgttagttcccagacaggactaagtgtaccagatgcaaaccttgttcctgtttcatcaacagcagacgtaatagatctaatgaatcttggacataagaatcgtgttgtgggtgcaacagccttaaatgatcgtagtagtcgctctcataggtaacaatctatttatctctttatttgcgtacttgtgtacgtagtttttctcatgcatggaaaaatttcatgtcaactagctgacgtagttttttaactaatgatcacatgcagttgcttgacagttcatgttcaaggaagggatttgacttctggagctgtccttcgtggctgcatgcatctagttgacttagctgggagtgaaagagtagacaagtctgaggtaacaggagatagattgaaagaagcacaacatatcaacaaatctctttctgctttgggtgatgtaatcgcttcccttgcccaaaagaatcctcatgttccttacaggaacagcaaactcacacaactactccaagattcacttggtaaccatttatttgtttccattcactcatgttttgttctcttgcttttctttcgaaatatcctctgatcattgatttgtggttcttgtcaaatatctataggagggcaggccaagacattaatgtttgttcacataagtcctgaacctgatgctattggtgaaactattagtacacttaaattcgcggagcgagttgctacagtcgaacttggagctgccaaggtgaacaaagatgggtcagatgttaaagacctgaaagaacaggttgagttttcaattttaatattctcaaaaccttccctttcccatccattactattgttttagtgtttttgataactctgactggtgcagattgctagtcttaaggcagcattggcaaggaaagatgatgaagatgaccacaaccaactatctgtctctggcagtgctaataacaagtacaggacaaaagctagtgaagtatctccttttcagtccaaacttcagagttcagacatagaagtaagaattttttgctttatcagtttttgcacattactttcttcatctacttattcctaatatgtaatatctggttttgtacaacccaattggggtagctcaaattgttgtattttcctgtcttcaaaaatctggtttgtacctgattgtgtgagagttggtctatatttatctggtttctttctgatgctgcagaatcataaaaactcttcactgaggcagaagaggcaaagctttgatcttgatgagctactggcaaactcaccttcatggccacctgtgaatagtcctggccataactatgtggaggaggagaaagacatgagctcgggtgagtgggttgataaagtcatggtgaacaagcaagaagtaagcagggttgaaagcaaccctttaggaggatgctggggaacagacaatggaaatttatctgacatgttgtaccagaaatatcttccagattctacaaaactctatcaggaccaatcctacaacatgttcatgggaggaaacaaccgattcaatggcagcggtgttagtactgatgaaatggatgatcttgatgctgccaccagtgactcttcagagccagatttgctttggcagtttaatcagaccaaactctctggcataaccaatgtcattgactcaaagaccaagaaacttaatacaaacaagattgccaagagcccagaactaaggtaaagaaaagacccttgatctgtataatccatttatttctacttaaaacaactaaacatgatttttctaacaagttctcacatttaacttctacagcaagaatttcaattcttctctgggcccttcaccttcccgaaaagcttcaaatgcagtcccacatcggatagggaggcagccagccccggttgacatgaaacgcaaaaccgggaacagaaagtagaaacaaaagagtgtcacactatcgacacattgagtggtgaatatatctatgtat

SEQ ID NO: 219731 - DNA, 2477 bp, Cannabis indica
aaaactttaatatttttcatcatcttctctccttctccgcctctcactcatctgacttcgaaaatgctgagatcgaaatcattgcgaggtgatgcttcgacaatggggatggctatagacgaataaatcttacggggagagagaaaagtggcaaatctgattagatctcgtcgacgacgagcggcggggctaacaacaatgacgagatctgaacgcagatctttgggcgacaatggcactaagctttgggcggactgggcatagcaggttctcaaatagcttctaagtttcaatcaaagggtggcgacgagtttgggatctcgaacggagcaagcatgccagttgtacagtgggtgcttaggttcgatggtaatgatatttatataaaaagatggggatttttggcagctttcttctagtaatgactttagcaggtatttcaaaaaacttgtcaaattgagaagcaaaattgatttgtaggcttcattagtggttggtagttcggggagatttacagtgaaaggtttttatttgtccctcattctcgaggctaaggtgagctactatagattgatttggcatttcttaaatattgttttattttatggaaagctataaatagctatctcttaacctatgataagtttgctaagtttttgagtttggattcatatctctgcctggtttgtaatttgatatacgaactcattctcacatttttttttattgtactttcatgaggaagttattacaagaggttcacaattggtttggtagttgtgattggcctgagagcttcctcaactaattatcaatgttcctcgattgggtatacccattttttttaattttcgtgttttaataataatcgtcgcctattgttgtagctaatgttcaaaactgtcgggaatacttatttttcccaatggttttaagcagttgcataatttttttagcaacggtcccaaaaaaaaatcgttttcaagaccgtcgcgaattcgaatatttgtagtattagttagttaagatgcccaaaggaattgttccaacgatttatataatggtgccggttgttgttgtgtattgtgtttggcttaattaaaatcgttctgtttttgaaagtttttgttgttctgttactagttcaagtaggcaaattaaaataattgttaaagttagaatttcattttgtaatacttcaagctaactaaaaaaaagagaatgatatactaattgctgtgcagtgtgtattgttcagtggttgttttgaatgaaaagtttttctttattttatttttttaaaaaaaaaccattaaaacagcatataataacaaaaagacaacaagattatatagttaaaataaaataacttaaaaacatcaatagtttgtatattttgtaaataaaaaactataaaaatatttaaaataattccgtctaatcgtattttgattaaattttgaagaatttgttgaggcgaacatgttaattggcaaaatatgatagtgctatattattggagagaaatgaatgtcattctaaaaatttgtattaatgtcatacaatacaatgacattgatactatctgtttcttaataaaaaattatagtaaataaaattataattcttgaaatgtgctatatcattagagtatttttagaagtaaaaaagtgggcttgaacataaacttttataaactgttcaattagaataacccacccaaactaaatcgagataacccgacgaaaaatataatcgaaaaatcgacgaaatataacctgcccaatctttatattgggtatgttaaaaataataccaactaactcgattaagagggtttaatatatatatttatatgtttttattgtatataaaatttaaactaatatatttttttttatagtggttgatttgaactttgaattcaatctatattgtctcactattataattaactaaaatataacaattgaaatgtaaaaaattaaaaaaatttaaaaaaatattagtggtcggtttggataggttaacccgaccaaaccgaccaattatattggacaagttattattttttttaattgagcgggttgcacttagattttttataacccaatcttttacattggattgaatgaaatatatcataaatcgacaaaactgactgatgtacacccctataaaaaggtgccaaaagagtattttgctgctaaatcctctcaattatcactgtacttaaactcaaatcttgacgataaaattctccaaactattaaactgttagcaaatttaaagtattatttattttttacagttaactaccaatatagactgcttatgcgtttacttttttacatacgtcacatttatattagtatacctaatattattatttaaaaatataaattattttaaaatttataatattttttatttttattattttatttaattttcaaatgaattttgaaaataatttt

SEQ ID NO: 219732 - DNA, 1600 bp, Cannabis indica
tataatctattgaaattattgtaatagagccaagcatatcttagctggccaaatgggctttgacagtgaaggatcgtagtgccaaaattcagtgaattttattgtcctttgtttctagtttcaaagatctttgtccttaggtcatgtagaaaaccctttttattattgctttttatttataataataataataataataataataggggtttctatttcttatttgaaaaatatataataaagtaagatttaacaatttgtttgttttcatattccagttgtatatgaaagtgattattgtttttatttaatttttctctatatgttgcttggttttgaatgaattcttaattctttataatgattcaaactaaaaatcttaattcataaataatttaggtagagagtcaccctaatatttattaggtatatttaatagattatcagtttttcaattcaaattaacttcaataaatctttattcaaaagtttaggcttatgtctttttgatctcaatcaggccgagaaactataagacatttacttgggccagcacaacaaatacacaaattagaaatctaaagagaatttaattttgtaaaaatgacaaaagagtatctggtttttgtgctttaaaacttgttatgggccacaaaagtgttgattgagacttgataaggctgactctgatctagcaattacggtggtccaatacaatagctgatcattgacttattatgtgacaactcatcatattattccaagtttccaacacttccaaaccctaaatagtctcatgttttgcttacataaattattactttggacaattttcttctttttattttctcttcttaatataaataataagtaaaatctatatcggcaaaaacaatagccaatttcaagtcagtcatctcttacaagttgcatataattgattataaaattacaactactcacatataaatatactattatatttatatgtattaatggttgcccaactttattttatattttgataaaaaagaaaaattatatatatattttttttttagggagagggagcccactagagagaaagaaaacttatgaggttgcaggagtcattgcctaaccaaattgcaacttcgtctagccctgaagcccagtgagccagcttatctgcaaatgaattagcagacctattgatatgcaagatacgggcatcagggagatgagacaaagcttccttaatttgtctaattagatctccgaacactgataaatcttctttggggtgacttggagcgtccgtaatagttttacaatctgtttctatttcatggacaagaaaatgctcgtcaatacaccaacgcagcgcctggagaagggcttttgcttcaagggtgactattttcctgcctcctatgtacggggttgcaatcgctgctacaacgaggccatcactatttggcatttgttttttttttttttttaaatggataatatttgccattgttaaagtctattttgtattatatatacttgtaagtacttgattaatctacatcatccatatgtctatgataacctctatattcggataagattaaat

SEQ ID NO: 219733 - DNA, 2907 bp, Cannabis indica
atttaataattttttttatcaatattgttatgtattttaaattttattccattcttattccaattctcattcctattcatatattttcattccttccaaccaaacgttacttaacagtctaattgaaacattcatcctgattgaagattttccgcggttaacatcagctaccatgagcacagatataaaatttcactcatttgacatcgtctattgtagctcaaaaaatgtcttagaaataattactttcttttctgttcttcaaatgatttatgtgtacgtttttcaattgttggtattcattaatttgcaggtttacctatatgtcatacaatacgtgcattatatttataatgttgttttgataatatatcttgcagggaaattttcaactggtggcccaaagaaaagcgaattaaagattggagagtcatctgctttttttacctatgtgaaatctagcataatcaagaacaactctcaagcagttgcccatgctgaagcccatgctgcccaacaattgagatttggggagaaacgtcaagcgtgtgataacacagaggtagttgatacccaagcacatgaaaatggagaagcatgggagagttattcacagggagatgacatgccaagcagcactagtttccccgattctcattcattggagagatcttgtaccccccctacgcagatggaacttccaaatgaaaataacattttgaaagagagattttccaaagtgcaagtgcatcatgaaaatggagtgcaagtgcatcatgaaaatggagtacaaatgcatcaaagaaatggtcctcgacacgaggactctaacgtacctgctcaagctgcgtatccatattgtatgtcaggggttgttaatcaagttatgatttcatcatcagctcaaatatgtcaaaaaaatccccatgagttgcagaatcatgctactacagtaatgatgccgcagtacaatcatcttcaacaatgtcctcctcatctagctgctgggatgacatcattcccctattacccagtcagtgtttgcttacaaccgggtcagatgcctacaaatcattcatggccctcttttggaaattcatcttcccctgaagtgaaattaaataaggttgatagaagagaggctgcattgataaaatttaggcaaaaaaggaaggagcgctgttttgataaaaagataaggtatgttaatcgaaaacgtcttgctgaaagaaggcctcgtgttcggggccagtttgtgaggaaggttaatggtgtaaatgtggatcttaatggccaacctggtgctgctgaatatgaagaagatgaagaggatgatgagccacttgcatctatggattctacacccgaagaaggtggttctggatactgatatcaagttgctggtcgagggaggatgcttctatgtcataagatgcgatacttccttttctcttgtttaaattatcttgtggaatttttgcatctttacctgctcgctgggaatggtggggcatgaatttaggggaatgcatcattgagagggaacacagatagatgaatttggaagcaaatgaaggaaatcaaatgttgggatacttaagttggcaccaggtgagagttctcgaaacaaatatttatgcaaaatattgtatgcttcagaaatcgtccatgctgcaattgcaagcagtttgctctcaatcaaatcgttgtttaaaaatcaaatctagtagatggttcttcttcttcttcccattcttactgacaaactgtcgaaatttcttaaatgcataaattttaatatgtaatgaatttcgtattagtgaaacatatttaaggttctgtttttgtttcgccattccttcttatccacacctgtagccaacctgtatggaacaaactcgtttaacgaagatccgtatcttaagctatgttgtatacatttatatcactctttcaaatgattatatatcgactttaaaaagattgggtagaggaacattgcaggagtacttctactgccgagacactaaataaatttatggttttatatattatttatgaattgtgttatttatttttttttttttgagaaattcattgcacaaactcaatttcctttacaaactaagagcaccacatccaataagggaggcctcggtatgtatctatacaaaattacaatgtattaaaccacattacatcttccttgcttacttttcttggtcaaataagaaggattttttgtttgacatttcttttgatttgattcaccacgtgatcaacattcggggttttattttgccatatcaattcattcctacttctccaaatatggtaaacaagactggcaagggcaactgccatcactctccttctgaatctactcattcgaaccctctgaatccacctggttatacttgataattcttgagttgaactcctccactgtagctagtgtgccacacctgtaaaacactggaatgcccagctacaagtaaaaaatagatgctcctttgattcctcatgattgcagtagaaaacacaatcgacattatcaataatgccaaatctatgcaacctgttcttagatctcaattttccatgcatagcaatccataggatgacactatgcttaagtagattaaatctacctcaaaccagttcactccacctcagcttctcctgagcaggacaaaataaatcataaccagttgctatgttgtaagtacctgtctcgaattgatgagtgtccaccagagagctaatttgattcttcagtgccactattcttctccagtaccagctcccatgtatgggaattgagtaggaccaccaatttgtttctttgatatagactgtgtgcacccatttaacccacaagctttcttcctttttagctacagccca

SEQ ID NO: 219734 - DNA, 2820 bp, Cannabis indica
aaaagggatccaatcatattacatataatacattatattaaaaaattatttatattagcaaataattatagtttagttgattgagatgtatgacatattatacaatgttatgggttcgaatcccataacactctttttaaaaaaatatttatatgtaataaaaaatattttgattatatttttactaatttttatttttgttcgatttgtaattggttgttctgtatatttattttcataatgttttgttttgctattttattaattggtaccgttgttgttttagttatttcaaatttttagttgtattaaatttataaagatgatatattatgtagtattaaatttaaataaagctttatatatagtttttagatattttttttttatatttttaagttaatataaaaaattaaatatgtaattaaatatccaattaagaaactaattcaattcaattagtaatggaatcggattttgaaatctaattggattgaatcggatgataattatttttcaaattcaattaataattaaattgtcacatacaaaaaattactaactaaattaaattgaatttaaaaaaatattaaattggatcatatagccctacagatagtacaaaagactttgtacaccttagtttaagctatattaacttcatatttattaaatacatgataatgtaatgatataattttcgaaagagagccaaaacctttttgtcggggataaacatgattattattacttaaaactatagctttttgttttccgaattttatttatttgtttagtttttgtttttgttgaaattccataacggacatcatccatgtgcatagtctctgtcagaagtcagggacgaggttttatcaggttggattctgttctaaaaaaacaaacaaaacaaaaacttaaaattaaaaattgtaagaattattatgtataagtaacttattttttgtctgaatataagccatataaattctgtagcagcacgtggttttgcaacaaatatgtgagagttttgcaaaattgtaggctattaaaaagtgtgttgataaagtgagagccaagctaatacggaatgaactttttatccaataaacaaataatattgaaatgactcgtgaatgtgcatgcatgttagatagttgtaatcacttttgttttcttttgcatattgtgtacatatgttattaataaactcgaccaataatacccaaaattaaataagctatatgtacatttgtgtttttttttcttctttggtacactgatgtatttgcattatataatattgtattaaattatattatattattaatattatttaatacaatactatgtttattattgacttctattaatagattgtataaaattataaattctttacaataaactcgatcctaacctcaatcacgatctagacttgaactcggacctagaccctgaccaaaattctggactcgaaacatgtcccgaacccggacctgaatcgggacctactccccagactcgaactcggacccaaatctcaaacgcgaattgggacttgaaccccgaaccccgacttggacccagactccagctccaaacaccgaacccagacccgaactaggacccgaccctttagccccagatccgaacccgggaccttagacctagacccaaacctaaacctaaacccaaggtctggatccagatctaggtattaggattcatgccctaaaagcaagtaattaatgtatattatattagagaatatatgaaatacaattataacatcaatgatacattaattataatattataattattaaatatctaaaaaatttcttattcatatggtgaatgtataatcttgtaaggatgtacaagagattaaaaacgatataaataaaacaagtcaatagtgtattgaagtaatgagaatctttaatatggaactgcttagtacggtttactatacactatacttctagtgtgtgtgattttgattcggatcacatatatggatagacatgtagtaaatgtgatgtgtataattcaattatgcatgactagaccgatatgtaataaacatctttcattaacgtgtcgtttaccatgaaagaattattcatatcacaatgatgataattagtatatcagcctaaatcttgagtatacatgaactcctgttactgtttattgaattctttgattcactcgttaatgtttcttaaagaaaataattcttacaacttctattttggaagcttaataacatgagtggctgggaacatgttatataatagtggaatccaatctttcctaatagatcgaatattagttctcttatagtattaattctgatagtgctaacagttggatccaaatctataataaattatagattaactgttcatattgaattaatgatacataagaaatcaagagataattagaaggataaaatagtaattttgattaactctaattatgaactaataatttgagggtgaactgcttatattgattatatcaatggacaactagaccgaattctataaatataattctatattgtcttatattgattatatcaatagactactagctacgaattctataaatataattctatattgtcaaagagtgcaattctatatttttgtggagcaataatgaaattaataaactatattattctgttgctaagatcgataatgatcaagtatttattggagttttaaaatataggtccatgatccctaagtcacctctatacaacactgtgcagagaaaaattttatttgataaatgaatttg

SEQ ID NO: 219735 - DNA, 4632 bp, Cannabis indica
catattcattgttgctaactcaaatttaacttctaacattacttggtcttggtacaaacaacaaaagaagagcatttgggaagatttcttgtttcaaagatcaaaaggttttgagacgaggtgcaagaaccgtgaagaaagttaagcctttggacagtgttctgagtgaaaaggagctttctaatatactttggtggaaggaggtatgttagctttacatcttttgtgcattgaaaatttagagagctaactgttaggtcttctaataggcattctttaatcgcagaggatggaagattgcagaaagccttcaactgttcagctaattaaaaggcttgagtattccaatttgctaggcttggatgttagcttgaaaaatgggaagtgagttctttgtctatctaaataatatttttatgtcttggaatcctgccatcttttgggtgcttcgaaaacaaaatgtaaagacggaagatttttaaaaaagttgaggatgctgaaaatttggtttgttaccactaggaagtaaggttccactttcattgattttatattatgatcttattttggaaaaggtgtcttgtatttttcattctttaggtggtataggtattggaagtcttctcttctctaaacttttatttgataatatttcattgtttctgaactaaaaaagaaaaattaatataagtcatgtaattgtctatttgttgtattgtcattaaaatgaaatacattgaccatcaattaagttaaaccttgcattgtcattttattgacagttgtttcataagaaatatatacagaaatacatttgaagtggttaaaaaggtgagttggtcaagcaattgctcttataggtgtgttgcatctgatttaagagaaattttcttattatattttctgttatcctcgatttgtgctgtccctgtgaatttctatacttagttttcatcatttctttgcttaatcttatcttctctgaaagaactggatttttttttgcctgtagtacaaacaacggtattcaaccagccaactatatcctctattaagatgtttttctgtgactgtgaaaattaacctcccctgtttcttaaatcattgtagagctaatttccttgtttataaatcactaataagaaatgtattgccttagtttgaaagaggggtcactcaactgggagatcttgcaattcaagtcaaagtttccacgtgaggttttgctctgcagagtatgtattgtcttttttgccatattgttggtggaagtttttttaatttgtctcatgtcactgcgaatctgtgtgatttgtggaagtctaacttttttcattcagtgatgggtgcataattatttttttaataggttggtgaattctatgaagcactcgggatagatgcctgtgtcttggttgaatatgctggtttgaatccttttggaggtcttcgttcagatagtattccaagagctggttgccctgttgtggtaattaaatttatttaatatgcatcttgtgtttattttattgcgattataggtttatcctaaatggtttgtaaccatttgatcataacatttgcagtatgttatatatttaggaaatgactagttgagagacttcttcaatagtttggtatatcaagattgtttttagtctttgcaattttgtttttccacaatgactcctttcttgtttaccaactaccaagttcaaccattaaacccaaaataaatatactttttacatgttaagtttttttacagtgaattccttacatctatttctttattccttaactctgtttctttcaatgcaatgtatttgcagaacctgcgacaaacattggatgacctgacacgtaatgggtattcagtggtagggtaacatgttatgcggttattcttacttcttctatgaaaatgttggcatacttaatataaccacccataggtttttgccgtacatgtactttctcttgttgtcccttgtcattcctaggtcccatgaatggttttttccccttctatgaactagaccttttttaatgtgaattgtacttagaagactttaaaattcttgcgaagtagtctttctcaagtctcaactaagcttaaccacactcaacaccatactaagtccatgcaaaaaggatttttgcaaagtattttaaaaaataaatctttcattgaagtttacttttaaaagtttttaagtgttttttatttccttttctatatatatatttcatgtcgacaccatactcatccatgcagtagcatattttgggggatgtgagtacttaactgagcatacaatatggattctctgatctttgatgttatgatgttctacatcttgtagattctgttcatcttccttccatgcatgcatagctatttcaaatgaattgaatatttgctgagtgctattgctttggtcattgtagtgcatagttgaagaagttcagggtccagcaaatgctcgttctcggaaaaatcgtttcatatctgggtatctttattttcttaaaaaagtatatacttgcatggtcaatactcaataacatgcagttttatgctttacattaattgaacttattgatgttgttgtagaagggatttagtagtaaaattgattagttagaagaaaatgataaaaagattattgaactcagaagctggttaggtgtaaatctatagaagattccattttatatgtacatgatgtgtcatagttaacaggcagtcacacttttgaaaaaattgaaaagagcattgttctgtggacacacatgcatatgtcatctttgatataaaaacctcctgtcacgatttcttcaaacaattttccatgtcacaaacccgatttgtttctgcaaatttgaaatatttctaatatcatgtagtgcatatttttttgctctctctttcttggttgcttagatagtttcatagtctcaagcagtccatactttttataatcctaattagttaagttttgttaagtaaaggtgcacatattaatattcaatttttcaatctgctgtccaaatttttcaactgacttttgttgttcattatgcttgatgtgcatcaagcaattttcaaatggcagacgtgcatatcttgcttctgacttattttcttaagcatgcaggcatgcacatcctggtagtccctatgtctttggactagttggtcttgatcatgatcttgactttccggaaccaatgcctgttgttggtatgacttaaacactattacaaaatgcatttgttttggaagatattatgcttaaattaataatctttttttttgtttccatgttgattttatttcctttgtatacaaatcatttatgcccctgtctcctggtgtttttatgaagtcaaattgctatctttgtcacatacgttgcttcatttcatcagaggaaataattttatttaacatcaattaaaagggattctgattgattagataataaactatactgtcattttaggtatatctcgttctgccagaggatattgcataaatttagtattagagactatgaaaacatactcatctgaagatggtttgactgaggaggccttggttaccaagcttcgtacgtgtcggtgccatcatttatttctgcacacatcattgaggcacaattcatcaggtttgttcaaacttcttaactaattgccaaacatgcatcttttatgacaattgtacggaatgttgcataatgtaccgtgataaaatgaagtcttttcacaatttctgcaatgaaaaatcaagcttctctttgtttcaatgacacaactcactactttaactagttcattagttgtctacatatctagctgctatatggcctagtaataggtcacataaagctccatgaggatataatttcttgttctattaaaagcttgccctcacaagggcggttacctacagtgctcgtgattatgcatgggctttagggcattaatctcaatgtattttagatatctagcttcaatatgttgatgccccttcaatttgcagtttgttatttggctgaataaaatattgggtgatgtgacatgattgataaacaattaggtcaggtcatagtcacacacttgagaagaagggaaagagcagaaatattaaatatttaagggctaaatcaaagctatgaaaaccatggagacccaacatctaatctaacatttagtgtttgaaggtttacataaattttgtttgttcataaccaagaggggtagctcgaacgatcaagcatttggtttactcctgtaatgtctgcggtttgagtccctccttgacacgtacatggaaattgttgtaatgtttttcttcgcaaatattgtagggttaggcggggagcctaattaaaaaaaaaaactagtcatctgtaatttttgtctataattttctttacttctactgtagtcatattaacatgtaattggtgttcatgttttatttctcctcttttgtctcctttgtcaggcgacttgtcgttgggtaggaatatggtggagggagggccgtactatggggaggaatgtgttgtctagtacattttgtaatggtttggtatggtcgaatcctgtgactgacctctt

SEQ ID NO: 219736 - DNA, 2813 bp, Cannabis indica
  modified_base (2803)..(2803): a, c, t, g, unknown or other
agttatttaagtctaaataaacatatatcttgttaggagttatagctatagaaatgattaattgattaattcaaatatttatttatatgtgaacagagtagaacttcaacttatcagttggaagggatatgtgaattaaatgcagtagacatgaatgtcccacttgccacattcaagtgtttcattcttgaccacatatatttgactcaatcctttctcaacatccgaatcatatgcatttttacatcccataaatattctgatcagtattacgaaccttttttcaagaagggtccagtactccactgctagaattgagaattgagaagtttgccaacctgttttggcccaaattgttcattccataattttacccaactcacctctctcttcagattcagctataaatttgaaaactctagccgcaacaaaaaaaaaaaaaaaaaaaaaaaaaccaccgcaggtgtaatttgttttcctattccaaagtacagccgttaccaacaaaaaaaaaataaataaataaggacaaaggatggccgtacatccttacgagaggctaggcttaattgggattgagagagtcacagtatgtaagtccttttcagtataactgtaaaaccaatctgggacaagctaatgcaaacggagaaagacaaagttaatacatttaagataggggaattaaataatacctgcttaacactcttctcattacaaaaaaaaaaaaaaaaaaaaaagggtcatatttcccaaatattctatagctcttggctaataaaaaagctctacaagaataatggggccacatctacgaaataacaactgcaaagtggaaggagaaggagagaaagatactttttacctaaagaaggccacctactatcctctagaataaagcccctatacaatgaagaaataaaaaaaacaacccccaaccaatgactaactataatttcacaggaaaaaaaatcgcccccaaattatttaacgatgattttcctaatgatctttgcttcgtttttctggcatctctgtctctttctacaacaactggttcatcgaccagaaacaaacaatgaattgcttgatgcttggttcccttcaacctggacttttctgacctttgccttgtcaatgcgtgctcgtctaacagcttcttggacctggcgatcatggtccttaagcatctgatccatattactagaaggaacgagcaatggacccgagtaatgaatcttatgaccttttgctccatagccaatctatagatataaaacaagaatcacacatccagcattaagaagacagcaaataaataaaaatgttttactagtttaaatgatgatacaacttcttaaaatagaccactaacaagactgctttagcaattttaattgtgaagatgctcgttcaataaactataaccaaatgaactcacaataataagcagaacataattataagatttaatgaattgagggaaaattcgagctacttacaagaataggatctttactgctatgtcttccatcttcttttttattaggaccaacagcctgtatgtgaggcttctgatcttgcagtaaggaatctgagccctccttgaacgaacccggaaatcttcccatcacttttgaaacttcaggatgtgaagaactagacctatctctgtagtcttcagcaagcaaactccttcttgctgccactagacctgacatagttgacaagtcacccccgacctgagacctttggagcctcatctgtgttcttagaagtctttgcccatgcagcacgatgagccaatggcccagagtgggacgctctcttgtgattgaagctctgctgatcaacgcttacttccacagcttgtgacggtctaggtggatcaattggaaaaccagaagcaacttcttcaggatgagggttaaacttctcactccggctcttagaattggattgacaccttttctgtattgcagaagtcaacacagtactttcatttactctgttttttttttaaactaggatccccgcctaaccctacaatatttggggaccacgaaactatagcaattgctatgtaagtacccaagaaggaactcaaacctcagaccttgtgggagcaaaccacatgcctgaccatttgagctacccctcttgggtaatagcctttaagcaaagccaagaaagaaaggtacatagaaaaaaatttagcaaaagaaaacaagcataaataataaacaaaaattagatgcaataatttaatgtcctaaattcaactgttccaaatgaatgatctgtaaatcataatgatatcaagaatttctatagttcatagtggcatcagaatcagatgaatgcttgaccatagaaaattcttcacataatacctgcattgatacaaccaattcagcattagcatcaggagcaggaatggctcgggactctctggttctcctctcaggatcaggtctctggcccttgtttcctgctgctccttgtcttttttagtccgagcaaaaataggattgtcagaacaatcacaaattacaacatatgacatgaaaatacattcacagagtttctactaaattaatttgaccaaaacaactcaaaaaacaagcacaatctccccaagtgacattaaaatttgaaacactaataagtgcaacgataaagtgtcactacttgcaatctctagactttataaaagcacaagacataaagaaattgcaactagcaaactgtagacttcatatatttatttccattgagctgccaaaccaagcctggataggcntaagttgtgg

SEQ ID NO: 219737 - DNA, 3520 bp, Cannabis indica
ctccaaagtgttccaaatcattcacacttgattttgaaccatttatgcaccttataaatgaataaatcaagtctcctaacaactatattttaatagctatcattcattcacattcataataatagtaacatcttttacatttaagagtgaaaaagagatgagagttacatattcaagtgatcatcaatttaaaattatattatatttattataatacacacattttttttccctatataatattaaaaccatcaaaacaactctctatctattctttcaacaatctctctctctaacattttctttgttgtgatgccttcaagagttttacaatggttaagccttgtaggaatcatatggttacaagccattaatggaaccaacaccaatttcccagcttactcttcccaactcaaacatgccttctccatgtcccaactccaactcaacaacctcgctttcgcctccgatgccggaaaactcttcggttggttttccggcattgcttccgtttaccttcccctttggcttgtccttctcataggctcagttctcggtttaatcggttacggtctccaatacctctccataactaaccaaatctcatctctttcttacatccaaatcttcattctcaccgtcttagccggtaacagcatatgctggctcaacactgtctcttacctcgtagcaattcgaaacttcccccgccgttaccgtcaactcgccgttggtgtaacgacgagttatcaaggattaagtgccaagatttatactgacgtggcaagttctatcttctctttcagtaacggtactactaagaaagcccaggcttaccttcttctcaactctgttttaccactgggagttaccgttataacggctccgtttgcaagagtaatgaaagtaggaacagtagccagggatggtggtggagacatgaacgttgggtttgttgtaatgtttgttataactataattactggtgtttatgctgtgattagtagtttggggttgattatgtcaagctctgctcttaaaagggttattggtacatgtgtttttctattggcaccgcttttgattcctttggctgagaaaattcgacaagtgtttgagaagtattatagcagtgtgattaatagggagaccagagtttaccattttactatagatgatgaaaatagtaataatgatgtggaaactgatcgattggatcgtgagggttccaaatctgaacgaggtagtcaagatgatcaaaatggtagagaaagagaagtagtaataatcaacggtcaggatgatcatgatgatgatgatgatggtgttggggctagagaggagattggagttaaaaagatgttattaaggatagatttctggttatattttttctgttatttgtttagtgctacacttggtttagtgttcttaaacaacttgggtcaaatagctgaatctcgagggtccaataatacatcttctttagtttcattgtcttctgcctttggattctttggtcgactcatgccttcacttttagactatttcttctcaaggtcagtaaacaaattcatttatgtatttattttgtgttagttgacaaaatgaatgtggtcaataaatttgagaatctacttttgttgaaattataaaacaaaaaattgatagctctggtttttttttttttttcatcagaaggagaaagtcatcagtggtttcaagtccagctttaattgctatcttagtagctccaatgggaggagctttcttattattactcaactcaacacacattgttttatacataagtacagctattataggagtttgtacaggagcaattacttcagtttcagtttctacaacttcagagctatttggtgctaaaaatttctcagtaaatcataatgttttggtagctaatatcccaattgggtcatttgtttttggctatttggctgctcttctctaccaccaacaaggaaatgggcgatcagatgggaaatgcataggaacaaaatgctatagagacagtttcctcatttggggttctctctgttttcttggcacgattttggctataattttatgtgttcgtacacgcaagttctactcccatacatcataattatttatcataattatttttgtgtcacaaatatatatacatatataaatatatactatatgtctatatttatatatttatatattgtatgagagtacacttttttcttcatcagtgtctcaatgaaagtgtcacatatttttggttctgtttgtataaatatacctcgtttatcttgtacaagaatgagtacatagtagggacaattagaattaaaatctgaatatatattgttatatatatatatatgtattgagatttcttatttatgataaatgcaatacttatttatttagatgtattattgttcagtttttgatttaatgccgttcaataatagagaactctttatcatatgattaaatcttcaagatctattaaaaccaaaccataacatatgcatgattgttggggtaccaatactatatatttaaatgttttcttaaaagaaagagaaaaaaaaaattaaagaaaaaattgagtctaatgaaaacaacactttttccacctttctttcttcgtatatttataaagtgtctttttttttaaataataagcaaattttattaatagaggcaatctatccacaaagctagcatgtcgattttgcttaatatatagtacacaggacaagcttcatggacaaaaaaaaccttcacaaattgtcacaaaccctcacaaaaagccatgagagacaacaataaacacctttattatgaaaactatacacataaattgcaacttttagaatattattatgtggaactttaagagtatcttcaatgaatgaaagatgcaaattggtggtcaattactaaaatataactcattagttttgtaaaaaaaatttgctctaatggtgttctaaaaattaatccaaatttagaaacggtctaagatgctcaataccatactaatgtgagacactctttaattgggttactcattatttgttaatttaaaatatgtaaaatatatgatattagaatgcactaataataatatatcacttttttatgttgctattggctctttaaagtgtcccttaacttttcaataagggactatagtctagtttgctataattgtgtagtagaaaaaatattgtattactaaattattgactttaaagtgttctattagagtgtttaataaacatgataattaaagtgatgttaaatatttaaataacaatataaatatcatatttattttattttattaaagaaaatttactcgtacttaaaggtgtcgtttagttaagaagaataaaaatataggaacgggaataaaaataaaaatgaaatggaataacaattaattgcgtaaaaaacaatgataaaaaattattaatttttttctcatcatacattagaatgatttttcctt

SEQ ID NO: 219738 - DNA, 6082 bp, Cannabis indica
aaatcatgtgaaccatacaaaattaaatgttatttcagatctatattaataagtaaacctgattatattgaaatgagttttatttagggcataaaacccaacaaaaatgttatttctgatctttattaataagtaaatctgattatattgaaatgagttttatttagtgcacaaaacccaacactcattgtgtgttccctagccctagcatcgtttacctctaatttggatgtgggttttaagggattttgtttatatgggatggcccattatgtaagaaactcaaactctaaagcttctggatgataaactcctgaaccagagtgggacaatgctaccagcaaaaagcagtcccaatccttggagagaattttatcaaactagaatgtaatgagttgcagatcttaaaacaacctacatattgtctgaacactagtatgaacacttttaaccctaaaaaaactaccaaaaccagatgagatgataacgatacgaacgaatcaagtaactgatccacacaatgtaataaacatgagaaagaagaaaataacttaccgtttgaagttagggcttggggcaatgcatgggaaatctttctgcaaacctacgaacgaagcaaggatcgacttgaaaaaaggaagtcggaggaaactggcaggaaaaaggtcaaagacaaggatgtcatgcaagtcttcaaatgggtttaatggtgatccttaacgaagaagtttaagggtttttctcacactttctgaaatggtgccaaggttgttctttttccttattttatacccatgatagtgatttcagaaaagacttgatccaatggacgtggttcgaagtgggagtggaaaagatggtcatttaattctgatgtacctcaaaaccacacaattgccaaaattagagggaatgcgtctcttcaaaagcataggagtatcacgaaaataccgtttgtaatcattaaaaagctctttttaattgaaaatacctaagggacaatgttatacccaagtcggtaagcacatcagaggaggacaggcgtcgaggtgggaaaaactcaaacacacaaacgataagtacgaactgagtaatttatgtattaacgagaaaccatgtgggtgcataccttcatgatgaggcctcaaccttgctgcgtgaaagagaaagcgacaacactaaaaatactagaatgggcagcatttattatgtaaataattgatgatgtaagggtatacaaccttagttatttattaataactagaatgggcttcactgacgtgctttgtggggaagcggcagcttgctgtttggctatatttgcagcgctagaagtgaaggcaaattttgttattgtggagagcgattcgagggtagttgtcattgctctaaatgtgaaggagtctcgttgggtcattgaaaactatgtctccttttgtaatattcactcttctttattttctagttatatattctctaatattagcaggacttataattttgtcgtccataacgtggctaagtaagcttttacccacaagttgtttggtgatattccgctatgcactattccgttaaacattttatgtaatgaccaggacgtctaacctttatatttattaatcaagtacgcttttctacaaaaaaaatattaataactacatcatgataagggcgatttaacacctagggaatttcttatggcatcaattattcataataactcacgctataaaggtctttatgcctttagttgtctcacacccctttagcaacccttagaacaggaatagttgcaaatttcttcgaaactgcttgtagaagaccgaaaaaactaccattcaaggctatttttgtagtagtaaatatttataattagcttatttgttacatgtttaatttatatattatatcatttaataaatatataacataactatcttaacaatttggtagacaaggcagctatatagtcgcacttacagttctttaattaaaacggggaaagactgacttggtatcaagaaagaaaaagaagaaaaaaaaaagatatagaaagactttgcaaccaccattttagaaacaaacaatattataaggtctttattataaacaaaaaaccataaagtctttgtttacaacttttgttgaccatagatataataagcatcaacaaatatttttgtatatagaatataaaaacgttttgcatgtaaaaaaatattatgcaattttggattattatgtggataaggataatgtttagtttattacattggataattattgtattaaatacataataaagtaatatataatactgaagggaaaatgaaattaacataattattttttaaatttaatcaaagaattatgaacgttagttgtatcgactttatatcaatagttacagtattattagaaagtcaccataagtacttaatttgtgtgtaattcgaattcatttacacgaggtatgattgggtgctttcatatacacatcttaaaagggatatattaatgtatttttttttttttatttatgtggatattttttaatctatttttttatattcgtatacattatagttatttaaaatattttacaaaatcttgagaaatttaaagtagtgttcaaataatttatttcccacttgtgtaaaaaataacatcattacgcgtacaacacagtatttgaactctatttttggtatgttagatttttttgaatttttaaaaattttaccgaatttcttaaataactcaaacatacgtcattatgagaagaaattagactaaaaaattatttcaaataccataacacataggaatacatcggtacaacaattttaaagaggtagattgtaatttttttcatatttaaatgactaaatgagaaattctatctgtacactataaatattaaatacacattaatattttaaaaaaacttaaatttaaaataatttttaaaaactaattgttaatattttaaatatttttccctatataattttttgttaatttctctactttttttaatttattttgataatcttttttaaaattaggtattattattttttttctaataagtgtacatagtgttttattttaacttttttgttataatttttgaaagtaaatttatttttatttgattatgtatatttttttatttgatatgtatattttttaaggatataaatatgataaaaatatttaacgaaagtaaaataataaaagataaattttatgtaaattaaaaacaattaaaatagggtgtattatagatttttggagtgtaataaaaactcttcaatccccaccatatatatgtaaatatatatatatatatatatttacgaaataacaacttaattaaatttagcattccaaatacaaaatatataatataacagctggtgctttataaatcacaaatagttaccgaaaaattcctaggaacaagatatgctaggcgatttgactgatcgtttaagaaaataaatttttgcatcaggtaatcaaagcaataaaatttcacaatcctgaataatgttcccaaagatagagcaaagagaagagtgactacgaattgcttggaccgagaccaagctatctgattcaagttcaacatgttgacgtcctcgggttttaacccatcttaaagcttctttgatacccataatctcaactacatcgaaagcaaaaacaccactgcgacaacaagctttagcttcaataagaaatccttaatcatttcatgtgaccatgccatatccaaacttgtgaacattagcaaataaagcaccatcaacattaatctttattatatttactcctagttttgtctaaagctcagctttgtcatctatattaccaaagtaaaaggatgacagagatatgttatcttgagcttttagccaatgatcaagagctacacgggctgatgttaaaatgtttgtagcagtgagcattttatccttctaagcaatagagtttcttgcttaacacaaggcccaacacagaataagcaatataacaaacactgtcagtgtcaagacactggaatatgtaatcaagccagtttgcaaaagagagatggagagaggcaccagcaggcagacccgtgctctaccagcaacgagaagcaaaactggaagataggaggatgtgagagatagttccgaaaaggcattaaaaatggggcaaaaagggaagctgtcaacgatgttttgttatgagattgaaacagactggtagattttgaaaagcaacacaccaaaggaagttttttgactttaggtgggattttaagttcgccaaagatttctaccaaaaacttgaattgttgctggcaatccttggatccataaaatcctaaagaagaaggtaagcacttttaatagaaaagtggccagaactttcaccagcccaagactagaaatcaaatgatggcgagaaatataataggattcttaacattatattagcatcttgcacattgaacatatcccaaactaaataaatatctgaaactctatcatcaatagagaagtgagaactaactcgatgacttgaaagtcctacatgagaagaagtaacaaatgtattgatgaaattaggaggccaaggattgttcaaaatattgactaaagtaccaatgccaatagtttgtctagctccccaaaaaacgaagtattgagcactcgagatactcctctagccaaagcttaggtttctttctagatcagtccaaaggaaatcactttggagaaagtattgaacattgaaaatttttgtgactaaggaatctaaatgacacaaaaatatccatcctaatttaacaagcatagcaagattgaaatcatgaaggagatgaaagcctagaccaccttcatgcttcagacgggagggatgatccctattgatccaaatattcccattacctttacgagatgtggttttccaccaaaaatgagccatcaacttttcaattttattgcaagtacaagttgagagaagaaaaatactcatagcataggtgggaagtgattgaacaacaatctgcaaaagtatttctttaccaacaccagacaatagcttcccactccaactgctgattctattgatcatttgttcttcaaaaagcctaaaataccttatttattcctccctatgatgtttggaagtcctaagtaaaggtttctttcagaggcctcattcataccaggaataaggaatagaggttagttggtcatggaaattttgctgaatattcagactaaagaaaatggatgacttggttataatgatttgttgaccagaagcattgtcagcgcatcgaagaagagacataacacttccagcagcaccagtggttacttggcaaatagagaaatgtcatcaaaaaagagcatatgatagagatagtggaagcaccatgtgcaacacgacatccttgtaataatctctccctttcaaacatagagataagtacagagaacccttcagcacagataatgaacaaataaaaggagagggaatcaccttatataataccacgggaaggaataataggccccatgacatggtcgccatgggattaccgaataatgaacattagttacacaagccataatcaagttcacccaatgctggtcaaaacccatcaataacattaccactcttaaataatctcactcagcgcggtcgtaagctttactcatatcaagtttgagagccatataacctttcttgtaatgaactattcggttaaggtagtgaataactcaaaagcaattataacattatctgaaattaagcaccctaggatgaaagagctttgagtaacaaaaataacttgatcaataattggtttcattctactggcaagcacattggcatcaactttataagaaaaattacacaaggcaataggtttgaggtcacccatagtaattgggatcttctttttaggaatgagaaccaaatttgtatggtttatgttaaccttgcttttagccaacgacaatgagtcaattattaagccattaagaatataattaaaatagagcaa

SEQ ID NO: 219739 - DNA, 6781 bp, Cannabis indica
gttactaaaaatgagtcctttactgctgagagaacaagacagaatatcccaactaagaagcaattggttgacccttttcgccaagggctaatgattgaaggtggagttgggtacagacagactgttgttattagatcttatgaagttggtcctgataaaactgcaaccttggaaagtatccttaatcttcttcaggtgagatacacaatgataactcttgatcttgtttgtcaatatgtttatgtatgtatacataggtttcgaatgtagtcccgcttttttcggtggtttttgttctatttctgagtaattttacatttacattaataatgatgaattgatgatgtttatgttgtatgttactccagaatggaatgaaacgaaatagaataggattacttccgccaggtttcgaatgtaattctattctttcgttggttctattctattctggagtaatttattgaagtagtttaggaataacatttacatttacattgatgttgtatattactccagaatagaatggaatgggaacaggattacttccacccatttcggatgtagtcctgctctttcggtagttctgttctattctggagtaatttatcgaagtagtttagaataacatttacattgatgatgatgatgttactttcggtggttctattctattctggagtaatttatcgaagtagtttgagaataacatttacgatgataatgatgatattgttgtatatgaaatttcaggaaacagcattaaatcatgtatggatatcaggactactcagtgatggttttggtgccacacatggaatgatgagaaacaatctcatatgggttgtttcaagaatgcaagttcaaattgaacaatatccaatttggtaaactctaatcctagttttcatactcttaataatgatacagctatgttgattatctttatctatttcaggggagagatagtagaaattgacacatgggttggagcatcagggaagaatggaatgcaacgggattggttgattcgaagtcaagccaccggccatattttagcccgaggaactaggtaaaaacatcttttgaagaaagactatcaattttcatgatttcattcataaagtgtcgtagtactaatgtattataaaacagtacatgggtgatgatgaaccgaaaaacaaggcgactctcgaagatgccagaagaggtgagggatgagatttctccttggttcatagagaagaaagctatcaaagaagatgtcattgacaaaattgtcaaattggatgataaagctaagtacatgaacaccaacttgaaggtaaaaaagcaataaccaaaacttatcttgatcaaccacattcttgttcccaactcaatcaactcatataactttttcttttgttgtagcctaagagaagtgatttggacatgaaccaccatgtgaacaatgtcaagtatgtaagatggatgctcgaggtaaaaataccaatttttcgtctagtcatttttcattttcactattgtgcggaaacttagatgcaacctcatacttaacattgtttttgtcctctcgagttattttattaatactttttctaagaataattggttttcagatggaacctcatacttgaatgattgtctacaggctatacccgatattattttggagtcacaccaactatccgaaatcaccctagaataccgaaaggaatgtgggagtacagacatagttcaatcactttgtcaacctgatgaagaaggaagaggattgcttaacaatggagtaacaaaccaagatattaatcaaatcaatctactaaacactttagcaactgaattcatcaagaacaatggactcatgggatcttttgagataggatcattaaggtacactcatctcctccaaactaaaggggacactaaaaatgaagagattgttagaggaagaaccaaatggatcaagaaaaagcttcctataattccataacaaaaacaaaaaaaacctataaggtctttttcccaaaagcttgtctaccatgtcatgacacactaaccctacattggggtggccttgaaataatcaatcaagaaaaaaaagaggaaaatcatgatgttgactcataagggttgaagattctaataatggtgtcaaatgtgtataatgaatagtgttgattgtgatggtgaaacgtttagctctaagcttatagggttggttcatggttaccaacaaaatggggtatctttaagaaaaaagaagaggttgacattggattgtttgagtctttattgtctcatatgaagaattatttggtgtgtgtgtgtagacaaatgtaatgtggaaatcactattcaatgtagtaccttgtataattaaattaatataataggaaaattaagttcttctttttttatgtaacttcatagactcaataattcattcactattcatgagaagaaagaaaaaaaaataaacatttatattacactaataaaagaaaaaaaatacaaaatgatactagttgtgtctaacactcacgacgatgtgttatatcattattgatgtaattaaatattgagttttacgtattttaattacatccacctaccatgatgtgttatattgttattagtataattaaatatcgagttttacatattttaatttaatatttattacaaaaaatcactaactgtcaacaattccatcaatattatttaaatcatgagacaattcacattagcttgaataaaacctaagttttaattgatttaaaaccattgtttataaagtattaatatttaaaaagataacctattgttgaaagcaacaaagtctacacatcttaactttacaaagtaattcaaaacaaaaatcattaaccttattttgattattttttgtaaaataactttccacatagatgccagtttgcaaaatgaaactataaaataatataatttcaacacatttcataacaatgtaagaatgagtatgccaccctaagcttttttaatgagtaactaaaaaataaaaaataaataaaaagaaaaccttgattggcctacacacctaagaaggtactgaattcaaaaggctttgataagataataaaagcctatatgtaaggaagagaaaaaaaaaagatacctaaacacatgcacacaaacatacacactcctttcctttatccaatgatttttcttttttgatagtgatatgattatgtgcaccacaacttacacacaaatattgtacgagtaatgttaaaagagaccaatgctatttggtactattttatgtgtaaatattgttatgggtgtaattaagtatagaatctctcataacttcatgtaataactcctagagagtatcgctaactaattacaagataacacatttagaaagtgcaaaacaccacttatatccaatagcaatgctcatattatacacaacaaaaaatactaaaagataccagttgtacctaacaccctccaatattagtgcaattgagtatcagatctcatataattagatgcaataacttttataaaatatcgctaacaaattgtaagacaccacttctaagtgatgccaagcatcactggtgcctaataacaatgctcatacacaaatgatacatgcaccactgccaccacaaatattatacactgtgtcatatttatgtttggatgtttcgagtacacatcaaatatcgttattggtacaattaaatatcgtaattatttcatatctttggatttactttgcatgatctaattaattccttttataaaaacaagaatgcaaaaacaattgaatttacttcttaattctttttataaatcacacaagaaaagaagagtactacaaaaaatggggtttcttggaccagagaaatattttttgccagtaatagtggcaaccaagtacagaagcatattccattaaacctaacaagaaaagaatagaataatattctctgttgatgaagatgatgatgatgatgatgatcaagaaaaaatgtgatccactaatctaatgagagaataaacatttacaattttataaaagaaaaaaaggaatcagagtatttacatgaagaaaagaaagtgataagacaaacctcaagaaagaaagaagatttggggaatcaaagaataataaccgaaaatctgacaaaatcattgcctctttctcatcaaacttctgtgagatttccaggaccatgccacgacgaatagtataaacaatgctccaatagatgtccaaaaggttattagccataatggcatagatttcggatatagtcctggtagattaaccgaagaaaatcgagtcattatcgatatttaaacatagcaatgtagcaaagaattagttgcagattttttaacataacataccatgtccaaacttgatgcaaatgagaagttctactatgcaaattgctaaggaaagccaacagaatgccccgacttttttcgctggttttctgcaattcgaacatagtgttagataagccaaacaggactaagatactagaaatgtgaattcatttcaagaaaagagaaaagggttgtgtagtgttaccggtcttgaagatatgaattgtactcacgaattgttggaattgctattagccaccacaatatcagcctataaacaatgacggggtttcgaggaggaatccaaagacagaatttcaggaagaaagtgttaagctctactgtgaggaagacgatacaaagactaacaacttgaatgaaacgccatggaccgagcaggggatgccactcatctttgtcccattgcgccggtgtaaattgttcaagtgttctttttacctgaatcagtaaaaaatgcatctgactcggtgttaataacaaatgtctttctactccaaacaatatcgaattttcaacttagtaactcaatgccattaaatattcaaaaataaaaacactaaaatcagagcatactttgccaataatattcggttggcggcttatcccaacccacttgtatgtttttccatcaaagtacctaacagtatgcattcctgcccagatacctgcaacatacacacagaaacaaacttgtcaaagtttgcacacaaaaggctcatgggggtggaaaaccgatgttataagctaagttttagttttcgattaatgtaaattatactatgcatagagctcaacaattataagccaaaattcttaatacattgagttcttaccaaaccagttgcagatcaaaatatcaagaataatactgtcccaccagcattcgttaaaattcggtagcatgtgacgaaaagtaagctgaaaatgtcaaccaaaagatggttaatcttccactcaaagatggagaaagataacaataagccaatattatatattatgtcaaggaactaacctccatcaactcgaaaccaatcgatagcacccaaagaagaggctgattacgaagcaatatagctttaccccaccatccaataatatgagctaaaacgaattcatcaaaaagtgtttcctataaaagttaacaaaatttataaacataaaaagttaagtagtttgcttagagaagatatgatcagagaattaacaaaaataaacagattttattgaagaagaaatcatacataaacattcttaaacctgcttgtaggattttcggggaggtatatgcgacagtcagctccataagatctttcaggaagttctgcaaaattacgaggcagaattacaatgaataagcaaacagtataagggtttcattcaactgatgcaaataaaaaatgccaaaatgcctaaactgcattaccaacaccaagatccggatggagaaacttcataaactgtcgagcatcatctcgcttctgaaaagagaaaaaatgtgttaaaagggaacaatctgaagtagagactgtaagagtgaatcaaaagggaacactatacagataggaaagaaaagggctgacctgaaaaagcaaaaatgtgagagcaacaaggtaaacaacagccatgccgtgaactaaacgccaaattgctggatgcggtctaatcagaattctgtgtcaattcaagtcagaaaacaataaacatgagttaactgaataccccttgatttcaagtagtttgattgttttacgctaattcttttgcgaagaaacaagcgaaaactactcatttccatgaccactttatcccaatgtccttccccgaaaacaagtaaaatcctaatgtaatatgaaactcattcttctggttattccatacaacttataaagaagggtgactaaattacagataattgggctcaataaaacatgtatcgatagattacaaatgaaaattgtaaaaggaagatatcatcagcttaagtcctaccaaaaaccgaaattctatcttgaaatcaaggtagcttagtacaatgaaatgctagaaaataagtagaacagaatcaattaagccacaagttagttcgaaacaaagtattgttcaacgacttacgatgatggggcttgaagcaaacaataaccaagaaaaactgctatcatcgcccatacgcccctacaagaaagagtaatcacagtgttaaaacatcttaattttaaagaagaaaactacataaaaagtgtaagcaaaatatagctaataagaacaaaccttttaactgatgtaacaacatcttcagatgaacttccttctggatccaataccccacttacccaactggtaaatgcatcaaaagaaaaaaaaa

SEQ ID NO: 219740 - DNA, 1995 bp, Cannabis indica
gttccaagactttggattaagtgacgatcgatggagaagtatcagtccatatgcccagattggggatctgtgcacattactgattggtcatatacctgcttgcaacaagctaccaagattctttatgccatgtgtatctctcaaaatgcatgtctcacctttggaatatgtgacttccaaaacatccgatgagaggaacgtcgtttcgataagaatgcaagagttgatgagtatacttaaaaaaatatactcatagacatgggggtcaagtgttaaccctaaaaatttactatgtaagaatatcaaaacacgagagaataaggaaaaagggagaaggaaggaggcacgagaccaggagagactcgcaagatgggagcctcattgaactcctctgtatcacactgcctacgtgtcgcgccactcgctagtgagagagatggtcttgctggccctcgtgtagcgccgctcgctagtcagagagttggccctcgtgccacaccgctcgctagtgagatagggacttgctggccctcttgccgcaccgctcgctagtgagataggtcttgctggccctcgtgccgcgtcgctcgccagtgagagagagggtctcgatgactctcatgccgcgccgcccccattgtctcttcatgtcacatcattcaagaaagcggggaattcctcgcttcgcccatgccactttggtcttataaaataaaggtctcactaaagcctattttcaccacctcccgccaattaagaagaaacgaggttcctcccatctctcaccataagtgaattcaagtgtaacaatcctttcaataacttaatgacccgatcaagtcatgggaaggaatctccaaaggaaaaataaggtacttcgaggacatacggaagtttacgaccacaacacctgttaaagctaataaagaagaattttttcgaagggacaaggtagtgggagtgtgatcccagatgttagtacgacctgacaccctactaccattgcctgatccccataagtttagtccacaagccttcctctcatagcacatgttccacctaaggtccacagagggtaacaccacttgtaaccatgggcctttagagcctcctataaatattaccccttcatttcattagtgaaagggagctgaaaaatcttgtaacaaagaagagtgtgataatttgaatacaagattattttcttagaatacttaagatttcatctctttttaaatcaccgccacacttttacttaatctctctatttgtaactaatcgaaggttttcagtcctttaacttgttgacgagtttcagccgtcaacatggatatttccagcgcaaatgaacttcactagctttgttgcacttaaatctttatataaattttttggtggtaaaaattaatatgtagttattttgccgcacttaaatctctacataaattttctagcgaaaaaaataaatatttagtcattttgttacaattctagtccctttgttgtcacaagctcaaggacaatgttgccttatatgtttaaaaattagaatttttgctaccaaaaaagaactacataaagatttttgctaccaaaaattcacatagggatttaagtttaacaaaataatctacgtagaaattttggctaccgaaaaatctacataaacatttaagtggtacaaaatgaattacgtagggattttggtcgcaatttcctttattattattgtaaaaatagacagattaaaatttgtaaaaaaaaaaaaaaaatacaactacttactaaagaaaaaaaagctcttctaacttatttattattttttttatttgctatgatattaaatttgtaaggatgttacacataaaacataagcatgaaaaaaatagctatttgaaaataagtagacaaatatgtaatttaaaaaaggaacaattacataacaaattttaaaagattatttgctaaaatgtaaaaaaaaataaagttaaaaaa

SEQ ID NO: 219741 - DNA, 2362 bp, Cannabis indica
aaacacgataatgtagtacctctcagagcgttttacttttccaaggatgaaaaattacttgtatatgatttcatggccgccggtagcttgtctgctcttcttcacggtatgttatttaatatcttaatctctattattaacatattgtttatttttaatttaacttcgtagaatgtatgttttctttctggtataaattttattttatgtatatcatcttcaatttccaagatacatttattatttgagtatcttgggctgttacagtcttgaaaactgatcctttcaatttatatatttcttgggtttaaacatagtttattagtaatgctggtggtggaaattacttaagccatgtgattatctgcaaaaacattcttagctttagtctacaacttttattagttgattacaaattttgtgtcttcccaaaaatcccaaagatgtaaaataatacaccgcccttatgattaaagatcgagtcatcaacatcattctgctcccttttctggccaaagcttttgcttcttttcagaaaagtcacttattacaggctcataaaagataaagaaaacatattttttttaataaaaacggtacccatctcaatttcaatactgaacaagaagaaaaaatatcctttaccaataaaactgaaagaatttatttgtattctctttatcttcgtcgggttaatggttagctagtgagccaactaactgaacttgtttgactttgataatggatgacaggaagtagaggttcgggccggactccattggattgggatagtcggatgaagatagcgattggcgctgctcgagggttgtcccatcttcatctctcggagaaggtcatccacggtaacatcaaatcttcaaacatccttctccgacaagaccacgacgcctgcgtatcagatttcggtttacaatccgtgttcgggtcctcaactccgcccaatcgggtcgcgggttatcgggctccggaggtattggagacccggaaagtcacattcaaatcggacgtgtacagtttcggtgttttgctactggagctcctaactggcaaagctccgaatcaggcctcgctaggcgaagagggcattgatctcccccggtgggtccaatcggtcgtacgggaagagtggacggcggaggtgttcgacgttgagctgatgaggtaccacaatatagaggaagagatggtgcagcttcttcagatagccatgtcgtgtgtctctaccgtaccagatcagagacccggaatgcaagaggtggttcgaatgattgaagatatgaatcgaggagagactgacgacggtttacgacaatcgtcggatgatccctccaaaggatctgacggtcaaacacctcccactgagtctaggaccccacctagctccatcacaccttagaataattgtaaagcttcggaagtaaaaattaaagagaaaaaagaatagaaaaaagaaatgaagaaaagaaaaaacgacaaggaaatgtggtgggtctgtcgtcttaaaatgtgcaattgatcgtaggacacggtgtgactgtggtccaatatctttttatagttttttatttttattttttaatttttgatttgagttcttttttttttttttgcaattatttttatagctgggagggatttgaattgttaatgaaaggggaatgtgggaggatgaatgggatttcaacaaactgatcattggaatttgacgaccatttcacgaactctagctgggttttatctttattttagtttaattctttatttatatttaggtctgttacttttacaatatttgtctggtacagtcgatattattacctgtttattttgttttgtctttgtacgtaattttatgtatttttttttgtttaacaaattttatgtagttttgtttgtacgatgcaatatgtttgttgtacagctgccgattgagtatgggagaaaaaaatagagagaaaaatcggagggctttgataattccaaccactcgttctttttccataacgacaaagtttcaacagttcctcttttataattttaatatttatagtaatattagtttgtttgcaagcaagtgtgcaagaatagaataaatataatgcaatttctcagaccacctccaaagttgtgtagttttatttttacacttctttttctaccacaacactaaatctaacagataaataaattataaatgtttctgcattctattaactatcttattacagttattattaactataagttttgtttgttggactttattaatgaaatgtgtatagaaatatatattaaacaatagattaatggaaacgtgattttttttttttggtttatatcg

SEQ ID NO: 219742 - DNA, 1407 bp, Cannabis indica
tagcttcagagctcttaactgaatttacatatgctaaaatcatagaatctagttataagcaggggtttttatatatgcctaaatcgtagactgtgcagcttttatatttttcagctagaagactagtgacttatcgctaagtttgaagagtagtgagtttttatttcggataaaaattatcatatttatatcatgtaaacacaacacacacactcttacaaagaagtaaatgagcagcttgctgattttgttccttttgtcccctgtttttcctctgtatatgtagcaggttctattccttccttttgtgactgtttagagcatatcagtaaattatttgtcgtttcttctctttaactctgattcaagagtacattaattggggaactaaactcggtaatctgatatattatgatttatcatattttccttattagtcatggattgtgttcgaaatttaatccacggttggtaaggtactccaaccctcactctatgtatcataatagctttaatttctttttactttttatgtcactttttctcttaattaacgttaaatttttgctaattttgcattgcaataatggtaatagtgatctagaagtatctcagctcttaaggtttatctaagctttggttggacagtgaaaggtggtagtatttttgtttagttattagactaattctgcaattgaaaagagtttgttgtttgttattttctgtattcttgtttttgcctaaatctacatatggccaaatcgtatactgggcgacttttatatttttcaactacaaagcaaagtagatggctgttgtgagtgacttatcgctaactttgaagactaagtgagtttttacttttgataaaaactaccatatttatatcatgtaaacacagcacacactctcttacaaagatagcatttttattgatatatatatacacatatatacagagataagggctcacattatgttgcagcagaacctccatcagaaggtttaagatgagcaacatgatcaactattgtttaatgatgtctttcctgaccgaattcctgatcgagctataataatttttgttgtatgtccaatctctaaatacttaattgattaataccatgtgctgcagcatattcttatgtatggcattataagtggctaaactcttaaatgttggtgtagattgacaatcttcttaagggagcttcaggtcaagctatgcagaatcttaatctgatgttgggacttccagaaagcagagggcttctttccccggctttgtttccttagcattttcttctttttatgtgtcggaagaaagagtaagcattctacacatgaactaaaatctccttatttcctatgtgaatacaatttcaatagggaaatttaattttttat

SEQ ID NO: 219743 - DNA, 2426 bp, Cannabis indica
aaaatcgacgatcaactttagaagttaattttcacagctatatcattatctacggttaaaaatagccaatttgtattttcccctatttttttgggtcttcttcacctataaaaggagagctcccttaattcatttttcagattcaaaacactacccacaaggtcagagcttctctttctagaaattaaagctttgacactatgcatttttcaataatactatctcgtgagaaataaaaactcgaagtagacatagctctattactgtcacgatacaatgagtgaataactataaatttatgtgtctctctttacttttacttaacaaatatttcattctcgccaatctagcaagagaatgtggcttggaagtctatgtttagatttttgagtaaatattttggtgctttcattgagagcaacaactcaagaaagtcacaagcaaaatggttgcaacatgctcaacaagtgtttgatagagtaatcacaacttttggccaaacaactgggggcactccagttgattgagttggaattgggactactcttgcgccccaagtgccaggagcaagcctcagaaccagctccacaactctccgtccagggctaccacaagctttcgagattgacaccaataactagatcccacctagggagcgtcatgtggagattgatgaacctaaggaggtcgatcctcgggttacccagctcacccaaattgttactaatctacaaaaacaactgcaagactctcttcacagccaacataaatggttttaacactgattcaagaaaaacttgtagaacatcgaaagccaacgagttaagcatgaacatcagagagctaacttgtctcaatagatcagagaagctgatcaatctggtcatggaactactctccacagggttctttccaagttggtgagagggactccccatcgaccaactagtcacgtgagaactagtgctcaaggggaaacccttaatgcacggaacacaactaccacacctagtaattgtgcaagcactaagtaaacactaggcgtggagacctcctagaggaaaagcacattcgagcatgagactcaagctcgtgggagccaaccaataggccctccacctgatgtggaatgacctcagaacaccgagagaactaataggactcttccaccaagtccttctcagcgctctcataacgctaggccccaaaaccctgcaagggggaacggacctgtcactcaagataactgaggtggacggaaaactaactttgaaagtagagtctatgagatccgacaggtgaggaccaatgaaccaattcacactcaaaaatattttaaagatgaaaggggtgagttgtgtcattactttgaatgtggcctcgatggccagcagtatgattacttccctcgagtacatggagatgaattaaacttaagcaaccagttcatttctcttcacactaatgatctgaatgaatactaatttgagggaagtagcccctacaacactctgcatgatcccacagcagatcatcccgagatgatttggagttcatcccaaaaacatctcttgagttgcccccacaacctcgtggtcaggagacaacatcaagacccaagttgatcaaagtgcatgtttaacttggaaaactaagggacctacgtgacctcttgacaagaagatgaacaatggaagtaggtgcttatagaggagaccctacctgggtaacaaaaactccaactgggacgcaaacaaccacccatggggtcaaccaggtagaattcgacactttagcaaccttagtgaaaaggatcacgacccctaaattgtcaaagttcaaacttgacagagagtggtgctcaccactctctgaaagaattaaagctcttcccacccctctaaagttcaagaacccttcctagcatcaatacaacaggaaggaagatccactatctcacattcactgcttcaaaatgcaaaccgatctacaaggtgtgagagatgatgtcagttactgaatcttccctgccacactgacaatcctagctcaatgatggtaccttaagctctcccctagatcgatcgagtcatgaaaagatctagttgatgctattggcaaccaattctctcctttcgagcaacggcagatcgaacccaatgatttggtgaatgtcaagcaataggaagacgagtccctcaatgactatatccaacaattcttagaggcagtcgctaagccaaaaagtcttagggaggatgcaagggtaatggtacttgcagtcagctcaaggagatgagtcctctgtggtttgaccttttgtctcaagactgtttacaccatgaacgacttcctcgatgagcggatggctttatcaattgagaagaagtcgtcaccggagctaagggctaaaaaggtggcaagaa

SEQ ID NO: 219744 - DNA, 4476 bp, Cannabis indica
agcaattggttcatcatacactgaacaatgactaaatgcaaatgggattacaggccttggacgtgacagaagcacccccgaaatgaggtcttcacaattcaactctgccaaaagaaaaaccaaaaaacgaaacatttacttctgcaatgcaaagacatcataattgagagtttcttactttctcaatgttaattacacattaatcctctttaaaataaacaattaaaaaaagacattgccaaaaattgactgagtaagaaaaccctaggcttagtttgttcaatccaccacaggaaatggtccagaactatatagacactaaatccacaaagccaaacactacgaatgaaaccggaacaagtaatcgaaaccttaaaagtggaattcgaacgtcaaacaatcgaaccaaaaaatcgaagtgaaagaagtaagagcacatatacaacaagttcgaaatcgaaatcaatggcggaaatgcaatgttatttacttaccagtggaatctaaggttcctcctaaccaaggtggaggtgttattccatcgatgaggagcttagatgcgaggtgcttatcgtatagactcgtctgttgtttgacctggtcgattatccacgacttcctctcaaaaatctgaacccagagcttctcaatcgccgacattgtcttcttcttcaacctttcaattcgtagtcatgaagaatccacaacagaaaaactctagagcgagaaactctgcgacagtgtttagagagagaaagagtttttggttttggggacgatgacgatttgagaaccccaaacgtttagcgcggtatgagaaattcaaatcttgccattattcaatgataaacgacatgtcgttttgttgaggatcaacagagaaaaaacgacatgtcgttgataatcaatttcacttaacgacatatcgtttgtataatcgatttgtcgttggaattttgataaacgacatgtcgttttatcaatgtctttctacttcttctaccatagacgtttgcaaactccagcctccaccatacaacggcggcgcgtgttcgccaatcgctcgtctgtgctaacctggctttgctaccattagagttacaggtttgttttcttatgtattgattataaagttttggtttttatttggggttttcgtcatatgagattgaaaaacctaaaaccctaaattttatatatgagtttggagatgatggaaaagccagtatatattttttacaaatttgagagggaaaacagtagggtttgtaatttgcacctagttgatttttcctggtatttccatttaggtcaaattgagaaacatgaactatttttgaagaagctttagctttgattggaattggaaagaaaccatacatgaactcgtgttgtttaaatgtatgtatgctttgggttctaaattaagcttaagctttctctctctaattgcatttcaatttgggccttctttgataatgcaattaaattgagttgtttatgttaaaaattcaacaattctgtggcaattctttgataaagcacttgaaatgagttcttggaagtttgaaactcaatagttgtcaaggaaattgttttttaggtaaaaacttcatctctttaccttaaaacaaattcagggaagaagaagctggcttttccatggcgattcgcttatttgttgctgatatcagaaggtgagctcacatttctctttacctctctttattgaacagtttctttggcttttttgaatcactcttttgggtgtctgaaatatgcagcttcatgcttcaactggatgtgaaaaattgtcttaggagatcaatatgttcttacaatagttcactaatggcagatgagtcctccaatgaattcataccgagaaccaaaagcgatttcaagggcaagattttgaggctcaagtacccttttggttgtgcagccactgtgcttgagaactgggttgatcatggctataaggtttcctttcacgaacttcgtcgcttatccacccaactcttgaagctgaaacgccacaaccacgctctccaggttccaaattcaattccaaatcatagctctagttcgttttactttttctctaactatatttatattcctctattgaaatgtcagataatgaactggatggaaactcaaaacgggttcctaatgtcaccaacagaccatgccatgaagatggagttaatcatcaacatcaagggtctagtggaagctgaagaatattatagaagcaaaatctcaggcactgcatcgcgtaaagctgctagcttttctcttctccggggttatgttaaggaaagggacactgagaaagctgaggctttcatgtcagagttaaatggctcgggactggttgtgaactctcatccgtacaatgagatgatgaagctgtacatggcaacctctcaattcggaaaagtacttcgtgttatacaggaaatgaagcataacagaatacccttgaatgttttgtcctacaacctttggatgaatgcctgtggtgagatatctggggtctcttctgttgagatggtttacaaagaaatgattcgagatggtggtgttgagcttggatggagtagctttcaactttagctaatgtttatatgaaagcagggcattttgaaaaagctagtttggctcttagaaaggctgaggataaactgtcaagctttaatcctcttggttataactttctcataacacagtatgcctcgttgaacaacaagaatgaagttcttcgggtttggaatgctcgtaaagcattaagtgaaagaatcaattgtgcagattacatgagcctaatgctgtgcttggtaaagctaggtgagatcaaagaagctgagagagttttcatggagtgggaatccaaccgtcgtaggtttgatattcgggtttcaaatatccttctcggtgcttatgttaggaatggattgatggaaaaagctgaatcgtttcatctccaaacattggagaaagggggatgcccaaattataaaacttgggagatcctcatggaagggtgggtgaaaaccgaaaagatggagaaagcccttgatgcaatgaagaaagcattctctttgatgagatattgccattggaggccatcagatggtgttgtaatggccatagcagagtatttcgagaaggaaggggatgttgaaggtgcgtgttggtatgtcaaggctatccacgatttgggttttgcgagtttgccattgtataaatctttgttgaggatatacagttatgctcagaaaccagctttagatattctagaaatgatggagattgacaagatgaaaatggatgatgaggcttatgacctcactcaagccattagtggtaataaagttcacaacttctcaatgatttgtgggtgaaaattcttaggacatttagctctataaaatcaccctcattcaaccatttgaaactatctctattcagattcgggttagaactgcataacatctttgtttggattggaaagaaactcatgattgtatgcttcaaagaccaatgaagtctcatgggagaaggacttacttacattccaagcaacttgacacagcccttagccattgttaattgttctttctcaaacatattaaggtgtgattatacatatatatatatatgacgaggttactagaatataattgttaacatgaaagaatatacgattcttcgagaatgtatcacttcgggaattcaatacaaattgtgacatgcagatattttgatttcaacaaatgatggcactctctctaagcatatattcttgttatgtcatggattttgagattgtaaaatttagaaaattgtagttaaagtggagtggcgtatatactaattacagagagtaattgaaactctcaattactttcaatcacatgttcaaataacatctgccaaaatgtataattagttccaattatacttaaatctaattacattatgacttttcaaacgtatttttaataatactaattatctaaatatagtaatattgtgcaatcacattcaattatcatcgagtcatacaaattgaaaaatataattgaaactcctcaattaactccacatacataattattatgaaatacactcaattccaaattacactttacacattaactttccaaacgtgctcaactttagaattactaattatcaaaaacacaaaggattacatcggtacacatatttttaaaatgtaatataaaatttttctgaattattgagactactagatttaattttttttatccaattccattcaattttactaatgtggccattattcatatactaaatcgtgctacccaattttaatatctaccaaaatcatgccttcgaattttgatatgtaccaaaattgtgtcttttgaacgaactttcatccgcacatcgaacttctactagtaaaaattagatatttttttt

SEQ ID NO: 219745 - DNA, 3114 bp, Cannabis indica
ttttttctctaatcaatatattggactccgaccacaacttagaccttggaactcgaatcctgaccccaactccaacccagacctgacctcaacttggaccccaaacccagatcccgaaccaaatcccgacttcgaattctggccctagacctagactcggacccagacctagacccgaaccagcactggacctcgaatgtcaaatcagaccccaaacttgggtctaaacccagaccatagacccaaccttgactgaaccctagatcctaaccctgactcgatcccaaaccctgaacccagactcgaacttggactctgacccaactctagacctcggccatggttccagtgtcagacctggacccagaccttgtactcggacccgggctcaaacttagacctaagacccggaccccagccccgaccgacactgaacctcgaccctggttccagaaccccagaccaaaacccaaaccttggaccttggccctagacctcgacccgaactcggactaatgtcagacctgaccccggactccagccgcggtccgacttcgaacccagactctggcctaggaccttggccacagtcccaaccctggatcctggccccaagactcgaatatggactcgacttaaaatcaaccaataaaaataaaagagaattaatccatacactcatagaccatttgactttgataacaactaacatatgatatattactattaacacactactcgttagggtaattgaactagtatataaaccatataatatgcattgtatatttatataaattattagtgagtgtttgtttacatatcttcttcttcttcaataatatacataaaaattatgggtacccaaatgatgaaattaactatggtggtattgatcatattgttacataatcataattattatggtgttaatggtgatccccatgatgaagtacatggtcttttcatatttggtgattctttatctgatagtggaaacaacaacaatcttttaacaatggctaaagctaattacaaaccttatgggattgattttcctaatgctattactccaacaggaaggtttactaatggtcgaactgtggttgatgtacttggtatgtatataattaatattatgttaatatataaaaatatatttataataagttgaaaaatatcatttttgtttttattctatagggacctctctttatttatttttagcctttacagaaattataagtattaattttttttttatgtatgattaatacatttcaatatatttttttaggacaattttagttaaattttattttcaatatcactaaaccatgtatacttagtatatttaataaattaagataattaaaatgtaattgttacaatttagctttattaataattgaaaacataatttaaaactttcaatataatttatagtcaaccaaatagttattgtatctaatatttttttttttaaaaaaaattagactaaaaaaattctcactcatatcgaaatagatagaggatgcttcaatgaactttttttagagagtacattttagaatctttcaattctatctatctatctatatatacacataaagagtatttctacagtgcacccttaaaagagatgtatgatgcactctttacttgtttcgatatctagaaaaaaatttagtctattttttttatattcgtgtatgttatagttaattatttaagatattttataaaattttaaaaattcaaaataatttacaatatagaaagcagtgttccaacagtctatttcacacgtatataaaataaaatagtcgtacaacacactgtttgaaccatgttttcaacatgttaaattcttttgaataatttcttaaaattttgcaagatgtcttaataaataactacaacgtacatgactatgataaaaattttaaataaaaattattttggaaaccaaaacagataaaaatacattagtacatccttgtttagtgaatgcattaactaatataatttttttatatatttttatattgctatattattataaaaggtcaacttttaggcttggatcactacataccaccatttgctaatactactggttataacataaccaatggtgtaaattatgcatctggatcagcaggaattctccccgaaactggcaaaattttggtacattaattatattatgataattatattaagagtgaatattatttcaaatttgtattttgtaaaagttactaattagatcttttattttgttaaataataaaaaagatcttatattttctaaactagtacaaatagtaccctaaattaaatttttgatatattttttttaatataatcaacttgaagataatttttagcacgaacaattgaagaaaacgtaatcagttttgtcataacacatttatatcgggtactattataaagttttattttgacaaaaaatcagctcatggtaccatttagtactattttgaaaaatacagggtctaatttgtcattttacaaaatagaggatccaatcgataatttttataaaatacaatatctaaaattatatttatcctaatattaataaatttaaaattaaattttcattgttcatttcataaaataacaccaacttttgtttttttttgtttttttttgcagggtgattgtattagcttggagaaacaaatagacaaccaccaaattacaatctcaaaaataaaaaataaatacaaccataaatttacaatttcacaaataaattatcacttaaagatgaagtgcatatatcatattaccataggaaataatgactatattttaaactatttactgcctaaaatttataatacaagtagtctttatacacctcaacaatatgctaagcttctcatccaaaaatatgaatatcaaatttttggtaaagggttttttttttttttttcaaactttctaagattcattgcattatttatatttatctttattctttttatttacacttgactacactaaatgttttaaatacaggttcctatactttagtttaatttcgaccaaaatgtttagtttttattgtaatttaatttt

SEQ ID NO: 219746 - DNA, 3501 bp, Cannabis indica
ttgagatcgcataaaaactgtcccactttgtcgcgcaccaattgttgtggaaatgtccctgttaatccagtaagtgattcggatcctaatttgaatgattcgaaccctacagaagaaacccagatggagaattctgagaatcctgatgcaaatcatcaggtggatgaagaaggtgaatctagtgaggttagattggaagatgaaaccaataatgaaaatggagtgaagggtttgtcgaattccgttgtgaggagctgtgattctcgtgttttaagtgatttggctatcaaacgacaagtcgtttgtgaagaaatagagccaatgaggaggtcagtttcaatggatgcatcttcagccgtggcagtatatcgtgctgtggctaatgtagtttctgatcatagaggctcaaattcacagttagcagtaccagtgagaaattccagtttggcaattgtatcgaaacgggtgagtcaaaatttaagcttgtataaactaatgagaagttcttcaattgggttttctttgcagaaaagacccatttcaatgaaaaggtctagttcatctagcaggaacctttctttatctaaacatggcaggagtcagagctcaatcctaccatcttagaacatatacctaaagtttgaagtgagacacttaaattaagatgtctatactacaattgtgcccaaacaagcatggttataatcaaattatattatgaatatactgtaagctgctttctgctctagctaatctgaatgaagcatcattgtgatcaatgtttttttactcagaaaagagtaattttgatgcttgaaactcgacttgtcaagttgacatgataaattgcatcctgcaattagttttttcatgtcaacattgcttgtagtcctgaatgaaagcatatatgcctttaaatcttcatgataacatatatattttgtatggaagataccttttccttttaatattgctgatatttctcagcgaaatggtgcttattagaatatcagaagtatttttatttttatgagtatgctagctcagtgattactatataatatccccatagtctagactgctgaaaaaaaataaatattatcaacttgaaaacaatataatggaatccgtgaatttgacttgttagatcttcggtgcttataatcttgagaatgattttgcccgtatggtgacacgggatgcttaattagttagaatattaagttattagaaaattttatgatctcaatctgtttcagtattttggagaaaattttaatcattttttttttaattgtgtagacatcgtgtaaaattttatagaaatttaaaaataatttaatatgctgaaaataggatttaaacagtttgttgcacacgtaattcttttattttctacgcgtgcgaaataaactgtttgaagtttgaacactgctttctatactataattactctaaatttctcaaaatttgtatgatattttaaataactataacgtacattgaaaaaaaattaaaaaaatttcttgaatcttgaaatactaggtaatgcatcagtgtactttttttttttaaagggtgtattgtagacgcaccttgagttattttacattgttgttttgcctatttttgtaatcttgtttattgctgccattttattattgctaagatattttacggaacttagaagaatttgaaaaataaattagtggaactctccttttataagaaaggcgatcatattataatattaataaaataatacaaaaaataggaaaaagaattactttggattgatcttggctatagatgatgatctaatggtgaaaattgactcttgatgaaaagcgtcaattttcaaagcttgaatctcgtcttttagattgttttcgggtaatttactgaaaaaatcatacttgtattggggatgaaatttggacttgaaatattcaaaattgagatgcagatgtgagacatgacttgaaaaagattttaaagacattaaaaaagcaagctaaataatgttaattggatcaatattgaaggagttatgttcgttttaataaaggttgttcatgacctaacgcctaggttgacacacaacacccaagttgacatactgacgccaacttagacactggtaagtgaaaaaaagtcccatacttgtattttttgatgtctaagtaatatgttgacatcacttaaccaatttcttagttttggtgaagttcttcaccagttcttggagatgtcacttttttgtcaaattaggtagactcgaaacttcctgattttactgatattccaccttgccgaaaaggtaaaatatcaaagtgtgaatttgacatgtcacaagtcgtagctctcgtttactacaaaaaaaaatagtcaaatgctcgagacagagtcagaattagataagcagaacctagcgcaccagccaacatgtcaacatgggcgttgggtgcttctcgatcggcttctcgaggctcattttgatatagataatcttttctactcctgttagagtagggagtacataatcatgtaggctcctttcaacattagggtgagcctaatctccttgcaaaactctaggaattatatcttcattgagcttcatcttctctgctttcttggcctcccttttgttctttctattctgcttacaagatttctcaatcacaagattcaaaggaacaaggctatctgcaccgcttttgttgcgcatacaaaaaaaattcacctcagatgggaaaaattgacaaccaagcaggttagaaacaaaagaaaataaaatcaaaatagaataaaaattagttaaatcgatattgataaattcaatctgcgcaatgatgccaaaaacttgttcagtaaatttgatacgaaagtatacataatcgaaacaaataatataatgatatataaactatctttccctcaaggattaattatcaattaccaattaattaattccttagttatatttgacgcataataattgttggataaaggataaataaaacacacaatatttaaaatttagagaagtaaataataaaaataacgattattatgatccccactttcctttattttatttcataatacaatttctcttctttctatttaattgataagttgaattaagaagtttattatcaggttaagacttatgaacccaatttatgtgaaaacttcctatatttttatggtacgtttaatcacaaaaatagcattaagcatatcaactaataaaatcatacaaacaacctaggtactttcgtcttaaattaatttgcatccatgacaatgagagcatattcaaatctctcctttcagaactttgatttgaattcataaataacaattatagatggctagtaaataattacaaaatcaaaaatagattgaatgaaattgaataaagagaagaagaagaagaagaaatcacatgaatccatataataaactcaaatggttcgcataataatcattaaa

SEQ ID NO: 219747 - DNA, 2562 bp, Cannabis indica
gaattatatattaagatttgttggttttaaggatttttgttcaaattttattcaatttttactaatattgttctgtgattgttcatgtactaaattatgatgcccaaattttaatatcaaccgaatcatctctcgaattttaaaatgtataaaatcttgtcccctaaacttttatctatgttaaacttttttactaaaattggacaaaaatccttaaatccaacagtatcaatagtccaataaaaaattttaacggctttaaaatttaaaaaaacataatttagtacgaatttaaaattattattaccttagtataaaatctgggttcacggtaatgagtgggattatattttctcttagaatctccagatcgatgaaaacatgattctctgaagaaaataaacccaccaaccttcaaccatttcaccattctttctgccaatttctccacctatatatatataatattccaattcaaaaatttaattaatacatataataatcaaaacaaaacaaactcaatccttgtacaataattataaaaaaatatatgataatattatatagttataaaataagataccataaaaaattaggtacaatatgtgcatgtccaacaaaaaaaaataaataaataaatcaataaacatgtttatttaactaaggtcaattatttattttttttttcatcagataaggggatttggtcaattatttcttgtttattttactaaaaatgcatgtaaatattactatatttatataactaattatggtgattaagtaattgtgtaaagctatgtagtagaataatcatgagaatgagagtttgtggtggtagtggaagaaggaagtgattatcattatgttttagccttcaaattgaaaataataataataaatcaattattcaatttttcaataatttatttttaaaggggatttttttttacatttttaaaagcagattttatttgtatttttacggaaatttacatggaaacacacatagcaatcaacggaacaatttaaatcgtaactaaaatttacatagtaacctagttatataaaaaccattgaagcaaaccaatcggtaaatttgaaaggaaaaaaaattaaaaaataatatataaaataattttttttaaaataaaacaagttagtgttaataattaatatacatatacaacctcctattacaatctcttaaatagtcaacctctacgtctgaaatcacaagtcaaaatatcaaacctataaatttttaaaaaatttcaaatagtttacagtattaaaaacagggttcctaatatttcagtttactacacgcgttcaaaaaattttagacgtatttttcagcactgtaaactattcaaaaaatttacaaaaacgatgttgtaatacaaacacccctgtgaaaaaaaatacaaaaaaattatttcgacatgtttttgggcgtaaaaattaactaagaagttgtaataagaagttgacggtaacactcatcgtgtatatatatacctcttgatcagataaatacatgagaagccaatttgagaaaatcaagtccactgattcatcagagatgttcaaatcaggggacataacatcagcacacatgaacttcacattcttgtaatgtccattcatcttttcattctgcaaatatatatacatatacaatacaaatatatttataaataaaaattcatggatttctcttatatatgtgagaaataatatatgattcctattgtattaaaattgtttcacacaaatttttcaagtcactaaagttctttttaaactatgagattataaatttaagaaaaactattcaattttactaaaaatagctaatataaaatgaaaattaaaagatataattttatgcgtattaaagttggagagcacagtttaatatatattaaaatttggggtataatttagtacaaaacagttattatcacattaataaaattgaacaaaattaaaaataaatcattaagtgtccaataattttagataaaaattctaattaacctaactcttttaatataaatttagtaaataaaataaaatcaaattttttaactttaaaattttaaaatacacaataataataaacaaaaacattcataaatattgtcatccatcattaaactattttttttttcataattaaatatttatgatatatagtgatattatatatacctttcttatgacatcctcaatgaaatccagagcaatgagttggccagctttctgagctaattcaccggtgaaacgaccgattccggcaccgagctccaccaccgatttcccatcgtacggtggtagcaaagataatacctataaataatattaatatttatatatatataaataaaaatgaaataatgcagtactgaataaagcttaattatatagttaattaagtaattattatttaattaattaattaattagtaataattaataatacctctggtctttcttctttgtcaagatcagaggctttagaatcaagcatcatggcttccaatgttaaatctacag

SEQ ID NO: 219748 - DNA, 3543 bp, Cannabis indica
tgcatttattacctaatttgactaataagaggtgcaagagtacttgaagactatctaaaaatagcaagctttggtgcttagaaacctcatcgaaattcgatgcttctctaggaatgggcagagtagatgttgccatggtgcccatgactactaagagaataatttttcctaagaaagtaaagttggtcaacttaatactcatcaaagaagaagatgtgaggaatcaaagcaaaggtgggaaaatggcataaccaagcattaacctcaaactttaaaagtctgttttccctaattgaaactcaaatccaaaaactaatgagagtatatttataaatatgtgaggaacaaaaactgaacataacagacactgtgcttgtctgcgtggtttaggtatccactaaaagctaataaatacaataccaacaactgctattttgggagctttcaatacactattttatgaagattatataagaaataagcaacataaaataggtagtgatggccatatttctgcaaccatctcagaaggaaatcaacatatcaattgttaaaagaagaaaaaaaattaaatatataaataaaaatattgttattccatacttctgtaatcactgcataaaaagagtattttgtctgagtttcactaatacaatggaaattgtataaaaattgaatgaaacccacataaagtaaataacaactaatccttaaaaaacaccaaaagctataaattttcaaattctaagtaaccaaccaataacattacatttgcaatgatagcaagatgaaacatcaaaaccatgataatcacaaaagaatttgatgggaatgaaaatggtcattttgaaccataaatgctagctaataccaattaaatatcatccacgcatacaatccaaaacaatgaattttctgtttgaggatacacaatcttattttatttaatcattcaaaaggactcaatgatctgatgaagaacatgatgagaactccaaacaacatcaaagctcatcgcgaatttcatcaatgacagagtctaagatctgttcaaataaattatcgttggtttccaaacgagtacaaaccttcgcatcattataaatttttcctggtcgacagaaataatctttactaggggcacaatgaacatcctctgtacacctacacaaaccttccaatgcacaacccttcttcactatacttaacccatccttaagtcctaaaacttggtcactccactcacttgagaataaccccaaaggatcataagcctttttaaccttcaaaaactctttaccattcttatacttgtttagaactccttcaaaagctatgttcctgttcttcccccaatggggtaaggctccatatttaaacatagccaattgctcaatctcttcaagtatgtcttcataaagtcttggaaccaatggatctttgcttcgataataagtgatatcaaagtcaattgcatatccatctttacccaaataagcagttgaggccgtgacataacgcatgagaattccattgtagcgttctatgccacataaggcttttggttttaacttgacaagttcttgaacatcttgaatgaagctcttggctgaggacaaggctacactaaatgtggtttggtggaaaaactcacccttaatattggggtcccatgcacacgctgtgatacttgcatcttcaagactatctaaacatgttcctgatgcttgaactttgtgttgagatccaattactggatatccagtgaacaaaatacctatttaatttgaataaattattagttgtaatgaataataaaagtaatttactgcataaatgcttaagtttaacttcaaattgtaaataaatacttaagtttaagttttggcggtaataatatgtaagttatatttttggaactttgcaagtacctaacagttaaatgttaagtcattatattcacacgtcattttcttattggtatatttaaattatttttttaaaataataaaaataatgagttggaccaatcagggaccgccatgtgataatttacttaacacttaacagttaggtacttacaaaagttctagaattataacttaggtattattaccactaaaaattaaactcagctatttatttataactgggagttaaaattaggtatttatgccacaaattattctaataataatattagaccactcaataatctcatgactcaccattgtttgttaaaccataagcacttttagtaaggaaagcagtgacaagcttcgcactaatgcatttcccatcttcatcatttgacgaatcttgattctcctctattacattatatatatgatttaattagtagtggaaaaatgactaaatgtattttataaattattaattaataactgtacatataaattacctgtgagcctagcaagagcaagtactacagagggggaggaacgaaatggaatgaaatcgtataaaccattgccagaagtgttggaagaaactctgtcatcgactctgtaaactaccttttgctgagcagggtaccatgttatatctgcaaactcatgtttcctaccaaaactcccaatttcatctcccaaattggagtcatctttgctcacgtaactaattgaccttttaaacagagcctctagtttaaacgtcacctacattataaaatattatgttaaaattagataataattttaacaaatcttgttttatatatgatgatatatatatgaaaagatgtaattaatgttttatcatgcagtcaaaatattgttttactaattaatttttaattagttggtctattattaaaatttggaacgtttaggtgcctaattaattttaaaacaagtagtattagttaatgacatcgtgctagctaccccccattcattaaacaaaaaaaagaattgggagccatttcggttcggaataaccaattaattaattataatttcttcatttgataaggtctatggtactgatgtttacaagttttaaacattggaagtatggaatttataattatattattattcagacactataaaaagttatattttattggtaattaacataattcattcaagattacgtgttgtgctaatcagtacaataaaatataattacttataactttattaaaaaattgtccataatcttagtcattacctattatataataataaaatttgttttaattataataaagtatgatatttgtgattattattagtctacggccaattcttgatgaaaattaagtatgataaaattaaatgtgtaaaatatttgtagtgggatgagacttcatagatatatgtttagtctaaaaagttagcctgaacaaaagaacataattaatagtgcttttttttttttccagataaaaaaatagtgcttttgcaattttgtttttcctggtagtactgtaatttgtcttaattatatttttcaaaagcttatttaattatcacgcatcttattcttttgtcgcgattattgtttttcttttttttt

SEQ ID NO: 219749 - DNA, 5754 bp, Cannabis indica
aaactaacaataataattacataaaaaaaagtgaagaacggtttggacgggttaacccgaccaaaccgacgaaatcattgggcgggttgaactttctctaatttttgattgggcgggttacgattaaatatttgcaacccgatatttatattgggttgataaaaatatgctataacccgactaaaccgaccgacgtacacccctattatttagggcacaaagcccaacattaatataaatccttatttgctttatcatgtagttttattttgatattgatgagaatccatatcaagacaactaacgggaactctttatacagagatggtagagcgatatagtgagagaaagaccatcaaacataggtgatttaagtaatattactctaaactagaagattggaagaaagttcttgacctacccccgacaacttgaataaggagaattagaagcctatttgcgaactgttcattagcgattttttttttgaatcgctatgaaaaaaacaaagcaaatagacagttgatgaaatatccaacaacgcataacacaagattgctggcttttataggtcacaactttgtaagtagtaatatttatcatttatttttttaatataatttatcttaaaatacattataaactcttttattcatttattattatataaggtggtcaaccataagagcatggtcgatgtatggagggtggctcatacaaaaaaactgtctagtagttttgtcaacgaagtcgatgcagaagattttgtaagtaaataaaatattatattaattatatgttataataatttttatttaaatagggagaactgtgtagggagcttgataggaaacgactcaaaagataatctcagagtgatacatctgatagtagtttgcaattcgacgtacttagaaaagttcttggtgaaagacttgactatcaaagaggtgtgggttataggatcaaaggtaaagaaaaaaataatacaatcaaagtcagtcagttgcgcctcttctgccccctaataaaatgtatcactgtggcagatatgtttataactatacttgacacattaaggagtagtctgatacctaaataatttgccaatttatattactcacagtttgataactttattcaaatgtacagtcaatcgtaaaatcttggtagtttgtcttcttagagttatgccactcctccacaacacatcaacaccgacattctccgtagcagcaacaatagtctagtccgcaacagggaaaccagttcgtatatggaacccctttgtagtctcctcaaaccctaaatcctaaactcaaattttagaatatttgcatgttctttgcaggagtaataatttttttgaccccaatactcaatcaagctcaattagagaaacttacacttggtttatcgtcagatcaaccatatgttccttctccgccacaactagctagcaggacctcccaataataataatgcgtattaagacttttttcttcaagaccttaatgatgattttatggaataattagtttatatttgttaataatttaaacactacaaatataaagtatattttatttatttagtttaatttgagacattataatagtaatgaatattgtatttatcatttagtggtaaattataatatttaaaattagttaaattaaatttaattttgatataatttattactaatataattatattgtttataatttattattaatttttatatttatatttaatagatttcatttttaaatatattttgaaatatttaattactagcggcggatgctccctgctaataatgtgtgtcagttttgattaacgaaactaacatacatcattagcggtggacatctgccgctattacccactgctattggtggttattagcggcaaactcaaaatctgctgctaataaccattaatagcgtccaattattagtgttcgtccatcatcggcagattcccctcgctaatggccaatagctgtagaatttttctttattagcggcaaactcattcgctgctattaacaataaatgttgtagtgttatgtatccttcatcatcacctcagcaaatgtccccttttccttggttgtcattgtcgatgtcgtagatgcaggtgatgaatatgcagtaaacacaatagacaaagtagatgcaacaacaaccaccgtaggtgcagcaacagccttcgatgcactagatgccatcgatgtagtagacaccaaaaattcagttgtagccttccatgcagtacacaccacaaatgcagcagcaaccttccatgcaacacacaccacagatgcaacaacaaccaccagagatgcagcagcagacaccacagatgcaccaggtgcattcattgcagtagatggcacatatgcatcagatgtcaaatttacaacagatgccttcagtgcagcagacactgcagcttctgtcaccgatgacgccaatgcaataaatgccacacatacagtaactgtactacccgcaaactctagaagtatcgcagaaaccttaattactatccacaaatgccgcaaattctacaacaatagtctggagagaatggtgatgatgatgatgataaggaggaggagttcacaaaattgggattatagtattgtattgtaattgtatgaatgtgatgatataattgtttattttaacacttaatttagttgttgtatttagttatttgaatgttttattgtagtttattagattgttaatttagatggtaaaagacacttttacaaattaatttttattagtttttgataattattaatttaaatatagatgtaaaataatcataaaatacaatttaatttttttttttaaaaaaataaaactcattgggcacgataaagtcatgcctaaacgtatggctaatagagtttatgatttcaattgggcatcacgtgtattgtgccgttaaattagtcaattggcataatattatttgtggtacccattgaggtttttaggcacgaacctttaagcacgacaagttgtgcttacatattcattggcactaaaagttgagtttgtatgccctaatttggtggtgtctatagcttttttttttcttgcagtgacaatatggtttgggtcaggagctgttaatttagaggaggtggcccccatttatttcactgagatctgtttatgaacttttaatgatgactaattcagaattaagtatacatactgttgtatacataatttttgttgataactgtggtgtcctctttctcaaatggtttgcaatgtttatttaattgtgaaatatggtgtatacacattaatgaatggagtaatatgaagaatcaattagagaagtaggttgtattttttaactacagcaagccatgtcatccgcactagctagctaaagatttatatacgcagataataaataattcatcataaacatatataaatgtacgttttttacagctcgctagctgattaatcagcgatgagagatgagttcaacacagtaattggcattttttttctccaagtggtatccactcttcatagcacccaacctttacaaaaaccccacataagctgcctatatgacattggagagcactaaacctaattcccatttgatggtcatcaatgaattaaatccccactcacgaaaagaaaaatatatataaataaagaaaacaaacaaatcccccccaaaaaaattaagaaaaggtactaacattattgtcttttaaagagattcaattagttatactatctctctccctttttgccttatttgattatgatagcacaagggttctttattacttagaaaaacccacggattttgtatttgtatattctcttaatggataagggaatttgtattgcgtttgacgtgtcaacgtacaaaaagtgggccattcatatatattttttatagaataatattactctgttattcactgatatacagtcttcctaattttgtgcctataagaagacgcattcctcattttggtatacattcgcagcaaaagaagtatcaatatatcacctatagagagaggtttagaagatagaatatagtacttactatagctagattaattagtttaaggtatcatcaactatgagagataataataatagtattattgggtcacatgggggaaagattagtgagagtgttacgaagatgaagccatatttggctatgatttctctgcagtttggctacgcagggatgtatattataagcatggtctccttcaagcatggcatgagtcacttcgtcttgtctgtataccgtcacgttgttgcttttctaatcatagctccctttgcctttgtgcttgaaaggtctacttctacaacctacctacgttatatatgaatatttcttacgtacgtctcaagaaacatattaaattatactatgccaacatatacaaatatatgtataatatatataataaattatttatatatatatatatagatgaaatggctcaaacaacttgttttgatcgtatatgtactttaccacactttttttttttacaggaaagtaaggccaaagatgactcttccgatcttcctacgcatagcgctgcttggtttcttagagtaatggcctatcacacgttgtgtgtttatattaattaattataactgatcatgcatggttacgaacttacgaaagattgaagaacatattgattcatcatgatcatgcactatatgacacaataatatttaatttgagcaatactttgtttgtattttatataaggcattaatatattattatatgatgcatataaatatatgtattgaaatgatgcatatataattgaaattcgtaaatatattattttgttggaatgaaacatgagtccctgccaagggtgggcctataggtatattccttgcatcttaaattatgtgaacttttcatgcacatacatatgctggcatgcatctacaaattaaacaacttcaacaaaaaaaaataaaaatataaatttaccactttttcctttgtcgttgttttacttttatatattgctctaaagttgatgatagaagattctaatttaatgataatactgtatgttgctttattatatattgggaaacaaatttatatccagatatatcctgtcttcgttgctatttgctaattgaaatgtgatgtcgatactcttcttgcctatatatattctctccattattaatattcattttttattgacatataatatgtataccgtttatctacataatatgtgttgactagctgtgtacactttaaatatgtctgtatgtattttctttcatatatagaaaagaacgagttacatattaaatgtttattcaatagttaataataaattaggaaaattctcatataattaagatatcgacaaattttgttcatataaggactaggaaattctaaaatttataaatactggtgtcgtaagttgtaaacatcaattttctatttttttaattaatttatagtgccaaaataaattcaaacagtattaatttatttatacccatataaaataagttagctaaaccctgatatttctataagcacacaacaaaacaacccacactaagaagctacttaacatcttatacatgtaataatgataatttgtttcattaagtatatttacacattactttatgaaccccggccagatatgcttagcaataattt

SEQ ID NO: 219750 - DNA, 2331 bp, Cannabis indica
tgaagtaaacaatattaaaacaaatcaccctgccaaagcaagaataaagaatataagcaaactagtaatgcttccactaacgttaatataacctgtgtaatcaaatccataacccggctgtggcttatcactgaaaccaaatcctatccaatcaggtgcaaagcaatgaaatccaagatctgacaactactcaagaaaagaatttcataatccattaaaccaaggaaatcatcactgagtgaggataagtatcatagcggcttcaaaatgaaactgagtcagacctgagacataacatttctgtagctaaaggactgtgttggagccccatgaaggaagacaatagttcctcttcggctatcaaccgaccctgatcaaaattcacaacaaaaatataaaaaacttcacattcaaaataacttcctagcaatatggtactgtgcggccatcagtataaattcaatatggttattttgctaatttaacattttcacgttgttagtttggcaaatttctccattgaaatgacagtttgtttcttttaagagtttttttaagactcaaaacaatattttatttcatacctgtttctctgacaaaccatctcaattttccagatttgattgtggaaccatattccttccctttatattctgtcctctagaattcaaacccataaagcagtaagcaaaaataattactaaacacaatcaaaacacccaatttaatactcaaaattacgaaactcaatgaaaaaatttctgggtctataccaaatataaagcttatgaacaaaaattgagcttacatagagcatttggccgacattgccagcctctgctgggctctcctcgatctgaatggcactccggctcgagggattatcggtaacgaatccaaaagggttgaaagccggtgaatcggagtctttatcgttatcattgtcgtttttgttgggcgtggcgttggttatgagcacggttcctcgtttacttttactactttgtgtgcgattcgtgaatagcagttggggttttgaagttgtggaggtgggtcggatcgtaattggagaactggaggaagaattgagaggaggaggaagaagaggccaagccacagccattgtttctctggttgttgtggctgtaagagctttagagattccgaggtgggaagtgaaagagccaacggctttaactataaactttttcattttataataatgattattttattatgataattaaataagaaactaatatttaaacctattttttaattattattattattattaggtttacaaaataaatatattttttttaatataatggataaaagttcagtagcaccagtcttactaaaaaaatgatttgagaaaccttatttgtaggatgtttaataaaatttaaagaagctaaaagagtcaacaatcataaactaagaaactaatataagatgacttatgtatcttattataaattgattgaataacaactaaacaatcatattcaataataatatgttaccaattttttacgcttaatttaattcaaagcctctttaatttcaactacttttgctataataagttaaacacgatcaactaaactaataagaaaagcttccactaaacgaccattactatcacgactatgagctatcccacttgctctaaaaagaccttctaactcaaagattgatccatcaacatttattttaattatatttaaatttagttgattatgatgcttattgataaattcatgaaaaattagtcgacataaaataggctttattgattaaatttttttaacaatttcatgaatagtttgatttaataaatttatttatattctaaaaaaaaaacatacttccaactaaaaatggataaagtgtacaaatgattaagttagcaacttaattatttagtacttttattcttgaatttaatatgtactagattatgttttataaattttttaggtggttaaaattaaatttgacatagatgaatgttcaaaaagataaaatttaaaaatgttaaaattcaggaaattcaggggtacgatttgatagatttaatatttaggggcacgatttagtacattaacaataacctcgttagtataattaattgtaattagacataagttcttaaatttaacaattttaataagaaaatttctaacctaaaaaattcaagaatataattagttacttataaaaaatttaagtgtaaaaattctaattagttcaattattacaaacaataaattttaaatcatttctaaacaaaaaatgaatctttaattgactaccaagacaatt

SEQ ID NO: 219751 - DNA, 5051 bp, Cannabis indica
ttaaattgacaaaattacaatttaaaaaaactatatactgatttcttacaataatgtagattcaataaataaagtttaaaaaaaaggaagaaaatagtgataaaatgtagaatagatgagagagggggtatataattatggaaagtgtagtaaatttttgattgttgaataattttattaatattttattgatatatataggtgcatggaaggaataaaaggtgcaatcccattaaacgattagttttggttgaccttttcatgaatagtaatatttattggctcttttaatatatgtaggatttaataaattttgtcatttatccatttaaaataattttatttcttttttaaaagcgtcgacaaactattttataactccatagagttgtgaaaccattttaaattctacgagcaaccatttttgttcaaaaaaaattatatttaaattttctataactatagttttttttcactactacaaatatatcatatttaattattctaaaataaacgaagacataagaattacccttcttttgaattttaaacttcggacctcctatgtcttcaattattaccaaataatcaaatatatagggccccgtacgcaagctcgactctacgctaaggtgggctagacccatacttattaaggcccacccagactcagggttcaaatttttatatagtaaacttttttgtattgaaaaaaattgtatttttgtagaattttgtgaaaaaaaaatctaataatactagaaataaaatgaaaacccaccaaagaaataatgtttttaatatcataataaattggttccattctttatagttaaatcaacttttgcaactaagaaaaaaaagaaattctaaggggtgccttatgatgtcaatcatcataaaaagtgatattattagtgtacattaatataggattcacaatttttgatctaataaataatatagaaatccattaattactcgtaacgcgtcaatatagtatttttggacatcttaagagcatctctaatgaagtcaactaaaaatagttgtccaattgacctcacttaactcacttttatttttagtcaatcacaagttttcttttatttttctaataaaaaatatgaaagagcattgatgctcaatatgaaattttttcattatttctctcttatctctcttttactattaggaatacacacgaggcgagaaatttgcgagaagtactcttccgttcccaacccaattctgttaaggatttaatttttatcctcgcttatttcccatcgggaacaaggcaaagaatcccttaatataaaaataaatttatttaaaaatttaatatataaaattattaaattatacaaaaataaaaaatattacacattatttattatttaatatattaattattatacaaaaatacaacttaaaaaattataaaaatgacataatatactacaaaaatacaaacacattataaaatataaaatattaataagaagataattaataaataaacggatccctgtcggggcagggagtgtcatccccgtctcctcccaatttaacattcgaagacaaaaaataatcatcgtccccgccccaataggggcgggttcccgcacctatccccaagagaaaaatatgcatccttacttgccagttgccacataacatagtatggcccaccattttttggtcaactacatgagcaacacccattgaaagtggcctaaagtgcctaatagtaattaggatgttcataaaataaccaatctaatctaatttgcacgatctaattcgatcaaatccgtaaagtgcggattggattggattgaaaaatctaaaatccgtacttgtgcggattgaatgttgattgacatgtaaaagtaactaatccaatctaattcacacataatacagtttaacagctcctaactatcaatagaaaagaaagacctacaacgcttatatatacttgacttctccaagctcctagtttaatttgtagattactctaaggaaactccgagatatatagagagagaaacaaatagagagttagagagaggaacattgcaatacaaagaaaaaaagagaaaaaattataaggattaccttgtcgatcttaatgtgacttggaacccttgcctataccttgtaatcaagttaaagatattagagatcgagtcagcaaccatctgaggaacagctcaacggggacgaaactcatttttgggtgaaccttgagaaaaattatggtgctttctttttttttttttttgtgcttttgtgtttatgggtgtagattgatctagatctaaactgttgtgtgtctttgtgttgaaaccctgaaggtttgagttggtttagctttgctagggttttcaagatgaagaagaagattagagatctaattgatctcgagaatcttcgaaaggttttgttgtgggaaatcaaaacaatgtagtattgatttgttatctttggttttgaccgaagtcaatttgagtttggaaaagacttaaatgacattagtttaaatattatttgaaaagcaaattaagtcaagcgaattaaaataatattactaattaactaattaattagcattctttgctactaattttttcgtattcagaatcttcaaaatgcatctttcattatacaataatgtgtttggagataagaacaccccaaacttttgtaaattcaccacctggccaggccaaactccaaagttggtatttctgaatgtaaccatacattgcttcaacatcagctgggttggctctacaaaacatattgttgtcgttagcaaacataatgtgaggaattcccatgttacttctcgatatttggattccatgaataaggttgttttattttgctttccttaataatctagcaagcacctcgctgcaaatgaggaaaagaaatggaaacaaaggatctccttgtcggagacctcgttgaggccaaaatctctcaagagtcgatccattaagaagaatagaatagctaattggaaaaacacaaaacaatgatcaaatttatgaaaccatcttgaaaacccagcgtcttaaatttttgtagaggaaactccattcaacacaaatcatatgctttgctcatatcgattttgatagcgactaagcccacctttcccttgttcttcctcatacattgcaaattgcttgccttcgtgtcaaggcatggatagctgaatgctctatacttagttatatcacttataatttaaattttatctctgagttgaaactttgagacatgtaatgtaatctaaaagtatccaagttattttttttttcacatacatttgtgaataaaacacaattatgtgtagagtattgttgaaaaaatatataaaaaataattgaaattataaaaagtatatataatttagtaattaacttactaaatgtaaaaaaaatagtaaaaatgtattatacgaattcgagctcgcataatggtatgtgtatttattatgatttaatactgttgttaaattctcatgtaagcaatccccttacactatcaactaactattattatagttactgaaaaactacaacaaaacttaaaacagttacaccaaattgtctagcttagcattcatactcttacactcgcaactaacaaaaacaaatctctataaaaggaaggaggcttaagttcagagatataccttttcaaatcttcatctccagttagagagagacccagaaagaaaagaaaatagagagttcgagagggaaagttttgagagattaactttgtaaagaaaaacacacacacacacacacagataattacaagctagattgtagtttagaatctccaccattatcttgtaaactgttgatgattgatagtgcacgatcaagcatctgaggcgagcttgatggagacgtagccctaatttggagtgaactcgaagatcaaatctctttgtgttcttgtgtgttttctatttatctataaccaacaaagatcgttctagatctttattgttgtttttgtttgtgtttgggtttcacaagttcaaggggttagattttgaagctcaagatcgagcttgagaggaagaagacgaagtctcatctactagggcttcaagattgaatcatagtgttctcgattcttcccaactttaattttatatcaaaagtatatagtttcgttttaggggtgctaattttggttcgaaaaggaaattttcaaaaggtctcaaatgaccttaattttgcgtgtttgggattagttggtgtaaaggtatttcgggaattgtattacatacaaataccttaaataaaatatattatgatttgtttatgttgattagagcatgaattagttgtttgaatacatgattatgatgatgatgcaaatattaatcttaaatttatcagcatcattgtgatgcactgatggtgcatatttgtccttaactcattgaaagtatatgataaaagtcttttacattttttttatatataagaaaatggatcaaatcaaatgacataacatactctttttacatttttctttgtagacttttttttaagagaatgatttgaatcacactatgacaattattgatatagaagaattttcagtcaacaaactaattgttttgataagatcaccttaaatatacaaagttaaaatatgagtcactacaagcaaaacgatttatataagacaattatttcgaaaatttagacaaaacaacttaagaccaccttcaagaggcatccaatataaacaaccaattaatatcttctaaagaaaagcaaataaaaataaaataaaaaacattgttttgtttttctttctattttcttaagaaaactaaagagaaatattagactaattgttgtgcttcattcaaatgtatgtgaaaaaaaatatactaaaatatcatttttgccatttagaataccaaaaataccaagaaaagaaaaagcatcatttagaatttgccataaaataagtagttttagtatttaagtgtaaaataa

SEQ ID NO: 219752 - DNA, 4915 bp, Cannabis indica
aagaaaaagaaaaacacaattatgttacatagtgttttcatcgattgaaattaagagatatgcctaaaagtggataatttatagtttatagcgtatattctcttaacttgcgtaatgacttgtctttctaaaatcagttgtatgagctatttagagtctttagacaaaccatttgccaataaattatgtctttcagggtgcaattcctgatatgcttcagaatactaccaaggagtactattcaaaaattgttgcgattgtcaaagaagctgcagagacatgctactctaaaataaaaactaatcctttcattgattgtccacacaagccagaaggctcaatgtttgtgatggtaagtagcattaagtaatttactgtaactctactgttttagccactgaaattatcgttctgaagcacctaagttgtatctcaggtaaagcttaatgtttctttgttggctgacataaatgatgatttggagttctgtctcaagcttgcacaagaagaatcagtcatagttatgcctggtaagctgattgtttctctgatttgttcgaagacataaacaattaccatttatatgagatcttgttgaagctatatggtttataggtgttgtaagtgacatttgggtattcttgcaggggtagcattggggatgaagaattggctgcgaataacttttgctattgaaccttcacttcttgaagatggtcttcaaaggatagaagtcttttgccataggcatgcaaagaagcaataagatttttattgtatgtgtcttgaaaatgctggtggggtgggaggttaaacagtttatatcagaaaactatcatcagcttaactaataaaaactaaactgttgtcccaatatatttgaataaaataagggttgtttgagatgatcaactttttgttgatcttgtatgaaatgggggatttacaactttgtatttcatctcatgctcttggtgttggagctctacaactatcatcagcattaatgcatggtttcttgtaatcaacattgtaatgaaatgatgattacaattccaatctttacttagtttgcctttaaacttagtaatggcatttcattgtaatgacttacatcactggtatgaactcttatacctcatgaatcttcattacaattatttaaaatgactatcttacttttattttatactttttcttactaaagtgaagataattttataaatttaccgcctatttcaatattcattttaacaataaattaaacataacaattattaattcttattccattacaattaccattctattctaccaaaccaaacaccgatggagccattcagatgttccaatatgtttggggtcagtagtttttcaatgatctcatgatacctgttgtttgtaatatttacacttcatagccttacataaaatttgtgtggctttgtatcagctcagacacaattttagtacggctaattcatatcccatcttgcattattatttctcatttatgtaatttagaagcgtataacaactattaaaggcttttcttttttgacgatttcacatgttttcccatgtttttttagtccacatttggtgttaaatgggaaagaattcctagaaaaaatcatggaaggagtaagcagatgataagatcaaccaacagtgttgttaatcacaatcaaattgcttataaaaatcttctttataatttattggcaaatggtttgtctaaagactctaaacaactcttaggagaatgcgttccaagttgaactcaaacagatgaattcatattaggatgacatttgaatggacgtaataaaatgaaataatttttattctattattttgtttggttgcattttaaaatattagtatgtcattctaatgaaatgactattctattttaaaatggaaaaaaaagttattcgaatataagatagaaaaatttaataattgttttatcaattttttttaagcattttaaatctgatttcattctatacttatttttattctcatttttattttaatgttttcattcctttctaaccataagctacctaagatcgtcgtaaaaatatcatggcttcttggcatgcctttggcagaaaacttttagtctcccaagagcatcttcaagacaaggaagctcagcggcgaaagtgattcgaacccagtttttcagcccaacaacaacacctgattatgaacctttatgtcagcacagttacatgttttgaggataatttatgtaatctcacagtaaagataaaatgaatattttttacctggcaggaaaattacagattcctctttggctagcttcagacagaagtctacatcgtcgacaacgttttctagtagtggtaagtttatcttaacctgttaatagctaacactgttagtaatccttaaggtatgaatatagcaaaaatattgtcatacagtatttactatttcctcaccataacagccatggatccttcaggtttttgtggacaagtgaggcacggaattgcctctattgcttcatacaaaaactctgcagcttctctcattatgttcttaatattcaaaaagaattcattgtttgttttctcaagaatctgaggaactgctccctgaaaaacacaagtgatatcagttttcattttcttctgctcaagagacaagaagatagaattgaatcaagtacctgaacgaaggttgcagggtcactggtgatgttcaggcagttgttaatgctctccactatctataaagaagagagtaaagttatatttcatttagtgaaaatgaaattccaatctgttcatcaaagacaaagtccatgattaaaaagttttaagaatcaaagaaataaagcaaacccaggttttataaggatgccattggggtcgtttgtgacaatccaaccaagtctccaaccaggaacaatccatctctttgatatggagccaagtgtaagaactggaactattgatgcaaactctcccatagccacaaatggattactcccaatcaccaagtgtccataaacctcatcagcaatcaccaaaattccaagcttcctagctgtttcagcaatctacatatacaaaaacttcaagactaataacatacaacataactaagagtgaaatttcatgatcactacctaacctttttcagatgcttgtatttatagacacttccacaaggattactgggattaattataacaattgctgcagtgttgtcatcagctagagcttcaacagaatcaagatccacttcccaacccttttctggaacaagatcgaaatggcgaacttggagcttttcgtatgcagctctagcttcatattgtgggtagcctggtcttggcagtagaatgttggctcccggctgtgccaaaactgatataacaagttctattgcttgtgtgcaacctgatgtgaggtaaacatcatcttctgataatttgtacgagaggtcacttgagaggtactctgcaatcgctctgtttacatataccaattacacataaatccaattcgattgaaaaatttaaaatatacacttttaccaattggatcttgattaaagaaaattatatacattaatactttaatataaaaaattaataattaaaagtttaatacatacaatataaatatatattaaaatttaataaatcaaatatatattttatttttatgtgtaaaagaactataatttaaaataaaattaatatttatttcaacatataatattttttgaattttttatttgttattttatttattttaatatattattgtaagactaaaatacttagtgcgaatggaatgcaccaacaaaacagtgcaaattagatttagataaacaccataattcaaatttataagttcaacaaacgtgactttcttgggattacacatcatatatattacctaaaactttcaccatatatattgtataattcattttcatgactagatatgtataatatataaatatattttttacttgaataataagaaaaatattaatttcttccaaggagttcacataagccttcaaaaataaaaaataaaaagttaactagacaacacatctgtaatcaatactagtagtggatctgaaaatgtatggtaaataaacatataataataaagctacctcctggcctgagggacgccaactgtgggagaataagaattgaaattggaagatcggagagcatcgacgacggcttcgacagcggcgagggtggtctgaaagctgggaaactcagtggggtcaccacggccgagcataatggttgggcgctgatcatttggggtcagatttttccaaagcatgttgagaactcctcggacagagattgcagaggtattgagttgtttgttgccttggaacttccattcatcatcggatgatcccttcactatttccttattcatcgtcactaagtggcgactcattgttgaagctatgaggaaaggaggtacgtaatattaccgaaattatttagtgttacgtgtgcttacggtaacacttttgttttttaattttttaatcacaaaatgaaagcaaaatttttatttttaaaaaatttatttttgaaaaataaaaatgcattttgtaaaacttttgtttttcaattttaaaaactataaacacttttcatttttatttttattttttgattttatttaagtcgggtctaggtccaaggtcggatttaggttcggatcagaaatcgagttcagcgccagggccgtggggaggagatttggtccgggtctggtcgtaatccaaaagattgattacgaaaaaataagtttaaaaaaatattgaaagtgattttttttttgtttttaaaattttgatttctaattataaaattgaaaagtaa

SEQ ID NO: 219753 - DNA, 4260 bp, Cannabis indica
cttgggctaatgcaaggccataacaacaatttgcatcatgatcacgaagatcttcgagtaactattaaccttgccttcgacgagcgaagatgtcaattcatagaatggagggatcgagagatggaagtgatgagggctcagtaagtagccattgaaaatcgttttaggcaagctgccaagctgatcaaaagggcctactaagttaccagtcagcaaccagaaactaaatctagtatccctctaagcgggtcaaaagggtatgcagctggacataccacacaaactcataatggtgagccatccaatccaaggctataggtccaaacggtagacggcgagaccgccccttgggaggaggtacacattcgaacaactatactcatacagaggtctcaagttaacctcttagccaaacaggtaaaacaccaagaccacctggtgcctcggtgtttaatcgactagtcaccgtgcatgacctcagaagaggattggacggacaaaacaatccaccgaccgtccacctagatacccactccaaagatccagttcaaagagatcccattgtgacacaggccagtgaccaagtgggataagttcatccacttgtgcaagcacaaatagatcaacttaaaatcatggtacaaggcctgaacgacccaaaactcacagatctcaaactcaaccgggcacgtggatcacctttctcacctgaaattgaagctcttgatctacccacaaagttcaaaatgccaatattgaaaatgtatacaggaaaagaagatcatttatcccatttgaagtatgtactttgaaatgcaaatggacctgcaaggggtaagaggtggtgtacggtgcagaatttttctagccacactcgcagaggtcgcccaacaatggtatttcaaattgcctccaggaaagtttaattcatggatttctttctcctctaaattccacgcacaattttcttccttccgttagcttccctcggacctagaagtcctagtagaagtgaagcaaatgccaggagaacctctaagggcttacattagcaggtttatgactggagcaacaaaagttaaagggctgactgaggagggaagattagcagcaatacttgggggcattgagcctctgggagagttatggaaagatatcaaaagattaactgtgggatcaatggctgagtttttcgatcgagtagatagattcattaagctcgaggaagcagtacggcatgtggataccgtcgggcaaaagaagaatcaacaacacaccgcaactggtactctcgcccagaatccacaatatctcaacagctcgaatccaaatggaaaaacgtccaataacaacaatagacaaggtaatggaaagaaaggcaagttcactagcaacgccaaacaacaacttagagaaaatacaagccctcctagatatgaagtcacaaacaaaaacaaaggaagtacaaagcttaactggttggattgatgcactcagcatattcatttcaaaattgatggacaagtgcattcccttcttcaacatcttccgaggcaacaagaagtttgaatggacaaaggaatgcaaaaatgctttccaagaactaaaaagacaactcgcgaaacctcccgtactctcaaaacccttagaaagtgaagaattagagatatacttggcagtcacaaaatacgttgtgagcaccgtgctgataagagaagaaaataatgtccaacatccagtctattatatcaacaaatgtcttgttgaagtagagggtcggtatcctttaattgaaaagcttacttattgtctaatctcagccacaaggaagttaaggccctatttccaagctcaccctgtttgggtttataccgaccaaaccttgcactaagttttgcaaaagcctgatgcctttggacaattactcaagtggccatatagttgggtcagtatgaaataatctttcaaccctgtacattagctaaagggaaggccttggcggactttgtggtggaatgtacaagaaaagacaaagacagttaaaagccccgagccagtacaaaagtctctaccagaagagaataaagacaaacctatctagaaattgcatgtggacggatcagctaccggtcagctttttggtgtgggaatttatctcatgacacctgaggggcaacctctacacggagaaatagtgattcacagcttgcggtaagttaagtctcaagagagtacatggcttgtggagaaaagatgaacctaattgaattatgagagacctagtcgcataattcaagggttacaccctcaagcaaatttcaagggaagaaaacacaactattgatgccttggtgcggcttgctagcagcatagtgacagataaggccaacttagtcccaatccaattcttgagagaacccaacataatctgtgtagaaaaaatcaaaatgataaacacattgctgaactggatgacacccatagtagcttaccttaacagtggagaacttctaaacaataaaaacgaggctcagaagatgatgagaaaagttgctcggtacatcatagtagaaggtgtaatgtatagaagaggcttctccatgccactgctaagatgtgtaacaaaagaagaatctgaacggttcctgtttgaaatacacgaaggattttgtggtaatcatactgcggggcaaagtttgtcaaagaaaatactaaggcaaggatatttctacccaattatgatggaagattcaaagacccacgtaaagaagtgtgataagtgtcagagattttcgaagatcccccacgcacccccctaatgagctaactcagatgaaaagtccatggccctttgccatatgggcaatagacctaatcgaacagttgcctaagggcaaaggcagagtacaatatgaggtggtcataggggattactttaccaagttgacaaaagttgagcccttagcaaccataacatccaagaaagtactagattttgtagttaagaacatcatatgttggtatggacttctacacaagattgtctcaaacaatggcaagaagattgatagccgtacgacgcatggaatcatcaagagtttctctacagtagcacaccctcaaacaaatggacaagtcaaagtagacaacaagacactcaaagacaccatgaaaaagcagcttgaagaagctaaagagaactggctggaggaactaccagaagtattatggtcgtatggataatagaaaggacagcaactgggtagatgccatttgccatggcttatggttatgaagcaatgttgtccgtcgagttagagcctccatcccacaagagactaacttatgatcaatcacaccctcctggtagaatcacttgatgaaattgaagaaaaaagagcatcggtaaacctaaagctagtggctcatcagcaaaaggtagctcgatacttcaacaagaaagcgagggcaaggaagttctttgtaggagatgtggtccttagaagagtattcttaaacacaaaagatagcacagctggcgtgcacggacctaactgtgaagaaccatatcaagtaatagaagtcacagattctggagcatataaacttggtcggtataatgaaaacatggaactggttctggttccaaggtattggaactgggaacgtttgacgaaatactaccaataagtgtacaaggtttgatgacccctactgttgacctcgcttttggccaacgacagtgagtcgagattgtaagcaaaaagtagtataatgtatacgtaatataataaagtaaataaagacacaagaattttatagaggttcagccccgagcagtttcgtaatagcctaatcctcttggtttgtattaacttaagaacaaggaatataatcacttttcttacagctcttacactagtatctttgaatatgaattcttagacaagttttcgaccttttgcccagtgggtatgaatcactatttatagggctataagctttagagggaagaatttcccttttaattataattaatataattggaaatattgcatattaaatacagaatacactaattaagggatttggacagcttgccatatctctgtgatctgatcctaaaattatagggttttcatcggtgactcacaatgcgaaatctgaaattgctaagtgttggcatgctgttcggattgctcactgcctcgttaagaaggcttcgtccgagcgaatatatgtggtgctttgttcggcata

SEQ ID NO: 219754 - DNA, 2633 bp, Cannabis indica
taactgtatgacaccttaaatttactaacaatttaataatttggaaagttttatagccaaaatttaaacttaaagggttaagtgtaagtgaaatgatagtttgaaggtttaacagccaaaaagtctttccactttactaaacgaagagtaagtgcacatagataggagaaataaaatttggaacaaagtgtaaaactttgttcaaattgatgatccccactataataaggtgtaagtgagagcgtactcttattttttctttcatccttttgtgttattaatcttgtgttttttatttacattttgcttatattattgagttgtgagatcacttcttcatttcctatttcttctatttattttaaagttttgcagtgttgtaaactttattttaatcaattccattattctcctagtaatattttccaattgcatgagcatgtacttttacagatgggatctcatatgaaaaagacaatattcgagcaacaaacagcgaatgctctaacgaaatggcataagactgcaatatcagcaagaaagaaaggagagagaaaagggtcgatggacatgacgagtggcacttcatcagtaggagggtttagtgttatgatgagtagtggtgaaaacacaccaagccaaggttcatccccactccatttgcttcatacccataacaaacaaaactactactacaataacaacaacaactccactactactactcaaactcgagatcaagttcaatccgacgtcgttcttgtcaactttcccactcttgtagcacaaatagaaggagaccaaccttgtcatcatgtcatcccatgaattcctctttcatgcaataaccttgaaatgaaaactacttcgaaaggaattaatcatgaaagaatattaagtctaaaaatgaagtatatatatgaacaattatactaaatgcgggatgagttcatcgaatatatatacaacataggtaaaggattgaaataactctactcatagtcattgattttttaagctttgtccaaggaatttggatctacaaaagaaaaacaaaattgagttagtgtaggaattcagacttccaagctttctcttattctcttagatgatttattgttttacataatgaatagtgagtttggagatcagtaacgtacatttataaatgatatactttatcgtcacattaattatcagaatattttgataattaattcataaaataaaatcgaataataaaatattattggtgaatcaaaatctaaccataaatgaatcctataattactttacgattcttgaatttttgttgcagcatgtctttaattagttaagatatccaatttattattgcgtgtttaatgaccacttatcatgtttctttatggctataaatacttgatatcaatatactaacttcaaccaaaaattttagccataaatatagtagttgaatttgtctcaaaattttcttaataacttgtatattgaatcattacctgtaaggcctactatgcaattctttaatacactatatgatgtatcctcaaaagaaaatattaatctgacttatgtacactataaaaaaagctacttttaatgacaattttttagtcataacataaattttttgtgactaaaggtaacttttagttacaacgaaaagttacttgtgactaaaacatagtatttagacacaagttgtcactaatttagttttagtcaaaacaagtattgtgactaaaaacacatttagtcacaacaatttgtgatttttgtgactaatacatttaaccacgaactttttagtcacaacataagaatggtgatttgtaattagtcacaactattttacttttagccacaaattttgttgtgactaaaagtaaaaaattttgtaatgataatagaaataaattaaggttatcctgatataacttattggtaattttaagaacgtaattaaatattaatttacgtgaattaatataacagtgaagttaataatttaagtggctaataatattttaacagtgtgaatttattttaataaagtatatatgaatataatctttagtattttaaaatatctcatcactttgtatgaaaattataaagtggtctaagttaaaattattttgatacttcttaatattcctaaaataaatgcaattttaggtcttactcggacttaagcatatactagacttctaaagataaaaagaactaaaagaaggttttaatttattctcatccagatttttcaaacactagtttgagttgaatatatcactcttaaaaataaaagtattatgaagtgaataatatataattttatttaattagtgatgaggggactattctcaaattaattaaaattatatgtatcatttatttttttatcttaaaaataatttgtgagataaattatttcaccttttatacgaaattttttatcattacttgcaagtagcatatagtctataataaaataaatattactctcacttaccttctggtgtaaataattaatctataatattgttttttcaagtctaaagaaaaagataacataatgaaatactatttttgtgtaagatttgttttaatctaaaattagacttcttatg

SEQ ID NO: 219755 - DNA, 3239 bp, Cannabis indica
tcatcatacattggaatggttttccttctctttcaaaattgaatagtcattctaccaaaatggtagaaaggtcattttattggaatgacattccaacactttaatatgctaccaaacaaaagaatattttctttccttccactctagcagctctccaaattaagttttgtttgttttcatccttctccaactcacaatcttccttaaagcattctttaataaacttgaacgtgaaaaaaagatgttatgtgatttttcacccgaattgaacacaccacatatcctagctagaagatgtaagtcccacattattatgcttaaagaagaagctataaatcctaattttttctaaaagaactttaattaaaaaattatttttatttttttagctaaacacacatagaaggccttttttaatttaaaaagttaaaaagaacttatagaagctaaattaaacggaaccatgagatccgatcgatgaactacttttttttatagttaattaattttgaaatgaaattctaacaaatttaaaaaggtagagtcaaactcaaaagagttatttaaccgaaaaaaaaatatagctaccatacagcctagctatctacgtttaggcattcccaaactactatatctcaaccaaactaaactatagtcagggccggccttgaattgaaatgggctataggaaaaaaaaatgaatctttactataataataaatggtatttttgaaaattattaaaaaatatgcgtattttttaaaaaaaagtattttttttatttaggtctctaaaataagtggaccctaagcgcaaatctaatccgcctatgcccagaacttaccctgactatagtggtccatcttacacttctagtgtcatgaactaacctatgaactgaactgattttatatttacttttcttttttattaactaacaaaataatgataatgaccatatgatgatttaaagaaaaattaatgcaaagcctttggcttgggatcggctaggtgatgtggtgttaagtattcattggtggatcaatgcaggttgtggcgaattcagaaattttgttcatccaagaagccaaaggaaaaaaaaatcagggtccatgcaagatttttggattgttatgtttagttttattttttatttattttgtgtgtatttttgttagtttgtttgtagattttagtttgtttagttttaataatacggatgaacctaataactttatgggaatgtattgtttgtaactaggactatactttcaggatttccttcatattcaaacgtgggcattattaatatggatattcaacctgtaggttagctttagttgggaggaataagatcctaagaataaaaataaaattaaataagatttaaaatatatatataaaaaaaaataagtaacttttttatttatatttttataatttacttttattaatttataaaaatagaaatagcataacatcccgatggaaattttataacctcaaaatgaaaacagcataaagatagaaataacttttataaaaatgaaaaaaaaaaaaaaaatctaaaaattacataaaaaaacaaaatagaatataccggatacatggcaatagctcaaaaatttgtgcttgttcctcctttcttccctaccatggcaagtttttgtgaaataactctgatgagaagaaaaaagaaggcgtttgtaattgaatagtttttacttttatattttaaattagaatagtcatttcactaagatgtgaaaataaaaaacaaaaaaaaaatatatatatattctatcaaaatgacaaaatattttaaaatacaacaaaataaggttggttattgcttggaaaaaaacttaagtctgcatgatgacttttttgtgttaacccttgatgatattaatctttgtattgctcatctaattagtgaggatacttgagtttgtttcaaaaaaataaaaacctaataaattaggatgaaataaaaattaattcatttctttcattctaatttattatcactaaccaaacataacattagttagtgatctgcagttgcttatatggagtttgtgggtcgctattttatttacaataataatatttattttacttaaatatgtacatacttttagttgattaattgttagatttaaattcaatgcaattaattggatttacatttcaaaggtcctaaaagtctccctcgaaaggattgatttggccaaccaactattaaatatcttcactaatatttatacatattcaatgtattccaatttcttgcttgccatacaacaaattacatatgttcacaatcttgttgaacactaaaaaatttcacattattgtcaactttatatatttattatttctggagtaatataagtgttataagttttgcatcttaataatgataatctagtgtataatcaacacgtggactcattttcataaaagatatgtcaatggtataaacactaataatttacagtcctagctattaaaatttttatcattcataaaaatataacaagactgaatgtgataaataaacatattatatagtattataagcatatataaataaatctaaaaaatacatgtgttaattcaaaaagaataactcaaatagtgaaaatgtatcatccatagatagtgataattttaatctatcttgtaaagataatttttattataattttgagtaatgatcctctaagaatactagacttagatttctctagttttctctcttgatgaggaaagatgagaatagagttgacacttatttctaaatgaccactataaatttataatctcatagtaaggttattaatttaaaatatttctaatttagctcctcaataaattaaaaatatcgcttaaggtatctacacatttaacccataatactttaatacctatgacccacaattattaaaaattaaaatgatcaatttatttgggttaaacttcgaataccaatacaccaatacatatgagcctatataaattattttaatccaacaatcttccacttagactatatatattttcttatagtgtgtaatcttatacgcgcttaactttcctatcataattataagttgttgaccgaggttttcggcaactattaaaatataattataataatgagctgtaagaaagtgagatgaagactttttacgtggttggggcgttaatgagccttagtccacgagccactg

SEQ ID NO: 219756 - DNA, 2986 bp, Cannabis indica
tggctgttgtgtcctggtagttacatttgtaacagggtgatatctttgttgagcgttcatgtagcttgttaagtatgttacagcaaaagaagcgagaccttttgttggtctcgcttgttggccatgaacaacacgatttcgttcattccatattgtccaaagtgagcaaaaaatttgttccatttcaacttttgaatagattgatgaaagatgaaatagataatcacctttatgcattgcagcagatagatgccaatcaaaagccatatatgagttacgccaaaccgctcgagcatatttgtaattaaaaggtgcatgtccaaccgattcctagacctgattacaaactgaacatgtagaatcagttattatttttcttttcaccaatgaagtagaaattggaagtgcatcatgaactgctcgccaagcaaaaattttcactttagggggaagttgtaatgaccagaagaacttccaccaaggtgaagcagcattggagcttcagctttcatcaattttgtctagatctgctgcaaggtggtaaccgatttttatagtgtaataaccggtgctgtgatggtgccatatgagagtgtccatgctgttgaaaaaaactcaatggtatagtcaagattctttccacatcgaaggcagtaaaatactggtgtagaataggcacattctattggcgctcctcggtaatcatgttagcaactacaccgtttgatgggcctgtatagtgaaatggcaagaaggtgttttaaccgggtatccacggatcaaaacctgccttcattattcttccgtcacctatttccagcgtagtccttttaaaagaagctctattccccaatggattccttgccatgttaaagaaggaaagtggcctaaagtggcttcaagaaaactatgttcgaaaagtagttgctctttagaattcactgagagagattcaggtttttcaagatttgccacgcctgcctcgctagtaatgcctgattgaagtgtataaaccccataccaccttcgatttagatttacaaagaagcttccacaagcgccaatgtattttcaagcccattttagttaagccccaccaaaatttgccatcatagattcaacttgcttacaaaataggctggtagacagaagcaactcatagcgtaggtagggatcgattggaccagagcctttaagagaacctctttaccacttgcagtttaaattttctcattccaagtgttcatcaacttccaaattttttcttttatgttgctaaacatctccgttttatcatggcaagagtaagagggcaaaccaaggtacttttcgtgacattcacagatagacatggagagttgtcggtggaaaaaaacacttgtgcagctaaggtggtattcggagaaagacatcactgatttgtttaacttaacctccaggcctgatgctttatggtaggtttccaagactctcttaatggcaaggaaagatctctcatttgctttacagaaaagtaggttgtcatcaacaaaaaacaaacgagtgattggtggagcattccgtgttagcttaaagctcataaggttgcgggaattttgttcatgttgtaacaatcttgaaagaccctctgagcatatcaagaacaaatatggagataatggacagccttgtcttagacctctagttggtgttaaagctcccgtaacttccccgtttatgagaaaggagaaattattagttgtaaggcatgcatcacataattaatgaaatccatctttcagcaaaccccattttcctaataacttcttcaacaaacctccactctactctatcgaaggctttactcatatcaagtttgaaggagacgaatctattgcgtccttctgttttgttttttattgcatgtaccagctcaaacgccactagaacattatctgtgatcagacgatttggcaaaaaggcactttgggcttcaaaaattactaatgggaggacaagtttgaaccttgaaacaagcaccttagtaacaagtttggagattacattgcagaggctaatcggacaataatcttgcatacattgtggtttcttgatcttgggaattagagttatgacggtcttattcagagctaaagggtcggcattatgattgagaatgcttagtaccaccttcgtaactagatccccaactactgaacaatttttttttgataaaatatgaccgacatgccatcaatacctgggcttttattaggtcccatagagtgtaaagttgtgtatacttcctccagtgtaaacggcttgacaagtgattcattaaaatcttcactaaccatggtagggatgcatgaaaaagtatgattaagtgcttcttcgtcaatggatgtggctgtgaaaatatcaacaaagtaggcatgaactatagctgcaatatcctcttttgattgtacttttttaccaaaagaattgtaaagaaacttgattttgttgttggattttcatgaggatgctttagcatgcaagaatttagtattttgatctccacaagaaagccaatcaactctagatcgttgttgccaatatacctcttcttgttccaataaatcttctaatatggctttcgtactttgaaaatccttcaattgttcactggtacgagcagtatagttattcaagtcagccactttggttttcaaactattgatatttttcttcatttttccgtacttgccaatatgctaactttgcaaatttttggcacatgaattcagatcaagaaccatagcagtgatcgggttagaaatagagttttgattgtagctttgcgatataatttcagcactttcagggtcggatagccatagctttttgaatctaaacctgcttctgctctttgttgagttatcaatcattgagttacaagaaaaggtagcaacaatggctctatggtctgagtgctagtactctagatgttcaacagttggca

SEQ ID NO: 219757 - DNA, 3951 bp, Cannabis indica
gtaaaatatatattaatatgttagaaaaaaaagttattttagaaaattgaaaacaatattttgatgtttcttattttttagttttttaaaatttaatttttaaaaaattttggctcttatatattagttttttaaaactgtttttatgttttaaaaaacaaaaaaaaacaattaaagttatgaaatcaaataacatccaaaattctaaagtttgtaataaatagttggaattccttttcttctcaatctcattgtacttagtttcatttctattttttccataaactcaagctcaatttgatacaacactactaaaaaatagggcattcctgtcattgtacacattggaagttttcgaggactcgcagtaatgaaattaagtgatcattttaaactgatgctattgagtattgagagtctattagcgtacgtcgattcgaaatagtctcctagaaacatcattttaaaagaatatttttttagaaatggtacatatagagttataaggtttgttacgtggttggaaaaaaattagagttctggacaagggattatctaaatctagaaattttaacggtattaatttaaattatgaagatgataacattccaaaaatgatagacatgcacaatatgaattcaatattggtccactgaaaattttcaaagttaataagaatttcttaaataatatatatatgagtaataatacttagaaaaattgtatagagagagtaataattaatattaatagacttacttgatcttgtaagagaggcttatcgtgacgcaaatatgtatgtaagccatggcggacggccgcgcgcgcaagcttctccgtatcgatattagaagcacgtaagggagtcaatcggcctgatgataattgtgggtataaaaagtagtgtagcttagtaaaaagggccgtcaaaacagaatctcctatgtattctaatcgatcataatggctgttaatgtcatcagcataagaggagtgtgtcaaagcttgttcaattagactctggttgttgaatttatagccaagagtttcttccaatttttctacttcaattggagtactcgtccttggctcatcattgatattattaacatccactggggttgttactggttttctttctgggaccgttgtcattgtgatacccatatcagctaaaatttaacgattaaaccaaaatagagtgatgattaggatataagttagaatactgatagtatattggaaagtaatatgtaattaaaatgtgtaatcgttccaagactttaatataagtttattttgtttgaataatgaattgccaattattttcctagggcatgcatcattgatcaataatacttaaataattctatatataaaaaataatacttgaattaatagatagttcggtgtaattaatcattcacaccaaaagtgggatggtttactgattttctcctttaattgacaataacaatatatttttttttaccatttttttaaaaagatttattattaatcacgggagattagcaaaatatagttcctccgtaagttttagattttgaatacatatttgagaatgctaataaaacacatatatttgactcgttaaaagttaattatagtgaggtaaatttactaggcattaattaggtattatgtgacaaatgagatacgtatacaaatgataattaaatgtgaacaattaagttacaattagagataatcaaagaatacctaaattgtttagagcagatttggcagctctgttttgagcaacttcttttttgagaaggtaagttccagttccgaggagtttatctccaacataaacatgtatggaagagttttgggcccatgaatccaccattttaacttttaagctattcttttggcatatttcgcatagctcagtcattggatgacgctttagcgtttttgcatcaattataggttccagaatatctttaaaaacctgtaacaaaacccattatttaattttaccaacaaaattcataaaacgtgttatcacagaaataaaaacacctcatctgatcttattatcatgcaaaccacccacctacctagctatctgtcaccactacccctagctataagctattatatttttataaaattctatatatataattgatatatttatttttgttttctggaaataaatgatatgaacttgatcgggaaagatagcaaatttcaactaaaaaattagttagcataaatatttcttagttttgaatggtaattaaagttttaccattcaaaactaagaaataaagaattcaaaaaattttgaaaacaaaaaatctacttttatttttctgtttttaaaattaaaaaacaaaagtattacatgtaaataagaatttctaaaaaaattaataaaaaaaaaaatatcctggaaagaaaagaaaagaaaaaatggaagtaccgtccaaacagtctcgaaacaacagttactatctacaaagacagctccaatggttgattcaacaatatctgctaagactttaggcacttcaataaggccggttgagtgaagaggatactccaaaatatcactactaaacttttttatctgtaccattaaattcaacgtatataataatatatattattggtaaattaggtacgactttattaatttcttatatcaaaatataattagattattttttggagcgatgtatacggacctgatcttccaagagaggtttattgtggcgcaagtaggtatgcaaatggtgtttgatggccacgcgcgcaagcttctcggagtcaatattggaggcgcgtaagggagtcaaatggccggaggagaagtttgagtattcaaagtaatggagttttgtgaatagaacagagataatggagtcccctaagtattctagtcgatcgtaagaactgttgcggttgccccgaacgaagacgggtgggtcatagcttgttcgatgagatttcgatcattgaatttgtaaccaatgatttcttccaattcatctaccttctcactatccatcgccggaggtggctgatacgaacgccctgctgtggttgctgccgccgtagtttcagtttctggaagcttagttaagatatccatatttggcaatggacccaacaaaatccttcaagagttctagtagtacactttattatatagtggaagaatatatggttgaatttaaaattttgacttgggcgttaagttttatttattttatcttttaaagttatataaaccctatatatattagcattaggtataggtgattcgcgaaatgaaatagataataattaaataatatgaatatattagagatattgtaatttaaattttaaattttttttctttattagtaaaaaaaattgacgtttttacttaatggacacataaatacgatagcaaatatgccgtgaaaaaaattaattatttaatgaaaaccctgtggtggacttataactaatccagctaacatatagtatttgatatcaattatagtatatttaaatggaggaattaaatgagtggatatgcacgactatcgaatttgtttatatacacttgtaaatttattagtagtattaatttggaggtatacaataaatgataacaggaagtgcataacaaatggttcgttatctatttttcaagctttctataattataataaaagttgttagtgaatatctatgacaatcttgttataatagaggcttcactacgaacgatacaaaaatatgtgatatttaaattacaataattagtatcttttgaatttaattacgacactagatcgttaattttttctaataatatattcacttattaaaatatttgttttttaggaataatcaaaagaagttaatagatgaaccataataatgttaggcgattgtttgttgaaggagttttttttaggaata

SEQ ID NO: 219758 - DNA, 4120 bp, Cannabis indica
acaaattaggttcaaaggaatgtaacattcagacaactataatgattgtggataaaagctcacttcgccacattatgaacacaaaccttacaagaacgaactacattagagaaaaaacaacccacaataaagaagaagtggttaaatattgccgagagtaattctcgatttcccatctagactccactcgcttaagagagttaatcaccacctgagggtgactctcaataataacaaaattgcatctcttctctaccgccatctcaaaagccaagcaagcagcagcctcgccacaaagagggtctgaaaaatcaagtcttgcagtggccgcccaacaaaatgtccctgatgatctctagcaacaacaacaatacacataaactctaaccccactctagcatcacagttcattttgatttagtccagcggagggggtgccaaacatctgtctgagtaggagtactgagagtgggaataatggaaatagctctgtaatctgtataacaacaaaagatatagagtcaataaagtgtttgatgttacccaaattaccattgtgaaccttatcatttctttctagcccaccagatagtatccaccacaatatagaggcatacagaaacacctcattaacattaatgcccctatccttaaggccctaaatgaactttacccagtctcatatacgaataccataataaacaatattaggaaagatgcctcaaggggaagacctccataagtgataagccaagttgcactggaggaacaagtgctccacagtttcagtcttaattcagcaaatagggcaaagtggagtttcgatacaacatctttcgttcagaattggcctgataggcagcgcgttagaaatgatgctccaccacagaatcttgtgacactcaagagttttacggttccaaagtttattctagagggagggtgagaccacacagtgagaagcctgctcaagggcttgggtcaagtaattaaatttactagagaatttcccactcttttccttagtccatatccaagaattactccccctaccagaaggctttgcccttttcaaaattattgcaacagtttcaggctcaaacaaatagtgaagcttataaaagtcctagtccccgtccttagtcaaaagatcaactacccaattatagccaaaggaaggatttccattggaatttgaaaaagaatctgttcccgtgaggaacctaagaatcatcccatatacttttggacttcccatcaacaatcagcttacaggctcctttctgaatcgtggatctagccttaaccacattcttccaaaattaagagtctaaatccttgtaactataatgaaagaagttattaccccgtaagtactttgctttaaaaatcttacaatatagcgagtcacttttggtcagtagatttcaaacccatttgcccagaatagcttgattcatctcttttgttttatggaagctcagaccaccacaagacttagggaggcataacttatcccaagccttgagatggatccaatgattttccttttcaaatctccaccagaagtccctcaccataccatcaattttagtcaccattcgactagagagcttcgtggtttgcatagaatacattggcatggtgagacccacagacctgataagagtcgctcgaccagccttagaaagagtttttactttccacccttagagttttgaagaaaggttctccattataaaattgaaattggcttttttttttgtctagacccaaagagaggaagatccaagcatatatattaccttttggctcattaatgcctagctagtctctaatgtctcttttcatcccatccggggtattgttattgaaaaagatcgaggttttgagtttgttgacatgttgtcctaaccaagaatagaatttttccacacaatgccacaaccctttagcctcttccatatttgcacgccctaccaggataatatcgtttgcaaagagaacatgagatatggtagggcctcctctactcaacttaacacttttgatatcacctttatcaacaatgctttctatgagtcttgaaagaattttagctgcccaaatgaaaaggtaaggagagagtagatcacccagacaaattccacaagaagggagaattttccctacatgacctccattgagacatactttaagggagaaagtcgagatacactgattgatccagttgcgaaaagtcgtcggggcctcaaaactttgcaacacattatcaaggaagcttcagctcagtttttcataggcattaatgagatcaatcttaatggcaaaaaaactttccttccctttcttcctcttgaaagagtggattatttcctgtacaatcacattgttatcttggatgtttcttctagggataaacgccgcttaagttgggaaaatcagtagaggaagaaccgttgaatcctattagcaataatcttagaaatgaacctgtacgtaacattgtagagagaaatatgtctaaactggctaaccctctgggattagtgacttttggggtcatcaccaagtttgtagcatcaaaatccttgtgcataataccatatttgaagaaaccatatcacaaaaatcatcccccactgagtcctaatagtgtttatagaaaagcataaacataccatctggatctagggctttatgactcctcatcgaaaaaagagtgcttcgaatctcaatatctgttgggagtttaacaagatcttcttgctcttctggggtaaggcggtcttggattaggtcgtccagcaaagacacttgagacaaaggatgctcggagaaaatcttgctccaaaaatcagtgaatttgtctagtaatccactcatcattgttgtccattatactttcaatagcattacgtctacctctaatggtagtcgacaaaaagaaaaatttggaacttttacaaataattaatcaaattaacaaagtatatagatatttgcaattgtaagaggatcaaattgaattaaattcatctacttgtgcgaataaattcaaaaaatcaaaaaagtaaataataattcaattgaacttttatacatccaatttaaaataacatacaaaataccataaaaaaaaaaaatttaattataaaaataatatgcccaatcaggcagcatatacctgattaaaatttaatacataccaaaatctaaaaataatgaaaattatctcagatcttatttttttttcttgagtattccaataactagttaccttttaaataaaaaaaaaattatgtatagaaaatctatctatatacatattgccattatcgaaaatactatttttagaaataactttttagtcacaacataaaatttttataaatgatgaatatattgcttttagccacaataaatattacttgtcactagctaaaaagaagtatttaaatacaagtcatcactaaattaattttaatcacaataagtcttttggataaaaacacatttagtacaacaaattataatttttgtgactaatacttttaactacgaactttttagtgataacatatgaataatgatttatgcttagtcacaatttattcacttttaaccataaattttattgtgtgtaaaagtaaaattttttgtaatatggttatgtaagttgattattttcctttaaaacttttatttttcagatttttgtcattaatcaaaagataaataacttatatttttaaaaacataaacaatttatactaaaatttattaaaataaaattctaatacttagcatatttaattaaactaacgaatatacctctactcaaattaaaatatttacaaatatataaattttaaatctgaaaagaaaaatacttatgcatttttaccccaatattttctctaacaattatgtacttttagtgaaatttatcctaattctacttaaatttgggcaacataacgattgtaatcggacattcctaaaaattataaacatgcagaaaataagaatcaaaaacacgcaaaacaatacaaaaacaaatgaaatgacattaacaatcaaaaaattatccacctatctgaccgtagtacatgtattt

SEQ ID NO: 219759 - DNA, 2514 bp, Cannabis indica
agctctgcaaccaacaggttgatcacttcaaaggaccatgcatctgttcagatcaacattgggcatttggatgagaatggtgtctacaccggccagttctctaccttcgctctttgtggttttgttcgtgctcaggttcgctttcttatctcaccctcatgctttttgtttaacttttcaatgtatgcccccttttgattatcagatatatcgatctattaaatgtggattgtgactggagaaactgaatgcttataattgtcatacttgagagccatactttaacaatttctgccactctattttgttggcagggagatgctgacagcggtatcgacaggctctggcagaagaagaaagttgaagttaaacaacagtagaaagtttcatcaaatatgttatggttgaatgaattagaatcatatctcgtttgccttaattttgaatggtgacaatggaagttgacattttttagttggagactcagactcctagtttttgttggtactatgtagttggggttgattttttactatgaagttattcaacttttaagtattattcaaatttatatgcctctttatccatgcatcactgcaatagtgttccctatcataagtttcttaaattatcaaatgtgttggcagagggcaataatttacattttatttatagaaagtgcctaagctatttgtttgaggtttaaccattttttttcttctgctgaaaatgaaaattaaggttgaataaaggtgaagtagaatattatcaaagtagtttttttaaataatttatgttgtttttagtattttttttaatgttcaagaaaatagagcaatacaagattgtatcatatttaaaggttcataccattgtatactttctgtttgcactattatctgttgaagtaatggtatcttatggtttttgaaaataaagttaaaaaattagactttgagattgaaaatattttttttgatataaatagatccaagattacaaaatatgaggttaagaaattaattttttaaattgaatgtccaaattagtattggtgcaaaactcattagtctctaatacagcccaaataggtagtagtgcaaaatacataaataatccactaaatcaagaatttcagggagggagtgataaggcggatcaaaattgagtcaacacaaatacaacatgattttgtatgggtcaaacacgaacacgttttgctatttttttttttaatgggaatagatgatattattaatttaaatccgcaatcacaatagatttgagagtactaggaagagtactctctaaaaaactacgatcagaccaataacaagaagtgcgagccaaacagtgggcatccttgttagcagatcgcttaacatgagaaatggttacattaaataaaggagacaataaaactttgcaatcttttacaacgattccaaacatcgatgtcatatcaattcgactttgcaaagcttgaacagcagtaaggcagtccgtctcaattacaacatttgacaagttggaatcttttatccaacttaaggcctctttgatgctaattatttcaacaaaaggagcatttgagaagccagttgaaaaagtagaggaggccaaaattacaacacctttagagtcacgaacaatgaaacctgttccgaaggaattgttggcatcgaatgtagctccgtccacatttattttgatcattccgtctgctggttttgtccaaaatcgctactgttgctgcaactggagttcaggtgcagtggttcaaatcgacaactttgagcaaacttccattggccaagagtttgatgtgccatagcaactacatcagcagttgaacatgtacgattattctaaataaggttgttacgtgctttccaaatggaccaactcaccatcagaatttcttcaataaattcccctccacgccgagaccaaactgcagtaaaccagtcgaaaaaactggtgcaattcgaagggaggagagacacattttgctattcttaaattacgccattctaaattgattagtggattgagtttttgtttaaaaaagaaaagaagaaaaagtaaaactcgacttgattgatgttgacaaaaaaaaatcttcaggttttctaaatctagttcgtaaatatttcaacggtttaattttacatatttttttccaactgcatagcttgcaacaataatgaagttataatgtctcagcaaatgaaactgtagacaataacaataataacaatgtgatacttaaaaaaaaatctttttaatttgaaaatatatgtaaaataacatagtaaaataatgataataataatagagaatatggttcatttttctgttattttgagtgttgcagataaatggggaagaaaatgatagtaataaaattacacaatgttgcattgctcttatacttttcccatagatattctatcaccctcctctcccttttcttcccctaacacaattgagtgacccttttattttctttac

SEQ ID NO: 219760 - DNA, 1443 bp, Cannabis indica
ttttttttatatataaatattttacttttattatgatatggtcattctttattgtattttatttattatttatttaataaaaaaaataacaagaatttatacttatgcaactatctgaattacccatttgatcctttgtgttctgctgtttctgaatttcaaaatatgaaaacatatttcaattttgtttgacagaaaaatctcctttttaatatatttatatatatttgaagtattactgaatttattattctattatcatttattttattttgtatttatgcttgtaaagattaataatgctgtctctgcagcagtacccctaatgttctgatcttctctgcatcattgactggtttattttttatttgctctctgtttaaaattttgggtctttgagattcttctttggaactctgagcttttagcctttaggtgggtattttctgagtacattaaaaaaggttcccttttatggaaatgggtctgctttttcacatctcatcataatcaataataacaataaaaatactaaaccggcaattataatattattattaatattaacaataatagcatttatccattttctttcgataatacactaattaattgcactaatcttcttgtaaaaaatattataataatagtaataatagtagcaaaaactaataacagcaaatggaggtcatgattcctactacagaacttgtctcatatggctctatgctttaaactattccaagggttagtttacttcatgttttgtctgaaagcttttggttgatgtaagcatgtgcagataaggagatatgattatggggtttttttttattatttatttattttatttttcaataaaagataaaatctttgtatattttaatatcagagaatgtatcttcctttgttcttttctactcaatcatcatcatcatcatcttatatcaccatcatcattttcttcttgttctaactgttttctcttatcattgtacagagatactgatatatatatacgtttgtgatccaaaagaagaagaggaaaatcatagagagagaaagtgttcaatcaaatggaaggtcatgacacattttctgggctaggaaatggtattggtacccagatagatggaaaagtcttacaaacatttcagaagaactttgttcaagttcagaacatcttggatcaaaacaggctattaatcaatcaaataaaccaaaaccatgaatcaaagattccagacaatctcagcagaaatgtgggattaatcagagagctcaacaacaacataaggagggtcgttgacctttatgctgacctttcaacatctttcaccaaatccatggatgcttcttctgaaggagactccagtggtgttctcaaatctgatggcagagctgggcttaagaggaatcgtcccatttaaatggttttttttt

SEQ ID NO: 219761 - DNA, 1999 bp, Cannabis indica
tatatatattataataaaaattgaaaaaaagtttttaattatatataaaagtgtatgaaaaaatgataataagtttttttgcacatattttgtaattaattaaaataatgtatacaaaattgtaaaatgcccatatatatataaatcttggcgggttacaaaatatctacaaaattcgcaaagatcgattatatatataataatctcttctaaaaaaactttaaatattataaaatatatctgcatataattattacatatgtaaataaagcaaagcatgaatagtaataagttgctatgaaatgatagtaagaaaaagtatgatgttgcatgaaatgatgatcatgttatatatgaggcatgcaacaccagatatatatatattcatatatatatatatgtagatatatgtatatatatttaattatatatataaatgctatgatcaaaccgcttggttcaacagtgtcttttcccttaagccatttcttattgttgcccatagctatagctcttctttgtatcgagttttttgtattagtcctaatatatataacttatatatataaaaaatcagttaccatgtcaatatacatatatatatatatatatttacatgaagttcgagctagccttcatcatcatcagaacagtggttgtttattatatatatttccaactatacaaaataagttgaccacatattaaatttagctatatgggaatcatttattaaaatagtttagagaaaacaatgattagctgtaatataattttttttattaagttgaagtatctcactaattaattatttaagctgtttaaaacagcagtggagagagagttaaaactagggtttcctgttatcagtaaagtactatgtatataatacgaatatacgtttcatatatatatttatgtgaatacgtactacgttgtgttcacatatagctatatataaacacaaatattgctgcaaaatatttattattttttcattttaaatttgtttaaaaaataaatattattattgtcaagtttttctaatatgtcgctcttaattacaggctaatttattcgtgatcacatatatactgtattcaaacctttcgtttttttttttttttgcataatgtcatgcttgcatattaatctatattcatgaatacatagttgtggtgttatgctcaaactcaaatttgaccgtgtcatgtcgtgcttgtactgattttgtatcgtgttaaaaaattcagctcgtatttagaattttacattgaattaaatatccatttttaaaatttagcttaaaaaattaaataaatatacaagtgatgaattccaaactataactaacaacaacaacacctagcaaaaatttggacagatacatttttcacaaataataatgcgtataatattcatgaaaataacttcttattgatccccaaaacaacaaaatatataacaattttactcgctataatttttacataaatattggcaaaaaatatcccaaaacatattggttgataaagagtggagtacaaaaatatactctcttatatataatgccctatcacaaaattcaggaaggaaaagccacttaaaaattaatagaaattataatggggtatttcatgttaagaactatgttacacaaaagttatatataatatagaaaatttgtgaacaaattttatgttccgtatcttcagaaaaaaaaagggttacgtcatatcatgtaaaataagcactcgagcatccgattccaacatcgatatatacgatgaagagattattggttaagcaatgcatttcataaattgttgcccttattaaaatattgaataaatattatagacatatatagattttcgtgagagactaagaagcaatttgaaacaaaataatcttaatctttgaataaacatttattatataagaagtatttataattattatccccatattttgtagtagtcgatatgagtcggcactt

SEQ ID NO: 219762 - DNA, 2069 bp, Cannabis indica
ttaggaatcagcacgaggtgagtatgtaccacttttggtactaacaatgaaattacaaaagtggggcgtacaagactcccagctacaccaccattccacactcaaagagattcttcctgtaaaactgggcatcataaaacttgagttccacctcattggacaaaatatcatagtagaaatagattttgcctcttttcaagggatgcttacgttcaaaaagattaaagcaatcaatgcttaattgctcaggttattcacgcggtttttacattacacgtttgaaatcgaacacatcaaaggaaagacaaatgtggtttcagacttcctttcccgaccatgcaaaactactatagatatggtcaatcctcgaactgaaaatccaatccctttcaaggagaatatgtaattaagttattgttatttattgtacgtttgagttagtagaaagcctatatatatagtctctcatgtttagttgtaaagggacacaagtttagatatataattagaaaatattaatgttagttcattataccaatgagaagatgtatcaagtaaaatctttatagtaaatgtcaatctcaatagtatatcttacaaaagttaagagaaaaagtcaacgttaaaaaaagtagagtaatttgcggcataaatacctaaattttatgccgagtagcagataaatacctaagtcgtatttttggcggtaaaaataccttccgtcactagtgtggaacttccgtaggtacctggccgttatgtgccaggttagtgtccacgtgtcattctttgattagtccacgtcatttaatttatatattttatttaaaaaattaatttaaacatttaaaaagtattttaatattaaaaaaatcattaaaaaatgtaaaaattatattacaattaaacataatttattaaaaaaaactaaattacatacttaaaataaaattaaacacatttaatatacattcaaattcatccattgctcctgaacccagaaaatttctaaccccaattcaaattcatccattgttcttccccaaattttttttactcagatctacctgtagcaacatcaaatgcggtcgaaaacctcatcactcaccaacatctatctagcaaaatcaaattgacaacaaaaatcggaccaccaagaaaacccagaaaaacttgagtaataataaaaaaaacccagaaaaaatacttttgacaatgaacaattatacattactgtaagtacaaacctaactcggaaatttgttaaatcactcctcatgccattagtctatgaatatcattatcctacgataactaatctcatgcatcttattggggatgtatcattaatgtgctcactctgtggtaaacctaaaacagagattagtcgcagaaaaccaacataaaaattgcaaggttcaaagagtaatttcagaacaatctttatacactatagtgaggttgatacccatatttagattcaagaaaatatcaaccttagacaagaaattaaaaccaaaaatgcaaaaaagaaagaaacttagtgcctgttcaacagttaatcttctggaagaatccttacagatcatctttctcaacagatccttagccgatggagaacccgaccagaaaatcctcgtcggaaacctcaagtttcccctcaaaacagactggaaaatctcgttgtactctctgcccaaaagaacctccggcgccacataatacggcgtacccaccacccattcgaccaagccatcctcgttaagccactcagcagagccgaaatcagcgagcttgaggttccctatggagtcgagcagaacgttctccggcttaagttctctgtgaaaaatggggaaaataaattagggtttttgatagagaaatgggatagagatgtagacaagattactggtttttcagcaagaagaaaaggcaaggaagaagaagaggacgatgaaggggacgaagaagaaaagggcaagattactggtgtttgtgaattagttttaggttttgagttttaattaatgatttattttattttaatttaattaaaatataaatat

SEQ ID NO: 219763 - DNA, 2982 bp, Cannabis indica
gataaaatactaaacgggttcccgtcagggcggggagtgtgatccccgtcccctccctttttaacattcggagacaaaaagtaatctccgtccctgccccgttccccatttagacggaaaatccccgactcattaggggcaggtccccgcgggccccatccccgtgggggaaatgtgcatccctaactggcagtggtaccatcccattaggaagaaggggagacaactcatgggcccatggttgcacttgtggctaatcaccacaaatcatggggcaattaaagtatgattgtggaaaagcaattttagtgattgttgaccatgaaaataggagggaaagggggggttttaaatgtgggacaagatattgaggatgtagtgttagaggtcaatgggcaaagtcaaagattagtttctaaaacgatccaagttgtggattccaaaggaagtgtggggacgggttggaggagggtgaggttgaatgggtggaagagggcaatgtgggccaggcttttataaatgagattcttatggaagaagtggatgatgtgtatggactttcaaaacatgagttattggcgggctctggtgtttaggcctgccaaactttatgagtcttataagttgaaattattgtgggcctatgagcaaatgggctaattaattcttaatggacctagtgtctaataagaaacccaatttattatttttgtgcaagataatttgtagtaaggaggttgtggagaggctaagagttaagtagggctttgaaggttattttagtgttgcggcccaaaggcgtagcagggggctagctcttttttgaaaagacaaaagtgatatttgtacaggggtatttacataattatattaatgtggaggttaaaatactgaaaatgattcactggagattaacggggaattgtggggaaccttgttgtgatatgaaatataagacgtgtgcacttttccaattattcaaaggtcaaagttccttgatttggtgttaattgatcagtggtatgaacaatttgggaagcccgttagagaagcggggtggtcgtttatattcagagactttgatcaaggatttttaaaatactattagattgcgaccttattaatcttaagcttcaaggttacccattcacatgggagaggagacgagattcaaataactggattgaggagaggctagataaggcttttgttacagttgagtgtgttcaaatcttctgtgaggtaaaagttattaagttataattttatattcttctgaccactgtcctttattgttagatttgggtgttcttaaatctttcattggtatagcacctttgcggtttgaaaaaatctagcttataaagtctatgtgtgcccacattgtggaaagttattggggtcaatcgggtgggttggatgttcaagctaaaattcttttatgtggtaaggtgttgtttgaatagggcaagaatattactagggggttcaaagcttgaataaatagcgataaaaactagttgaatcgataaaagtaaggtagagatccttaatcgctccagcactttaaggaagcgaaggaaattcgcttgaagtattttctcaaaaggaagccttttagaaacagagatcaaagaaattttagctaaattcttgtgatagaaatagtaaatattttcatacaaaagccagttctagaaggataaataatactattcattagttgcaagatggaaatggggtttgggtgggttgggaaaatagttttatgaatgtgatgttgagttatttttctaatttattttgggcttgagtttgagttgggtaatatttttgagggtataaagccatctattttggatgtgcaaaattgtgctttattagaaccggttaaagaggaaaagtacgacagactttgcttcaaatgccctctgacaagtcactgagaccggatggattgaatcctagtaattatcaaaaatttcagcacatggttaaaggggacgtggttcactttattcagcgtattttcaatatcgattatcttcctaaccacataaatgatactaatattatcttgattctaaagaagaagagtccttctcaaatggatgaacttagacctatctcgctttgtaatgtattatacaggatggtcctaaggtgctaccaaattggatgaatattgtgctacgtcaggtgatttttaaaagtcaaggtgcttttatcacagaacatctcaatttgaataatattatggtggcttttgaaattatgcattacttgaagcgtaagaaaaaaggggaggaaggttatatggtggttaagctagatatgagtaaggcttacaataaggtggagtggccttttttggagtccatgctcttgaggatggggtttgtagataagtgggttgggttggttttgaagtgtgtcaacttggtaaggtataatgtggttcatgagggttgaagtttgggtcctattattcttacaaggggtattaggtaaggtaatcctatttcaccttatctttttatagtttgtgctgaaggtttctctgtaatgataaagaattttgagagaaaccatttgatcactagttgtcaagttgctcgtggtgctccgtttatttcttacatgattttcgctaatgataactatgtgtaatgtagatcgagttcttagcttgcttcatcgattcgagtgtgattcttgacagcatgtgaatcttcaaaaatccaagtttttttctcaacttgaatacttctggtgtgattcactcccaaatctgctctcagatgaatattcgcaaggcgaatgatgatagtttttatttaggactgatgactattattagtagggatgagaatgcagtgctaggcttcttaaaggagagaatgagaaaatgtatccgagggtgggaagttaagtttttatctagagttggtaaggaagttttacttaaattagtggttcaag

SEQ ID NO: 219764 - DNA, 4454 bp, Cannabis indica
tcttattttataaacttcttcattctttcatattgtaaacactagtctaagttgtcatctttggatgagtaaactagattttgcatttacaaatatttatctatcaagatctaacactattatgttgtccaacggatgacaatcctttgagatttgtcccattaaaacaacaaattaagttagaccaacaatgaagactcgaaatttataactacaataattaataacagaaaataacatgaaggttcaatatcaattcatacacaattcaaaaaatatcatacatttaacacgtaacaaagacatgtgaaaatacaaaacaaacatatctcaaataatttccaagatttccaaccagctgatacagtgtcctggtaggcgagagccaaagatatcatcagttgaatagagtagtcagctcatctaaaatagacaccattttagcaaccttttattcaatcaaaataaaaattcaacgttgtcccggtaggcgagagtcaaggttattcttgctgaatctttgtgactcatgggtgctttgtggtgcaagtaagggcaaggattatctaggacagccatgagatgacagtcttctccggcaaatgtacatatcgacatatctgacttatgtggtcaagttgtcaggagttgttttgggttgtacctgatgtgtattttgacttacttttttatatagccctttttgcaaaacttttataataggagattcccaaaacaaatttttagcgatgtcatcttgtttattgccatgaatttattttagtgaaatttctactattatcacagatttgattaaatagttaatttactattagcaaactatgtttcaaaaataaacacatggcgtccctagggtctatggcattataaaaactctaagtattgtcctgttccttctctatgaattatttattctaatctcttataattagtcttccaaaaatattggtaaataattacatttagtggagcccatgtgtgatcttaaagctatggaaaaaagacagaattgtgcatgcgattttatgctcaacaacattcaacttccactcatgtggcactatggcacattcatggaaataactattgacactaatggtgacgtggcacagtccatcatgaaaatccgtagaattcaagtgatgacaaagtgttccaatgattgctaacgattggggttctcggccaagagaatgcccacatggtgacgtgtcatttattaatctagaaaaaaaataattaaacgatacaaacattcaaatctacatatttgaagaattcgcacaagcccatacaagtaaagtaacaaaaaacacttatttttctctcttgagaatttcaacaaaacttggtgatctaattttttaacatccacatttacacttaaattttgtaaatcttgctcaaacaacattaattttaaatcattcaaatttaaccacaacatcaaaatcaactcaaaataattccaaattctactcaaattacattcaaacatcacgtacctcaaacacattcaagaaaagccatgttataccgaatttcctaaatcaattccatttaactcatgcaattaacaaccaattacaaactaccaagaaaacaagaaagtagaaatttacctcaagatttgctcgaacatcgaaaggtcttgaagaattcctcttctccccaccaagaataggccacaactaggagaaagattttccttgggttaggtttctttcaaaggcaatcgatggatgaggaaaagaatgaagaaaaaaaaagataccttgaattggtatgtggatgttgtaccgagatgagggaaggagaaggagagagttgaaagtttttaagttttttgaaagtgttttgagaatgagatattggatgtgaagtgaatgaaggaattatttaaagattgaaaaggccttttggtcgtggcctacaattggccaaggatttccaaaaatacctttggcacaattgccacatagtcttcactaaaagcccaaagtcacctctctccatttttgccacttgtcacaagatttatttatgtgaaagattaaaatttgtcattcatagacaaattaaaattcttatcatagagttaaatttaaatttcataaattccaaaagaagtcattagaagacaaaattgactcatgccgaaaaaagtctcattcgggtactctaagagacgacgaaataagcgaaaggcgacaccttattacattcgagatgagaggggtacaatatcaagtctttcccgaaggtttttgacaaacacttttaggggcaaatgttatacctgattttcaagaaattaaaaaagtcagccctacaactttgaccaagacttacaaaggcaaaataagttaagatatcctacttgaggatcctaaagcacctctagaagactcatgaaaacattaaccaaccatttggtgttgaaccccacacccaagtgtgcccaacctagggtttatgggcccgcgctagcgttttcaccttagagacctcaatccgacaaggaaaccatcaaggacttatttaggcctaaaatagccaacacttgaaattaaagtcaagaatgcacaagaaagccatcccatgatgcatggccgacctgtgccaaaagatggcacatgaagatggcacttgtctgtactctctaaacaccaaaggagacttgtcaaaatgtgttccctcaacaccaaggagtacaacacaagtgaaagaaaccatttttcaacaaggaatcaccctagacgacttgtgccatctttgagcacaaataaaaggcacaggtcgaccacaccaaatgggaaggagatttcttggccaaagtacttttcatcatcaacatatcaaaaccaagtgaggaaggccaccaagtggtatagaaaccacttggccaaccactgtcatctttgtggcccaaagagtggcagtggtcagccaccacaaatggtggggaatttctttggccaaagcatatttccaacattaaggtatcaaataaaagtgaggaaattcagaaaagagtgtgtaaccctcataggcgaccacaaccaactttgtgccccaaatgatggcagtgctctattctaccaattggcaaagaactaatgtggtcaaagtattttttataacatttatatgactaaaataagtaagaaacaccatcaatggcttcccatatgcctcagccgaccactgccatcttttagtaccaaaagatggcgcaggtctcctgttagggttttggatgtcaaaatgtggttttgggctcacgagacgtccaaaatatgattcaccatcaaaaaaatgtcaatacgtaccctgaagtgttcgggaacatgcacggctgacctgcgctaatggggtgttacgaatcatgatgacatgtcacaggtcagttttggagctgaaaagtacatacttcccttcggtaaaacatgcataactctctcactgtttatccaaatgacttggttcaaatttcattggaaatatcttttcatgacagatctaattatgtctcatggtcatagctcaattctaaagttatcaggctcaaaattagctcacaagataggctgacacattttactcggaaattaattggttatattaagtatgaactataatgagatgttgggagagctatgccacagcccatgtggcaccatgaccgagaagtaccaccccaaaatacttttctccaacacttctattccattgagagaatttctaggtgagaggtgacatcctctatcactcctctccaattttgcatttccaaagcacaatgccacacaagcaagtttaagacaagggaaataaccaacttcaacaacaatcctaatgtttgtgggatattttacaatgaataagggatcttttcgtagatatttgtttattcctattttttattcattgtttagaataacatttgaaatttgaaagtgagacacccggacatgtgggggatcactaacaaatcccaggcctatataaagatagtgataggctagggtttaagggatgagacgacttgagattgaaatccttgatctcattctaagagcttcctagactttgataccattggaggatgtattttccttctgcatcttcttctttgtgttcttcacgacaccaagcttccattattatacctttgacaaataccattatctcaaacacatttaccaaggaagatagaccattctctatttcttgttctcattggattattgttcccaagaacactacaacccccatccttattagatttatgaatgttggatctcccatgagtctcgtgttcataagtctcaatataaatttcacatggagatctcttttgtgcaattatctacacattcttgagaacataattctagtgtgtcgaatccaattaataaaaataaagtaga

SEQ ID NO: 219765 - DNA, 2819 bp, Cannabis indica
aataaaaaaaaaaataagtaaaagaaaagagaatgaagggtattttgggtagaagaataaatatttgtcgtattaatggatgttagaaaaaggaatggcggggcatgtgtgtgggacccactttaacagtatctaatgacgtggcgccacattcatcgacattcagattcatccataccaaacaccacacaataaaataattaattaaatttattattttaaattaaataattttacagccatggcatgctcgacacgtggcgcaaccacagcgattgcggacccggcttccgatgacactcccacacatctctgacacgcgttcgtatcggcgcgtggaagcgtgctcaagctccttgcacacacacatgattggcgtgattgaaacgacttctggtggggtcgttttggtggcatttgctttctattttaagctaacaccaattttccgttcaaaataattaaaatatttatgatgtgatttattaattttttttttaggtagtattaattacaattttttataataattttttagttaatttttacatttgaaattatatgttttttctatttttagttaatttttttttaaatttttgtataatagtatttattataattatagtatcatctctattaatttttaaaaaattatgaataatttatagtactgaaaatagagtttttaatattttaatttttacgtatatttaaaaaacttcaaacatatttttaacactgtaaactattcaaaatctttctaaaaattacagagttgatgttgtaaatacaaaaaataccattatgattgtttttttcaaaaataaatatttcaacatgtgttttcgttacaaagattaataataacactcctcttattttttatcccaaattcactaattttttattaaaaataaaaaaaatcactaaataaaagaaaataaaaaaagttgtgggggtttttttggttaaaataattaatgtgaagtaattatgaataagtaaaaagaaaatgagagaaatgggagccacaagatctcttagtcttattgcattaaattattttttgtgcggcaatggttgaaacacaacataatacctatgcctatatttatcttatgaccattctctcaatgtttgtgtattgccaataattaacatttttttataataattaattattataaattaaaatatttatgattcaataattaattcttatattaatagtggtaccttatcctatagtattattagatatcgcttaaatacttttttagaattttataaaaataaaaaaaaaatttttatagtgagatactatttgtgttcctattatgagcatctttattttttgttaatccaattattttatatgatagagtactctataatttacattactaaaaataatctaaatattcagttataatcatgttctcttgtgcaattaattattttaaactcaatttttttagtattatgattattttcaattttttaaaaatttgtaaaatatataattaaataaaaaagtttagaatatacttttctaaatattaaaatagagactcttctactaattatgtattgttatattttaaaaaaaaaaaaaaaattagaaaaagagtacatgtacgtatatagttaatgttttcactggctaaattaatgactatgggatataaagatgtttattactgagataatatcttataattggttttttataatttgtattaaaataaaataagtgagatttgatattcaattgtactaatagttatattacaccttacaatagagctagacattatgggtgctctttaattagcatagaacgagcattgatattgggtaccactgatgcccaacaccttttatagataatgttttacgattggttagtaaaagttattttcttaagttatatgaaacttgatacttaattataccaataacggtatgacacctaggatgatattagacaccaatagtaccttttagcatttttcttaatagtatagttagttttgattgcaattattaccctaaccaaacctcttacatactgccactaaaaaataaaacaggaacgattgggttgaattgcggactaggtcactctctttaagacattcgcaatactacccacgaacactatttcattgtagcaaatcgtcgaatacaccctcaaaatagaaatcgcagatggaagttttggtagtaaaaattgagttttctttttctcggtatgaaaaagtgtgtttctccccgtaaatttaatcgcatgatatagaccagtggaaccttttagcatttttcttagtagtatagttagttttgattacaattaccgaatcaaaaataaaacaggaacgatattaccgaatgaaatttttgggttaagtctgaactaggttgctctctttaaaacgttcgtagcactgcccaggaacaccattgcactatagcgaactgttgaatacacccttaaaatagatattgtagatggaaaactaagttttttttttactcgatatgaaaagatgtgtttctcctattaattcaatcgcattatatagactaataaaatgaaaaattataataggaagaagaaccaaccaaccagctcggctcggctcggacagcatgtatgtatggtgggtcaagtatgtgtgtcctcacattttcacacaaaacttgatatcccttgggactctatcccaagtcccaaaattataccttgtatacttttataagcaatgactcatatctcacgtgagactcgttttattacacacttagaatacttt

SEQ ID NO: 219766 - DNA, 1823 bp, Cannabis indica
attgaatcatttcacataaatggagaagtgacacaaaattaacctcactagtcgcgagcctactcgaccagttgcaccggcaacaaatgcaaggttctcatcttttgagtcctttggagttgcattagatgtctctgagcttaattttgttgtccctactaaaaatattggatttcagatacattatacgatggtaaagtataataaaacaatggagaccaaattttcatgataacccaaatataaagaacaagacttttagtattgcaggaattatactcacaagaactttacaaattaacaagcaattgggatcaaatgtcacatttatttaaatacatatttccatttcactaatactgtatataattcagtaaaaagaattgtatccaatccaatccataaatagtattactaaaactttactaacatttctacatgattccatgaagaaaaactcaaccaaatccaccatttaaaacaaaaataaaaaatgcccatttgaataaaaatgtgaagggaaataaaagttaataaattgtatataccagaagcttgagcagtgataggaagaaatttgaaacttttgagatttgggtctctcttggaattgggaaacttaagtaggtgattgtgtaagaaaggtttgtctgagagggcattaattctgggaatggaggaagaagatggtacaaggttcaaagctgatgagtgaagagagcaacaaccctccattggcttagctgatcaaactcaaagcctcaaatttgaaacaggaaagagacaagggagagaagagaaaagagtgacttaaagttgaagttgggagttgggagtagtttttggctcaccaatctggatatgatgggtcccatgggaattccctagtttcattttgcacctgtggtcattttaatttattatttattttttaaaagataataatgtttttcttcttccaagtgcttgaagggacataaaaggtgattagaagtgaataatagaaagctgaggtttttaagatcttttccatgtgtttgtgtatgttttttactcttattattgaaatctgtgtaagtaattcagggaccagtttcaatcaccaatttggcatcccaagtcccaacccaactaatattctcatgtaccttgacaccaaaatatcctttcttatttatttccacaacgagcagccggttattaattttgaaataatttttaaataataatatttggtgtattaatataaaattatcatttgtataagagtgtacacataaataggtaacagttaatccagtgatatcttaaatttactaacattatagaaatttgaaggattttaccattaaaatttaaacttaaagaattaagtgcaagtgaaacgatagttaaaaaagtttagtcgccaaaattacttatttttatacatatatataatataatttacttatttcaaataaaaaaacatctgtttcgaaaaagtaattatgaaaaaattcaagaataattttccatttaaactaatacaagaaaaaaaaaatgatctcgactttttttaaaaaggaaattaatatatttgaatttattttctggaaatgatataaaaataaatttattgagagtttttggcggctaaatcttcccaactgtcatttcacttgcatttaatcttcaactcaaattttagtggtaaaactctttaaactactgtacatgttgcaaatgtaaggtgtcatcgagttatttaccatcatggactgcttttgtgtatactgttgtacacgtgacacgtttatattgatacacctaatattattatt

SEQ ID NO: 219767 - DNA, 4298 bp, Cannabis indica
gaaaaaattcaacagaatagcaatcatagaaacatctcaactagttcccaaattaattataattattataaaaatgatgcatactggaacttatacctaatcaaatactacccatcctttaaacgaacttttagtacccagtagcttgtccagctgttacagtgacaagaaaagtctctaaaagtctataaaggcctttaacataattgattattcttcccttcctaaaagtaacaacaactaagaatcaaacaaatacttctcaaagctagctcaattacaaggttaacacgacaatactgaatttttagctcatgccagtgcatcatactcaaagggtccatacaagctcaaacatcaacgactttccaacaaactttgatcatgtattctttgattaatagtgctgtaacccccctatatcatgttggctcattactaaggatgccattttttgtttttaattttttttcgtagaagttcaaacaagagacctccaagtggccccaagttttttgagtctaggggaattcaaacctaggaacaatgcctgtcagcactttcaaacattctcttaaacactagaacaacccttgcgattattattaaggatgtcattagttttcaattatgataaaacatagaagatagagatacaaatgccataattttacaagtcccaattaaaaccacataatccaaatcatccagaaatttttataataataataataaataactaaaaatcaaaagtgagaaccactgcactgtcaacaataaagaagaatgggtaaaacaaaagacacagcagtttagatgtaataagcattattcacaataataaatgacaatggaatcaaacaaatctaaaatcacacaaccaaagaaaatccaaagtacaaacaaaatcttacaaaccagatttctattttagtttaacttcaatcctacatatccaaaagcagcagcaatccatataatataggatcgtgaaactacctttacttcctcttaattcagagatcataatagaatacgcccactttacctacaagtcaaaagatacatttatttggaaggatgaacattgttaccattaataatcttaaacatagactcctttaaactagtcaacatctacaactaatgaaacacttctagcagcactacatttgtaagcaaagttgacgctagatctaaagtcatgttttagagctaattagtcatgttccaacttgaaattacaaatggaaaacacaaacaataacaaatgacattaaaagaatgcatctataacataagataatgtacacagtattaaatcaggaaaccattatgacattaagctaaaataatgtttatagctgattagtgttacaactcaaaacaacaaatgaaaaacacatactagtgacaaaaaaaatacaaaagcaataaattatccaggcccaagcgtaatagatcatagacaggtcagcagtatagcagtacactaaatacatcaacaagaacccaatgacatagggaaaacaataacaataagcatatcacaacttctttaaactgcctaatcaatattttagaatttagagataacaaaccccattgctcaaacttcacataccataggctaaatagcaaaaacacatcaccatactaaccaccatggtgctgccacatgccaaccacgaccaagcagtgtgacgttaagatcacaagaaaatagaactattgagcaaaagtaaaaaaatctgggacgtttttcaagatgaacgaataataaaaaaaaccaaagactaatactataagaacttgaaaatgctggttgttgaccatttattagaaaataactgggcaacaaattagtagaagaatgagtgaataatttaaattttccattacttttagggaaaaaagacttagtacaaaagtaaataaacagattattatttaagtaggacgggcaaagatatgatcagatgttgtcatctaaactaaagtttaacaagcctaaaacataagaaacattttcaaacaccagcaacaatgtaccaactaccaagttacgtgcatagaaggaggaaaaagtacaacgactatgtaattaactattctgaacgtaatatattagacataaaattagaagctaaaaataaaattgaatcactccattatttatgtaagaatatagcaaggatatttcatagacacaacaagttctatcagaaggggcataaaggcactccaatatctatatatataattgacgttaccttacagcagtagggcacaacagagtcccttgcttgttgatcttcccaactcggatggatacaagcggtatgcagaagcacctcgccagcataccaacttcagccggctcaaaatgctgttaaccaagcaaaacatgtctcagccgtatgtaaatacaccaaaaataaaaagcataaaaaatatcacaactgacattctagaaatgttgtaattgattaactaactaaccctcctcaccaatcaccatgccgtagaatagtaaacacaggttttccaacaatcaccttaccataccataccatagaatcgtaaaacaagttttccaataactgaaacactgatatttctgtaattataatggtagtcgagctctcttttaactttcatatacatgaatatatatatatatatatatgtagatgaaagcatatacctggcttaagtgagcaagcaagcgatcttcagcagcgccgttggaggcattcattttcaacaatggttttaacctctcatcggttcgacaagcaccgataacttgcatatcaagcgccatcagccactgtaacaccctctcttctctattgttttgttgaagcaacagatcgccatctcgttcctcgacgagaatctccgtcaaacgctcctcgagcccaacctcgctcctcgacgcagatccggcaccaaaggatgccgaagaggaatcttcgtattcaacgccgtcgtattgatcatcaacaccatttctatcaccgttgttcctgtcgttttcacaaaaatctcggtttctagagtcagccatgtaatttttttttctcagaaaatgaatttaaatcaattttatatccaaaatcactataatttttcaatcttttcttcctttgtctctttaattacagaaagaagtaaaatatttcttagtcttctgggaaaccctaaaatcgatcaaagtgttttgggaagaaagtctagtcgagtcgaatccgtggttgatgtgagaaaaagataaagagagaggccctctcgtttgtttcttgggagagagaaaaaaatatctaccacgcaaaactggtaagaagaacactagagcgaggaaggtttttcttataaaacagctggaggaggggtggggccagaggggcacacgtcggactccacgggcgtttatcaagtctgattttgagtccgttttcagatccgggacacttgtgattgtgattgggatggcgtgacgtcagccttcttctacttcattagtgtgggacccactgccttcgaaccatgacaatgtgccacgtcagacgatttgccgacttttacctttttatatgagctataacctataagttgagttttaatcccaaagaataaattgatatctgcctctctagtctcggctatgaatatatttctttttttttttttgaataaaacttgtgctacaaagggaagaagaaacaatacagaataaaagcacaagctacaaagaaggtaaaaaaccattccagatcaactcattatctaatcctagacccatccttactactttatgcgctaacagattaaaatcccgactaacatgacaaacggttaagtccggactaaacgataataagttcttaatgctacaaattacatcatccaaaacattgttattccaattgcaagattgaagtttatctactattgatttacaatcagtcattaacacatccaccggtaaacgaagcaattgagcccattgaatagcctgatgaacagccttggcctcagcaacagcggaggaacaagcccaaaaaaaggggtagagaactctgccttaacccggttgcaaccatccatgagaaccactccaatactatgtttccttctatgagaatcagtggctgcatctgtgaaatgtttaaagttacttgaaacagacagttgaactcgtgttggtgctgtagtactagctggataagttcttgccacctgaccttgctgcacatccaaatattgaaaaaaaatatgcaagactccaatca

SEQ ID NO: 219768 - DNA, 4023 bp, Cannabis indica
ctggtcgattcttgtgtgtcatttatttcccaccattgaaatattgtcatagtggtcgaggcactaataaacagctatgtagctcaataaatatataagaatcagattcaaaccctatacgtacattattatgttacaggttttattgtacatcaggaaattattattacgtccaacactattaatgacatatatatttatatattttatataatatatattatgtattttttatttatttttataattattatgaaaatttcatgacacgaaaacaatttgcggacgtgaatggtttcgtatcttttattagatcgatatatgctgctgaatatgaaacaataaatcaattattgtaattagaatattatttttagaaagagtataaatatttaaatttataatacttaatttatactcttaaaacttctaagtacctgcatctgaagttaatggttatatgcatggtagtttttaattggttcaaattaataaatttttattttttatttaaatatattaataaaaaaatagcatattaactggacacctaataattcggtatctacgaaaatttcaacaatataacttcagtactaactgaaaattaaacttaactatttacgccagaacttatactttttgaaattcattattattattaatcgcccttttaaaatgaagatagcactcgttaattttatttttattgtaaaaagaaaatctttttttttttgactaaagattttttaaaaaaaaaacaatttttgacaaaagatttgtttttgataattaaataagataaaagtgccaagtttttaaacggtggtaggacgatttagactataaaaaaaattataatcatagttatacattaatgcattaatatatttaattaaagagtatagcaaaggaaaagtgaaaaataaaaaatatatcttttgctataatttattaggaaagcaacaataatatctcctttaagcaaatggtgtttcttaattataatgattgccttaattttagtggatttttgaattttttaatctatttggtctgcacttttttcttcttcttttagtaaaataatttatatacatggatgaaatgaggttgcaaacaagtagtcctagtaaacaattattcttttttttttaatatatatatgtatatggttatttaaaaatcaatgggtgtatcattttgttcaaaaaagttattgtcccattataattagaatgaagcaaatctactggttttcaactattaagaactactccatttattaatatttcttgctcatgactcatgacactactaatggagcatattgttgtgtttgtgtttgtgtttgtgtttttgagttatatatcttttgaaattctgacaacgttagacatacaaacaaacttgaatacttgtacttacgcctatatatataaaatttcattatatatatattgtatccattacttgaaaaaaaaaaaacaagacatttattgttcaacgcttccttttggtttctttttttttttttattagtaacttcttttaaatgctctttgatattctcaaatattaataatttaagaaaaatttgacggtgcactcttttaaaagaaaaatgcattgatgcatctatgtttcaacatttgagatatttttttaattcaatttgttttttttataattatttataatattaggtaaaattttaaaaaatcaaaaaaaaaaatattaacacactaaaaatagaattcaaataattataaatttttaattttatacacaagtgaaataaattgtttaaaattattttgaatttaatttttaaaattttaaaagatattttaaatgataattaataatatacatgatcatgaaaaaaaaattaaataaaatttttcatgaatgccgatacagtaggagaattgtacttcggtgcactaaaattagtgggtcgataaaacactctaactgtttcgacttctatatgaattttttagtccaaattttttatataattgtgtacgttataattagttaagacattctactaaattttgaaaaattcaaaataatttactatatagaaatcaatgttcaaattcaaaccatctattttacgcgtataaaataaaaaaaaaaaatcgtttgcaataatactaaaagagataatgatttatcagtgcaatcatttgaaattgtaaataaaactctcctaatttaatatataggattaaatataagcagataaataaataaataaaaaatcatggttattactgtttgcattatttagttttaaatggacccgaaagagtaaacaacccaatggcctggccttgcctgcttacactaaaaacataaccccgtccccacgtgtttttattctctttaaaacatcacttatttctaaaaacgacatctgataggtgagacgacattattttataagtaaatattgaacgacaaaagttttagaaaacgacatgacttgaataatttgatgacatcagaaacgacaaagaattttttgttcaaacgacaaagacaacatcatcttgataaaacggcaatggtcataagtgatactctcagtaaacgacgaaaatataataaacgacattaccattgcaaaaggacaataataataatatcaaacatgatattatactaacaaaaaaaaaaaaaaaaaaaaaacaatgatattcaataaacgacaaacgtgtcaagaggttattaaaaaaaagaacattagaaaaacaaacttgtttatacttttattttatttgttattactacaaattcaattaaaaataaataaaataaaagagataataatacattaagaacgattgccaaatctttattagacaaaatatcgtttgaattatgctcttttaaaaacaacagtacaataacaacactgtaccaagaaaaaaaagtaggaatgtctttgaaaataacaaaaataattaaacaatataacctaaatcttttttaatctttattttttaatatttcattaaagaaatttcatcaatttttttttagaataacttaagaacagtttttttatcacacattaattaaatataactgcaaaataattttcattaataaatactttcttttaaattaaaatacttcacaaagttagagttattaatgcgacttacaaaaaattgtgtataaattaaaaaattaaaaaaattaaaataagaaataaaaaaagtggataaatatacagtataatttccctaattcaatgtttcttttgctgggttttttgtcctaatgctccttaattttaaaatctaatatggggataacttgaagaatacctgttttttgtgttagtcaatcaaaactactagcaaactatattcatttaaattatacccacttttataaggagattgtctaatatacccctacattaacattgaagattgaaaattaagtcttttgttttgggttgaagaaagggtattataggaacattaactataaaaattggtagaaaaaatgaaatattaaaaagagggtaaaaattaaaatggttaacttaaagtgggtaccccacgcaatttcctcccaatatactattcatgattgtcaatccaatataaaatcactatgggctttttattttaaatggaccgaaagagtgaaattatacacaaacgacaacatttaagtaaatctacgttgtttttacaaaccaatacaaaacgacaataatcagattaaaaaaatacaaaacgacaataatttatattccaacaataatcgggtacctacaactacaaagaattaagaaagtgtctttgccaataaataaataaataaaaagtggtacaaacaaatattttttatattttggtggctaattactctaaattaaactgtgtaaccctagatgggaattacactctatactatttttatattatctttttctatttttgccttttttctaaagtttatcatttttatctctttttttaaatattgtac

SEQ ID NO: 219769 - DNA, 6231 bp, Cannabis indica
actttcatccatgttagtactttttaactaaattagataaaatccttaaatctaacaatctcaatagttcaaggggcatttataacgatcttaaaagttcaagaaacatgatttggtacatgtcaaagaggcaaaaatcctaattagccaaattacaattgaaaagaacaataccaagtcaaataatgctttaaaatcgtgagtgttgtctttaaaattgatttaacattattcattttgttgagtctttccaattttattggtaatctatgatgataaaggtgagtctaatttcttcctaccctttcaggtgggacaaatccaggtagcaatgccaagattgtctcagcatcatcatcatcacaggacccagcattaggagatgctgcacctgccaaagttgatataactattttcgacacagttaagtcctttagcttcattgatcttaagaatgccacgaagaacttccgatcagacagtctacttggggagggaggatttgggtgggtcttcaaaggttggattgatccaaacacattcgctccagctaaaccaggtactgggacggtggtggctgtcaagagactcaagcgagagagctttcaaggacacaaagaatggcttgtacgtgtagattaggtcccaacttttctttagtttttttcttgattgcttgaatctcaagtacttgactctttgttcaacttgcaggcagaagtgaattatttaggccagcttcgccacaaaaatctggtgaaactcataggctattgctcagagtctgacaatagacttcttgtctatgagtttctgccaaaaggaagtttggaaaaccatttatttaggagtgagtattagtatatttcccttcttctcttttttctttttttgaccatatgaaaagctaacaacagtaaataaattgcaacaatagggacagccaacagtatatacctaacaaaaccattttttttctttctcctttgacataaattgcaatagttaaagtcattagatgttgaattacagatcaattgacatgaagagattccttgaaaaaactctacaataatttctttgttcaagtatctcctttcagtacttgatatgtatttctaaccatctttgaattaaacccaacacactcttcgttacctcaaataatttgcgttcgaaatgcgacaaccatatagtttacctcaaataacttccattgggtagaacttagtcgaatttgatcaaacatgtttaagtgtaaactattattattgttgcattttcatcctctgctgataaaataataacacaaggctttctaggttgatttgataaacatatatgagagaagattgaggttttctataacaaaagcatggaattgtcccgaaagaagaattaagattattatgcatagcttaaacaagttttgcattatgtaaccatatttttttttcttcttgcagaaggggtacagccaatttcttgggctacacgcatgagcattgctattgacgttgcacgggggttgtctttcttgcatagtttagatgctaatgtcatctatcgtgatttaaaggcttccaacattctacttgattcggtatatattaatgaaactaatgctacttccttgctgttgttgcatatgaatttcaagtctgataaaactgtttacttttatgtaggatttcaatgctaagctttctgattttggcttagcaagagatggccctactggagataatactcacgtttcaaccagagtaatgggaactcgaggctatgctgccccagaatatgtagctactggtaagtgtaacctattcaaatccctgtttatttgttttgaaagaataaaaaagaggacattttaaactaggaactaggaatgaagtaaaaaaaaaaaaaaagtaaactgctttgcaactatgtagaccaatgacctctttaagaaactctagagagaattgtttcacgccagttcttcggaaactattgtattctcctatcaaaactgcttactcattatcttcaatcttcatataggctcttcatttttgtttgtgtattttatacatcatacaaacttcaacttactactgtaagcacattggttgtgctcctttttcatgctgagtctggtcttctttcctccttgcttgcccattaatggtctttactactaatatgattttctaatgttgcagggattttttttttatgctcctttcccattaatggttaatttttttatgctccttcctattatgtattaaaggcagtatttttttttaactcaaaactgcttcaataattgcagggcacttgactccaaagaatgatgtgtacagctttggtgtagtcttgttagaattgctctcaggaagacgagcaatggacgatgataaaaatggtggtgcggaagaaacattggtagagtgggcgaagccattcttgtgcgataatagacgggttttaagaatcatggacacaaggttaggtggtcaatactccaagaaagcagctcaagcagctgctgcactttccgtgcagtgcctccacacagatccaaaacataggccactgatgatcgatgttctagccaaattggaacagattcatacatctaaagatgtttcgaccaccagacagtctaggccggatcatcaaggcatcaggcattcaaatcatcatcacagaacaacagcaaactaaaatcgaaaatgttcctttgctgtatgaaaaaagcacctataatattatagagagtcaaaatcctatttggctcgcagtttgaaatccaacaacaaaaattgcagctcgctctttggatttggttgatttgttgtacaataacatcacagggattaagtagctcatgtaaatagagaattttttctcattcccttctttagggaactatagaattaaactagccatgcccattactcactaagtaatgggcatatctattctacaccattttcttagaagtgtttgattttgtattatggctttaaacctcattaaggaagagcattagaatgaaagtatacaagatagaggtgtttggttagtgatagtcaatgttttgatatgaaattttgaaatattctctgaatttttttatggtaaatatggtttgacaatattataaagaataaatacagtagctgcttgaaagtatgaataaaatatgtaaatgtattaatagaattctttcttatttgccaccccctttaaattagttttctcacactttgccccccaatctttacattctccctccctccgccagtgattaattccctttttttccctaactgattaatcccctcattacatgaaaggtgaagctcaagcaaaatcaaaacgttctctacttctatttaaataaaacctcaatattattttgtaactggtataagccttattaattatactataaagttgaacgaacaagagtcttttttttttgttaatttgggtaggtaatatctagaaaacaaagatcatcaaactaccatggctaacctaatatgtattagaatgttaagattgagcaccaacacatacacacacacaccatgcactcaattctatcgagtgtgcaccagcaaaacaggaccgaaacttatcaacatggcacttttgctgttctgtatgtatatttattatatatttttatatattcctagttaaccaaacatgtatacacaaccaaactctactaatggatgggtagaagtagaaccatatttgcagaagatactgaacaagaaatctggtgatgcaatactaaaacagcttcgatgcaaagacatggaatactggcggtccaaataattctgaattttgttaatggcgttggtgcatgttatgagtcagaacgtagctgaccttgttcttcgaagctggtattttggatcaggagaggaattatcttcgagcataatctcaacttcctaaacagggggaaatgagcaagacgatcggttaatagaaacctccacatagggatcactcattttattttacgcatctgaacagtttaacattgaatttcacctttactaattacataacaaatataactttctgtcatatatgttgagtctgtagaaagaaaaaggctttaagcacaaaatactgaaataatgtcaaacaaaataactgattataaagcttgaggatggtttgttgtattccatttgaattgatttctttgtttttcaattcaagtctctgtaaacttcaacctagatccaaaatgctagacttctttatttcatcattcggttacctaagtccgaattcttggaaatgtctacaacattgatttctatattagagtacaattctccatgatcatttaattttaatagtagtcacagtacaccttcatgcatataaaccagcacagaacacagcaaaaattctatacttcaactcccagtacatctctctcataatgctattggatgtaaagctttacttatctgcacttacctatcaaatatctgaggtacatactaaaatggcaaacacatccaaactaaggatttctctttttattaaaaaagacaaaaactaggacccgtcttacgatacaatatttgaggaccaggaaataatggcaattcctgtggaggaatccaagagggagtcaaacctcagaccttgttggagcaaaccacatgctaggccactagagctagccctcttgggtactatgaatgatacttaaattatctatacaaatgtcaaatcatttgcagtgttaatgtcttgggtgcttcccttgtaaagtttataacactcgaggaaagccttagcaaccaaatactagaaattaaaaaatcagacatgaaaattatcaccttctctttcttgagccacgagttctgtccttttaaacgtgaaaccttgctcaccaattcattgtggtaagcctgaatatatccacaatgaataaatcaacaaaaataataggcaaaagtatttttttgacacatagaaaagcacatctgcacttacaaatatatacctgctttcttgctcgtgatcgggcagctgactccctgtttttgatttttctcttaagcctcctttccatgctcttctcatatgcatccgatgaatccccttttctcccaggaattgttgggtctgataatgcaccaagtaatggggatggcgatgacaaaccaaacttataaggataactctgtggtgtcactgcatcaatgggatgcaatcctatgggaggtgtcactgcatcaatgggatacaatccaatggaaggtgtcactgcatcaatgggatgcatttcaattcctgtgggtggtgtcactgcatcaatagggtgcaatcctaccgcaggactaggagaagcttcagcaaaaagccctgcttgtaccagaaagtcttctagagttgtttcaccaagtgtaggctgtctatcttggtcaatcatgtgctcatagtacctccgcttctgcccttgttggatctctttccacacatcatcgactgtcttgctactcagagctctagccaatgttagactagcttgtcgttgaagcgatgatgatgaagaagtattctccacatcaactgtactggattccttagcttcagtagtatatatggtttgaagaaggtcatggagattcatacttccaagtggtttgcccatgtctcccagctggttattaacttcatctagagtcaggttgtaccatgaattctgccttgtcaataaggatggttgaaaatgagactgctgaccactaccttgagatgccattgtctgaatccccattcactaagcattcactaccccacaacaaaccttcttatgctgctatgcaaaaatcaatgactacaacccatcagtttatttatttataactttatgaaaatcattaataagtgctttcaagagccaaaacagcacaaataaaatactatgttcatcctaattatttctaaacttgtcataaagtctagtaccctttttccttaaaaattcccaggcagggcaaagaaaaaccaaattgtctcttttccacttttctctttttaataaataggaaagacactattatagtatttgtgttaatttttctaaacctgaaaattcacacgcagtaactgacgaataaaggctaattcaaacgcttccatttcgatttgtcgtcaccaccacctccaaaaacgaaaaag

SEQ ID NO: 219770 - DNA, 2962 bp, Cannabis indica
taaatgaaaatataactttattaagaagataaatcttctaacaaaatagacataaactcagcaagaacacacttcttactgaaaatttgatctagaaaaaacaagaatagcttcaccaacactatgactttagttgaacgataaataaaaacaaagtgacttcgctcaaattaacaatcaaacaagtgtctacagtcaataacaactaatccaaaaggagagttcatcaaacaactgattagttcaataatcatgcgcgtcaaacggactctaaatgatagatatttgtagaataagttttccaaagttctaagtatgtaattgacatattttttggcatttgagtatgtattccatttctcacatgtatttatctttgctagcaatacttgcattgccttctacacttcgacaatatgaaagtgatgatgttgataaagtcgtccaaattcataatttaaaattcagacttaatatgtttcatgtttaagaggttaataaattttgtacgtactaacaaaattggacggccaaaaaaattcattgggtctatgcaattacaaactcaaatttttaagtatttatgtcgcaaatattttattctacaataattattaaagtcaaatatattagatcaattataatattatgacacatcgacacttgtgatatcaatcttttagcatttctctattaagcattataaggtgctcaaaagtaccattaatattagacactttaaaatgtcttttaataattctcattctataaataaaaaagaattaaaaaaatagcaatgcagtttgtatttttatgagaaataatgaataagtgcgcgtgctttcatgtcattcgtctctttgttatataataattgtgattttattaaactaaagcctaattaggtttaattagtgtatatatataaattataaaaaatattgcagtcattaacttgtcttttgttttagacttttttcctaagcaacacacagtcatttactaaatattgtagtcatttatacgaaaatacaaaaagtaatttaaattataacctaaatttatattgcaattatcgaaacaacttaaattataaaaaataaataataaataatatataatatataaagtgattcaccaaattattaataattgataagattttactaatatacatttatttaattttcctaagccaaaaatgattgttgaagcattgtggtccaccaattccttgtgttgaatcaaaaaatataattattggattctaattgtgtggttctcttaactcaagtcttcataaaatggggtccattttattgtttaaagtcttggtgggccatattaggatcaaattctcttctcaccttaaaccacgcattaacttagtttaatcttattttaaataaataataatagttttatttttattttgtagtatagtattagtataaattatactaattaataaaattagttgatggcttacgtaagaggttgtggatcttgaaactgttgtggctgatgtaatcatatatatacttgttaatttaaaacagctggctagttttagactaattaatctccaagattattgttgttattattataattaactttggtaattaagattactattagtttaattaatttgactattaacacaatatttgaattgaccaagagatatttttcagtgaacttgtaaaattggaatgttgtgaattaataattttccactaagtaataatatccttgaagtattattatttaggctatttatattaggagttttgtctcttaaattataatatatatgtatattgtattgttatatttatgaattttttagcttgttaaaaatagtatctgaactattgacagtattgtaaattagtcattttgtcaaatttagtcacacgtagcgaataaaataatattatggctacttagccaattaccataccagtatcatatcaacttcatgtctgtaattaatttgaaaaaaaaaattaaaattgttttaatttaattttacgtaaatttcttaattattatttagtttttggttcaatgattttttaaaaatgtctaattttatttttttaatgttaaattatgtaacaattagttaagcagttatattattatttcgtctattacatgtaacaaaacttgacaaaatgatcaattaacaataacctaaatagtttaaggatcatttgagacaaaaactctaaatagcttattatttaataatgttattttctttttatttgtatgtgataatggattctgactatatatataatgtaattgattttttatgtttataatttccctcagctgcttttgtttgtaattttccttgattttttccttttatgtggggtgtgtatgcatactcaccccactatttttattttttatttttattttctaaaagtaaataaatatttaattgtgaaccccttcaataccttttattgatttgaaataaaaatctgtgggccaatgatcattttgaaaggtctttaacatggaaagaaaatcataattgaattaaatttttattatatttttaaaaaatgatgttaattatttgggttataatttagattctagaaggactattttttaggtaaaatatattagattgccactatataaatatttggttttgagtagccctacttattgtacaatgtgtataaatttatagagtttttttttttctttagtaattggagaggttataatcttaattttttcgtagggtaggtacataataataagaaaatttcaactaatttttgattttttttttaaataatttattacaaccaaaattagtttcaattggttttaagtagcctacattataattttttactttcaatgaatttgtttattgtaaaaataaataaattatttcacatgcttataataaaataaaaaaaaa

SEQ ID NO: 219771 - DNA, 1894 bp, Cannabis indica
attattatttgaaactcttgttttagtgtgtacaagatatattgttttgaaagaaagtctatgcccctattaatgggctcagcaagcaggaaaatcagaaaaaaaatgtattcatatatccactatcttttcaataattttgggcagtgatatatgcggttaatgctatagtttatgctaataaaactagttttacacagggttgtactgcaacagtgcttctggtatgggctgatggtgctagaaaatttctttgcccaatgtgacaaatgtgggggactcagcatgtgttattaagtacgtatcaatgtttctcttctttcgtcttccttaactaaatctccctgtaaaattattattgtttaattatgtattagatgtgatccttaacttgcaagatgaatagatagtttttctttcaaataagcccttttaccaattgtaattatatgtattgtaatttgtaatttatattgatatgtttaattgtagtgatgcggatgggaagcagattaagatgacagaagaccatagagtagttagtcctactgaaagactcaggatggaacaaagaggagagccactgagagatggggaaacgcggttatgcggtacttgaacttcatttttttgtttttaagctaccatcatcttaaatatagtagtcacaatttgcctcttcttcaggtttgaatcttgctaggatgcttggagacaagtttcttaaagagcaagatgctcggttcagttccgatccatttataagtagagctgtgcgtattgatcgagccaacggggcatttgcgctattagcaaggtatttgcttttgctctaaatggtttgtttttgtttctaaatgtttttgtcattatttcattttgacactcttcttttgcagtgatggtctgtgggatgtcattaccaccaagaaggcttttcagctggtccttcaggtacttcctcactctccttttcaatgcggtttttctttctacaattaagagaaacacttacccattttggtctttgatctgaacagtttagggagcgatgctgctcggttatggagagttctgctgagaagattgctaattttttattgaatgaagcaagaacaatgcgaacaaaggataacacctctgtattatttttagattttgagaactggagcaggacctcatgtaaagatgaaccttaaaaatgtggaaagaaagagataaagagtaatacacagtgagatatcttcttagaagatattgtttagtttatgaaccgttgttaaaatttagattaggtagccctctcttgccttggaatttgttagagttatgtggcttccatttctgagaatcaatttcaataatacaccacaagcccctttcatttttttgctatcttaaaaaaagtctttgtctgaggtttaggtttgagattcttttgggtaatctgtatctgaatgaaaaagaaaatgttgggtttgagagaaagaaagagaccacacctctaaaggatttgatccaaatatctatatttctttgaaaagttcatgcttgtctttctcaattctcatcaaatcaatacgtttgtcaccaacgaagaacttggaataatctaagaataggcaaataaaatatagataaagcgtcgtaattacaccaatttgaataaaaaaaaacgcaccactgaaagaaacgtataatcagtcaaacctaactggttgagttagaaaaattataatagtattagtagttagactgatatttccaacataacaagttgcaagtcaaaaattagtttgactagctaaaataggctaagaaagattagtttactaatgtaatctgcattgacctaattggttatgctcactctaatttcgtttttttttttttt

SEQ ID NO: 219772 - DNA, 3575 bp, Cannabis indica
aaagatatttgttaaagctgtcttatcctatgaatgtagtagatcttcaaacctttttttggttttttttctgggccggggaccatgtggagttgaactggttctttttacaggtccagaaaatcagcaatagcttcaatgaattccggaaacaagaatgtggctttgaggcatatgagggcactaaaactggctaatgatagtagggaaaaatgctctacccttctgaatagagtggaagaagttcttactgtaattggaaatgctgaatccacaaaaaaggtaaaattgtcatgaagaaaatctttttcaattaattaatgtcagctgtactacacagttttgattcatggtttaagaagttggcatttgttaatgaaacaagatcgaatatggtggtcttttctttttggctcctgtgcaggttactgaagccatccaaattggagctgaagcgataaaatcaaataagatgagtgtggaagaagttcaacatagtttagaagaacttgaggagagcattgatttacagaagcaagtagaaaatgcgttaggtagtttcccttttttatctcaagtcttgcttactacaaattgtgctcgtgtttttaatttctctttgactatggcagaatctacgccattgtatacatctgttgaggatgaggatattgaagaggagtttagcaaattagagctggaatttggtggagaagacattcatcaaccgattccgaaggtggtggctaacagtacagttgaagaaacggagggttcggaatccactgaatcattgactgatttgttctcaaatctcaaggttgcagatggctcgtcaagtagtgcagcgtatgagaatgttgctgccaaagaaacaaaaacccttgaactggaagctgcctagctaatccaacaaattctcttacggcaaatgtttgagtgccttgaatcaatgcatgtatatttagactacacttttcaaatatgtaaatattcttggatgttgtatttggtctgaaagtaaagaagaagaagagccattttatttcattataacatgcaattacagaagtgtacccacaaacagaaaaataaatgtggagttgctccagttcttggttcccttttaaacaaagcagattgctaagacttgaaatgagaaatatgaacattttacattcaaagcattaactattagatatgaacagtaagcacgactagttttggccctttcgatgggttgggtgttacaataagaaaggtcatgtctcgtgaatattgtgggttaagtgttagttgttttgtggtgcgtagtagtaggacaatggaaatgatggtggaatttgaggagaagaagaagaagaagagggtgatacatgccaaggcctcgtgaatattggaggtgaagactgtgatgtctgagaagctgaagatgaaacaccttgggggaaggggaacccatacatctgatgcactcctcctaatcgagaaccaacaagcggtgatgatgatgatgccattgccattgccattattggagagaaataactcatcaaatattgtgccatcattggattcatgacattattaagtcccgttcccatcgacatcatcatctgttataatataaacacatagcctcttaatatttgtagaaacttgtataattgactagacaaaaatcatgtaatattatatttaagttgtacctgtaattgaaactgaagtgacttcagatgatctatggcatcctcgagtatggaggctttgtcaacctttcacacagatgcaacatcagctaattagtatacttgacatacatatactacataaaaataattaaaataaatgatattatatatatactcaccttgttgcaattgggtattaaggcttttagggtgcgtatcctcttgttgatcttatctcttcgcctctgataacatcaggatattaattaataatcatctcataccctcaaaaaaaaaaagtaacactcatctctttaaacacgcacaaaaaaaaaagataaataaaaaggaaaaaaaactacaccctttcggacaaactatgaagttttgcagatctttttcttgggagaggttgtagttcttggtcttggtcttgttcaagagaagtagaagtagtagaagtattagaagtagtagcagttgtagtagtagtagtagtagtagtagtagtagctgtagtagtagtgtgaagtagtggtaatccattattatgataatcatttgaagctcccatggaatgtaaagagggaacaagtgcagcttcttcttggtttttggggtagtcctcataatcatgatagtcgtattgatcatgaggttgatgattatcagggaccaagcacatagaattatcatcatcaacagctacccgcttattattattattcttcattatcagtacacgttccggcggtggttgtagatcccgctcgctagatttgttgttcaagtagtccttattaagtaaaagtactggcctaggcttagatcgatgatgattatcactatcatcatcatcatcatagtcaccacggccacaggcgccattagatttattaggtaactgctttggcgatgagaatagctcaaacacgttccttgcgggaacagcagtagtattgcctggtctcttattaccaccaccaacaacaacatgaggaacttcagtagtgttattatcactatacctttgacttgatatgaagtttgatggacacggacgtcgtttcacgatctcatcattttcccataccaattctacaaacccactagtatccatcgatcgagcttccacactaataattgtttacctatattaatccacacacattaattaataagattaatatgaactactactattagtaatattaatgtgtacacaaaaaaagaggtggaaaaaaatgatgtatatatgcgcatatatataccagctatagctaggtcgttttgatgatctatgatatacaagtgcttatgttatgttcatgcatgtgtacgtagaactatatatatatatcatattaattttacaacacatatatatattatgtatgtatagttgattacccatgggagctttaggagaggatatataggatagtatataaatacataatataaacaaaataaagcagactagattggagtagtgagtgtattggtgtagttatattaataatttttccatcaaagaaagatatatatattgtttggattagcagtacccacctctcccacctggttccttcttatcaaattcaagtgcttaattaggtgccggagatcgatctgaacgttggctacaaagtatatagatttgtaacaactgactcaattgtgatgagagagaggagagagttgtgctgatatcataatagtcaaccaaaagccaaagggtatagccttcatttatagccccattaatttccgcctgggttgctaatacacacatgcaactcatatcgtccacccatttaagcatggacctcaccacacctcaccctaattactcgtacgatatttttttattattattacggt

SEQ ID NO: 219773 - DNA, 1675 bp, Cannabis indica
aagaaaaatcaaataaaagaaaattagagaacaaaaatgaaagattagaagaaaacatactctgagatattaagagaatcaacttgggtctgcaggaacttcgattttgaagaatgccaaactcagatattgagagaaacaaactgagactgaagtacaaaatttaccacttatacatatttaagataatatttatagtttgagaatatatgcatgtatatttaaaaaatatatatgtgattaattaccaatgataaaatttgttgaagcttgattaagaccctagctgcttctagtaaattacacatcattaaccagatccacccaaatcccaactcattcgtctataggcataaaaaaaaaagttgtaaacatcctaacccacctttatctcttttccaaacactaataatgtctagtttataatatactaataatgtctagcttttgtcgtttattcaactttagtttagattcacaccatcgtgcggtatagtgttaggtttcccacttttaaattcacgttaaaaaaatgtatagtacagtaaattttaaataaggcccaactgtgaggacagctaagagctatcgcgaaggaaaaaaaagtgcaatgataagagaaattaataattattagagacaaagttgctcaatatataatttgtttttgtctaattttttgagattatttggttagaaaatgagttttttttacatttttatttgaaataaaagtatttttgacaaaaaaaaaaattattattaggaaagtggatgacgtattatttattcggagatggagctgaatccagttgttgaaatttgcactaatggagttttgttacgtaaagattgtgataaggatacacgccaaatcatgatgataaggaaagatattattctgattaattctcttcagtttaaacttttgtttgctccatgaaaaattaataatcatcttgatctttcttcttctttttcttttgtatttttcaaaacacagttcatttaattgactacaaattaacatcaatgtagtgatgaatgatgttatccaccttgtaagtatttcacggttgtttgttacagttctacggtattgtattagtattatttaattaataaatattatatttgatattgacttatacaaatagattatgtaaaaataatatattttcaataaactcgacaccaacaccgattacgggtcacttctgggtcccaagttcgagtcttgggtcctgggtccgggtttgtatccgcgttcggatccgaatttggttttgggtatggctttcggtctgggtccaggtccaggcctgagtcctaagttcgagtccgggtctaagtttggattccgagtcttgggttcaggcctggatttgggttcgggttcaggtccgggtcttgggccctaagtccgggtcggggttcaggtcctgagtcaggtcagggaccgggtctgggtccgagtccccaatcttaggtctaggtctcgggtccgggtctgggtctaggtctcgggtctagtcggggaccgggtcgatgatttaggttgacccagatcctttgtaaatattatattacaagctaattataatatagactatgtattatatattaaataatacaacttacattgtattaaaaaaatgtggtcgtaataattaat

SEQ ID NO: 219774 - DNA, 3168 bp, Cannabis indica
ataaactgcagtttggaaataggatggggagtgttgatcgggtgggtcttagtgaaggattattgttgttgtggaaagaagatctataattaagaatcgattttagttctccggaacatattgttgcaaaggttgttagaaaagattttctaccatggacatttactggattttgtggtcacttagattctagccaacggaagttctcatgggaattgttacgcaaaatgaaaggggagattagagggccatggttatgtattggcgactttaatgaaattgtaagcttggctgaaaagataggagggtgtgcaagagcttcaaatgctatggaagaattccaagaagctattgataattttcgactgattgacttttgctctgccaagactaagcttacgtggtgtgatggacataaatcgaatagtgtgatggagacgttggatagagggctatgtaatgaagcttggatacaacaatttgagggggtggatatacaagctctagcatggtgggaattggatcatagggctttagttgtggatatccctgtacaaacagaaggtaataagtgtggtcgggttaaacgaaggggtaggtttcactttgaggaagcttggtgtaaagaagaggggtgcaaagagattgtagaaaagcattggaatggtcgtgatgattatgactcagtagggcagtttaaggccaaaatagtgagggtgtgaaaggctttatagatctggaatgtgaagaaaaagaggaaccttactggggagattgctaaactcaaacacactcttactgaattatcaattttacaacagcttggggtatggagagaggtacaaaaaatagagaagcaacttaatgtgttgtttgataaagatgaaacttaccggaaacaacgaagtagagctatgtggcttaaatggggtgatcaaaacactaagtattttcatcgcaaagcttcaacgaggagaaaaaagaatgaaattaaatgattacttaactcagggggagtttggcaagatgataaagtaattgttcaacaaattgtggatgagtattttcgagaacttttttacggcatctgatgaacatcatttgattgcgcgtccattaaaccaaaagtcacgtcaaagatcaatgaacaactgtctagagattttaaggaggaggaagttatccgtgctgtgtcagacatgaatcccacaaaagctcccggggatgatggactaccaacccttttttaccaaaaattttggggacatctcaaggcaaatgtggtgaaggtatgcctcaatatgttaaacaataattcaaatttaagctgccttaatagtaccattgtggctttgattcctaaaattgagaccaaaaaagattgaagaattttggcctattagtttatgtaatgtgatttataaggttatctcaaaatgcatggcgaataggatgagagcttctttaggagagcttatttcggagtcccaaagtgcatttatcaaaaggagaattatacatgataatgccattattggttatgagagtctccattgtatgaggaagaatcggttttagaatggaaaaaatttgccttgaaattggacatggaaaaggcttatgatcgggtggaatggtattttttaaaaaaagtgatgctgaaactggggtatagggcaacttgggtggagaaaattatgagatgtgtgtcatctgtccggttctctttcctaattaatggggagggtgcaaggttcagtcattccacaaagaggattacgtcaagggtattcgctttctccttttttatttcttttttgtgctgaagctttctcgactttattacagcaagcagaaatacatggacacatcaagggtatcaagtttggtagaagcgacctcactgtctctcatctcttctttgcagatgacagtttagttttttttatatgcatacagggagacttgtcatcagtttaaaattatgctggaaaagtactcattagcttctggtcaagttattgatttccataaatctaaaatttgctatggaaaaaaggtgcctgtggcagttaggaagcactttgctgactttttctgaatgaaagttgtggataatcatggtaaatatttggggctaccttcttttgtggctagaaataaaaacagttgttcgatgtgatcaaaaatagagtttggaataaattaggtggcccttttttattttttttctgaaatgcacaaatattacattaataacttaataataagaggtatgcacttatatatctacactacaaatacaataatattaatacaacttttaatcaaataatatatgtatattttgtaactaaataccttttttacttacaacaaaaatatcttaaggatttttacactacataattaaattatcaacttttttacatttttattatggagtggaattttttttcaaaaatactgtgtaaattttatattgtgtactgtgttacgtttttactgttgttttttagttatttcactgttgttttaattgttctgttttgttattttacggttgttttataaaaaaaaaatatttttgtaaaagatttagtgtggcaataaaaaccctaatatcttatttcatgacaagtcgcaatagtaataattaataaagcttcttttggacaatacttttattcataagtattttaattagtggtggcatatacatactgttttttttttcttttctttttcagataaatgaggacatacttaagatgatatttttctaatgacaaattttattctttagataaatgaggacattgcacttatatatgttttgcttacatatacccacttacaaacgtgcgttttcaaatttatcaagttgcacctctctttatttctttttttttttttaaacaacctctctctttatttcaaatttatgtttttatgtttgaattttttttttatatatttttatagtattctaataatacaaaaagactacataaaaataattggaaaataatatacaaataacaaaaaatcaataacaaaataacaaaagtacaacatactatattttttgtaaataaaatcttaaaaagtataaaaaatatttaaaattctgtgtaactgtattttgtaatgtttttgttttgtcac

SEQ ID NO: 219775 - DNA, 4002 bp, Cannabis indica
gaaaaaaaattatatttataaagaattgtttaattaaaataaatatatttgatctattaagttttgaaatataattgtattataagtattagagttttaaattactattttctttacattaaaatattatttttatatattaattttttaagtttttttttaaaaaaaaatatgtgtggattgaattagatcagttacttttacatgtcaattaacatccaatccgcataagtgcggattgtgaattttctaatctaatccaatctgtacaagtgcagatatctgtactttgcagattatattggattggatcgtgcagattggattaaatcaactattttatggaataaattacatggtatacccactttactttatttgttttaatttttacctctatttttatattctttaagatatacatacttttataaatgatgttcctattagaccctttaagttaatataaattatatgctacacttaattagtgagtgagggtatattagacaatccacttaaaaaagtgggtatattttaataaaatataatatgaaggtatttttaattaatggatacaagaaatggtatttttcaacttattcctatattaagaacaaccctactaattcattaataatattgtatgacatttattcaaaagtttgatagtacttgtaaaacattattgtaacattaaatgaatagctcaacttaatcaaagaataattaaatattatttttgacctaattttaacttttataaggttaagatattttttttacaattttacaaatcttttttatttttatgttttcataattaaattttatcgaactttataaaattaacatgaaaagaacactaaaagaataaaattcagccaaaaaaaaaacttataaaaaataaataaaattgactagtaatttactaatttatatgtacactattatttttgtttgttgtacgtgtatttatatcacatattttatttttttttttcccaaattaagggattttgggcctaggccctgtttgctttattcttgggtcgggcttggccttaggtcaacttctttcaactccatggtccggccctgcagagaattaattacaaaagaaaaattatgggggttttttacaaaaatgttggattttgagaaaaaatctacaattttactgtcacacaaattattttacaaaaatactatcattttataaaataaccataaaataacaaaacagaaccattaaaacaatcgtgaaaacttaacataatacacaataattttgaaaaaaatcccaccccacattattatcgagtgctttcacaatggttcttctaaaatgggtgtagcgataccctatatgtttcggtatctattataattttttagtccaatttttttatagtcgtatatatattttgattattcaaaatattttgtaaaattttaaagaatttaaaataatttataatatagaaaataatgctcaaacaataaattttataggcgtataaaataaaaaagttatttgattttaaactctattattggtgtattaaattttttaaaatttgtcaaaattttgaggagtgcttagtgaggggtgcgtgcacattgaacaattttcctatatttttttcgtcaaaatatataaataataatataaaatccatacacacggatctccaaagcataattatttcttcatcattacgttattgaggcttgaatatgttgattgtttaagactcagtcttgtcttttttagcatttgtttattcaatctacgaagtgaataaagtcacattttttgccacataaataatcaccagtagttaaccaaattaaacatgaaaaaggaatagaagaaaataagatctctcatggcacagtcaaactttctcagtacttgtttctttatgatcctatgtttaaaccttgtactcctcactcaatcctgtccaagtcgatcagaaaaagcagccctgttcgtctttggagattcttcatttgatgttggaaataacaactacttcaacacttcttctcgagccaattattatccatatggagaaaccttctttaagtacccaactggaagattttccaatggccgtttaatcccagatttcattagtacgctagccataaatattttcacttaattaattatctttgaaacatattttattgattgtcaaaatgcatgatatatatatataaatacagctgagtatgccgagttgccactgcttccaccatatttacaacctggttatgttgactttacatatggagtcaactttgcttctgctggagctggtgctctacttgaaactcgccaaggatttgtatgtcgtattactttttaatattttattttttcaaatttcaaccaaaggaaaaaaaatgacaaaggattagtttattttaatttgtttttcaggtcataagccttgaaactcaaattggttacttcaaaaatgttagccagatattgagggagaaactaggagatgcagaggccattactctgctgtcaaaggctgtttacttgttcagtattggagccaatgactactcgttccttttcgacacaaattctagtgcccttgattctttttcaagggaagaatttgtggggcttgtgataggaaacataagttcagcaattgaggtatattttgccatactgactttatatctcacacacatatgtatttacttttaaccactattatatatcatgggatgtattgttttattaggaaatatataagattggaggaaggaaatttgggtttcaaaatgtaaggagtatagcttgtgtaccttacgcaagaattgttgcagcagcaaaatataacatgtcctgtttggatcagagtacaccatttgtagaattacataacaaagaactttccaaacttttacaaaagctaaacaatcagctcagaggattcaaattttcattgtctgattatttcacttttgtaaaagaaagaatggatcaccctcttaaatatggtattggattcttcatcttcggtttcttcgtacttgatttttatttttattctaataaatattgtctatgtttgctaaaaaataatgttaaatctttaattcttaaaggttttaaagaagggttggttgcttgttgtgggagtggaccgtacaggggaattttcagctgtggagggaaaataataaaagattattatttatgtggtaatgtaagtgagtatgtgttttttgattcagctcatcccactgaaagggcatatcagcaatttgctgagcaggcttggagtggaaagcccagcttaaaaggatcttacaatttgaaacaactttttaaaaattagtttaactttgttgagacatagatcttatttagttcccacatatatcgattcaactgggcgatttttggtgtttgtttcattaatgcctctgtttcctcttctttgttatttggtcatatggttttcttctaataaagttgtgtttgtttgtttgtttagtaatggcttgaatatgttatataaagtttcgtgtgtgatgaatgacttcttgagtataaacattgacttttaagtttttaaataataatcttttatatataatacttacatttaatataatatatatgtgagtgattgaattgaagtactaagtagataatttgtcaaataaatttgaaacatattttttattcactgttcatagcattatttctttcttcatcattacgttactaaagttcattgtaaaaataagtcaactatcacaaattgataaattagtaattaccaaacacttattaatacgacaaccctaaaaaatcaaattgttgaattaatctatagaaaacctgtaaaaatttctagaagaaacaaatttaatttggtatatgtgacagtcagtagtcccgtgatccggaaagggaaataccgggtaagctgtgcaatcccacatcgcctggggaag

SEQ ID NO: 219776 - DNA, 4209 bp, Cannabis indica
aaacatataccactaagttactaatacatatcgtgctatcaaagcagacaaattacaaatcaaacacaaatgggcatgcccaaattaggcttagccactcatatatagctaccattttatgtcgaactcgataaatttgaaaattccaatacaatgaccaccaaaattcacacccaaatagtcaaaaagtagggagggaaacatcttagaagtcaatcttacgttatactaactgaaaaaataaataaaaattcctattaatcgaaagaacagagtacctggcatcagataaggtctattcccacagacacaaatgtatttgtttgaattggaatcaaatctacactggttagaatgaaggcatttagaacattcatcggttttcggattcttcggaatagtataattgacgttaaagcccatcatcaaagcctctacaaggaaagatggattatgcaacactctagtcgctatagattccataatcgggacgctaatagtctcaccgcattttataactccagaatcagatcaaacggaactggtccgatcaagaagtaagaatccacaaatggaactgatttagtggcgtcacatcaaactcagttgtattgcacttatagattattgtcaaatcgacgttatgcgctggtttcgaacgtggtgttaacgaattcatgggggcaggtctcgttccagaggtctaatcgagccaatgaaagagtctgatcagatgtattgagttgagttggacaactcggtatttgaccaagttgattgtcaactcgttcaagatgttcacgcaggagagtgggaactccgacagaccgcagcgctccgggaggtcgtcgccgatgaagggataagagatgttacggaggggcccgcagttgaaggtcgtattgctgaagaagaatcttcggaggccgtgacatggccggaaagtaggaagaagaagaagaagaggaaaccggcgatggtaaccggagagatgggtattgagtgcattgggaaggagtggagtgtggaatggagggttgagatgccattgggtaattggtgatgggtgaagactggcgggaaagtggttgtgagcttgagagttgactgggtgtctttggttgactgtctttcaacatacatatatatatatatatactagccaaggtaaaagcggagcagtgtcatacaaacgattcacaagagtccaagtaacatttttaagatcaaaataaggaaaaccataaaaaccagaaaagtgccattgcatatcattagagttatttataatacaatcaatatgattaagggagtaggaaataacagttacatctaaacaattgttccaaaaaagcaaaagccctccccctaaaccttgccgaggcacctcaaaaacattgtcaaaatgaagcttgtgcttgaaggtatgtccacggccaggcggcagcttagtctccataacaaaaagcaacgccggctggtgcttcttgaccaacagggagagatgaagaccattagaaacttatcaaagtgccatggttgttcttcaagaacacgacgacggtcgccgtcacactggaaggtagcaagaaaaatacctgagtgatactcagagatttgaacggggaagcgaagattccaagcatcggacatggcctttttaatccaggaaggcttgacagattttggagtaaggagtttgaagaataagcaaaaagagttggaatcagatgggtgattcaaggagatgtggtcaaagtcgtgaatgagactttcctcatcctcaagcgcagtaagggaatttggggtacgggaagaagaagccattgaaagaaggaagagaaggataggtaggaatatctggaagagaagaagttgggatgataggaagtggaaatgatggtgaaaataaataggcagtaagagaaacaaggaaagagaattacctggagcagaagggccatcttgaagattgaatcgtcctctgaaccaactcttcgattcctgcagaagccgtctgaaggaggaaggtaatgattatggtgatgggaaggcttgtgagagaggaaatggcggttggtgtatctctctggattcgacgaagaaagagggagaaatataaagactgagagtacattaaatgcagaaaaagattgtgccattaaaattaaatgcaatcgatagagagagagggcattaaatagcttctgagcttgagagattaaggggtttttcctaatgattaaggatgacgttggcgcaattaatgtagacaagatgaccaaaaaccaaacagacaagagggggaagagatgaagacgagaagcaaagcttagggaagaagaaagcaagaagcccttgctgatcaataccagagccacgcctgtaggaagcttcacgaagaagaagaaaaattttaatttttcatttgtcttctttattagagagacgaacaaaggtttacctatcccactatccagcagctatgtaaagctaattaactttggtcgttgtttctttattgcctttgaacttattattttgttggatggattggtgtctctattaacacatctctttgataataaaaaattgatattctattgttttgaatagtctccttaataataataataaaaaaattgatattgcactgttttgaatagtcacaaatatttgtaatatagataattactaattaacagtgttaattttaaactattaaaataaacataatatacacaacaaatctgttaaacacaacaaattccatccaatagccatttataaatatttgtaatatagataattactaattaacagtattaattttaaactgttaaaataaacagaatatacacaacaaatctgttaaacacaacaaattccatccaatagccatttattatatatagatagatataattattttggtgtgaatgtataccatcgaagtttaattcagactatttttttacaccgatatgatactaacgaatacttttagcatttctcttaagtttaatatggatttgctgtcaatgtgtcgtagttcatgtaaacgtgtccattttattttattattataataatataatgtcgcttttctttctcaaaacaaaaaataatgttacttttattggagtgttttaagaacttctagaatgtcgttggggagaaatatggtattgaatattaacatttataccggttaatttttggtttgttcatgattgtgaaaactacgcggagaagaataatcaagtttttactcactcattattttcaaaacttccatgtaattatatattgagtatttcaaagttgtacgtatggtttgaattttctgcaataaaatatttctatttaagatgaagcaaaaaattcaatttcagggacccgatccatgaacactaggaaccaaatgaaagtgacttcgatgagtcgtatgacctaattaatttatttgaagttgcagaagaacaatattaaaacattactaatatcccaagttaaaaaaaattaatagagaaaagaatacaatttgaactcgaagggcgaaaataagcatataaaaaaatattaaaaagtggggattagcttcgataatatacatgtaatctactattaacataatttatatgcttataattatatatatccaagataaaggctatatagaatttgattatgcaaatataataatatacatacacacattacctaacctgaaggccgattattcaaatagttaagcaacaatttattggagtttggcaatagtttatgggaaattaatgcaaccccgtgacttgtatatatgaattcaggacttgttttgtttgatcaccaagatatcaacaacgtgccaataaaacccgaacttgatacttagagtctcacataaattatcaaacatctataaaaaatattgaccatgctacttaattattttggagggggttgtaggagaacgagaaaaggcatctgagtggtttactccatttcaaatcttattcccatcgatgaaacatggttttccagatttgcgatatttttggattttttttttcttttttatttttttatgtgtatataggtatatataatgtttataaatgtgtgatgtttttgtgaagattttatgtttggtttgattattattttagttttttttaatgtgatttggatctacaaaaaaaaaaaaaa

SEQ ID NO: 219777 - DNA, 1869 bp, Cannabis indica
actctgcatacacacacatataaatataataatcatgaagcgtatcaattattgggcttttagcaaaaataccttatacggcgtttggcatggggttagacttagtgggaatgagaatatcaaacccaactcatttttcttaaaaatttaataagcagggggggtttatgtttccaatgggtgctcctctcaaaatctcaaaatgcaatttcagggttattgggattgatgctttgtaagtttaattgatggtaatataatattaaacccccttccttcagtttcatatttccttaatttaagcatcctctagctcgactcccttcaagttcaactcacataacaaacacccctttagagtttactttgtttggcaattcagtacatgaatttttttcgactatcaagtccttgatttaaaaaagtagcaattaagtccttttagttaattttttcagttttttaattgaatgtcttatattattcaatacaatatgatgtgtaaaagtagctggagatgtatgatatccaaaaaatttctggattatctatcaaaaaaagtttttaaaatttgttaaaaaattaactaaaagacttaattgctattatttttaaaactcgagtactggccagcttaaaaaaattcaactgaatttccaaacagggaatatctcagaaacatttatgctagaaatccttggacaattaaaagtttaatcaagcagattaagagatggtgaagtgaaggtcccacttacttgggtccatgggtcaaaatggcaagatccttggtcattttccctgcttccacagtgtcaatgcaggaagcctccaacttgtgagcaaaatccagcaatctgtcattgttatctaatttggccctgaaatcagtccaaatttttagatgtgttaggttctcgattgtgctgacatgttttaataaggcaacaaagagtacctatgctgcagtcctcgtgtccaggcaaatatggaagcaatactatttgtactggtttcttgtcccttctgatgtagccggaaatgccgagtgacagtcccatgagctgcctcagcttctaatgtcttaccgtcagaggataactgcacaactacttgttatgactttgtgtgatataaagaaaagtaagatatcaagggtgacacaatagtagatatagtacagaccagtacagaagtcatgaggcccagagaaccaaatcctgcaaattatacaaaaaacaagcttttagacatggggaccacaagctaatatttgatctccacattaagtccattactgatgtccctaggtttctaatagttttcctgtcatttcattttcaactttacagttatctgtttataaataactctgccagacaagaaattgtttagcaaagtatttattattgatctataagtcggtaatgatatggtaccttgtgcaagtagatcactctgtacatcaccatcataatttttacatgcccaaacatatccaccttcacttttaagtgcataagccaccatgtcatcaattagccggtgctcatacctgaataacagacttgtcagggctgttaagtaatatctgagcattagttgataagaatactttcaccaagtatgatacaaaccatatcgaatgctcttcaaacttatgcttccagttctcttcgtatacctcctggaatatgtccttaaacctgtataatttaaaagactacaatatgtgtacgcataatcttcacaacgtggattaatgttcatagattacaacagaaaatctaaagcatcaggcataaatacatacttaaaaaataaaatgaactagagagagagagagatagaaagagatctacctgccgt

SEQ ID NO: 219778 - DNA, 3340 bp, Cannabis indica
ttggcagtatttagaaatgattgcctgcctaaacccacgaaatcgagccagcataattggtaaagttattcaaatatcatataaagcctaaatatttatgtggtaactaaatttcaagatcatttttgcatttgggagagttgaaacatacaaaatctccttcactaattttggttttttgaaaaaaagcccaataaattattggtactcaatggcaaccaatgccaagcttctttttttactcattcgtttctcatggtttgttaaatgtttgcatacgaattcgtatgtttgtattccaattgaagccacaacgtttttttaacaatattgctgttgctgatttcaatttctagacctttaatctgaaataaatgtttttgagaaatgcacagatgtgtgtagcagcttgtgcgagtgagaaagtgacatacttgcaacatcatatacaatgacagctacagaggaatccctgatatagcttggaatgagactcctaaatctttcctgtccagcagtatccctgtttaaatatcgaattaatgcttcaaacaaggaatttaaatgaatcataagcataaaatttagagaaatggccaccgttgtcctaaaatcatacaagtataaaccatgctaatcactaaccaaaagaatttttcaaatttaaaagtatatggatgtaggacacaggctgcaacaaataatatttacataattcttgttttgacagtatcatggttgcaatgcccctctttggattattggaaagatcatcggagtatataagaaccatccagctatcttgatgtactgttaagtcttaagcctatcaccatggacatagtgattcatctgacactatattacccgccacatataatttactgagtacattacccccatgttctgaactctgacaaatattaatcatctttcaaaaaatgatcacattaagcatataagtactcccatttctactaaaacactggttaagaagcataattaaacccaccaccatcaccaaccaaactgtccaaaccctactttgtaatctcctaattcctaacagacaaacttattaaagagttaagacaaagcttttacaaaatcacgatcatgttcagtcccatttcataaaccacagaattgataccaagaaactcactcaccagagctgcaatcgaacagtgcggtcttcaagatacattgtctttgacaaaaaatcgataccaatagtagcctatacacaaaataaaacactaaattcagaaaacaaatattcaaaaacggaacaaaaggaaagaaagaagaagaaagaacctgataggtgttgtcgaacttgtcatacatgaagcgggtgatgatactggttttaccgacagactgatctcccaagaagacgagcttgtacttagctagagccgataccggggccatttgattccgattgatctaccaagtccgatccagatcgagactgaaaagttagagatcaaatttattgtattgaaaattcttcttcctcgttcactctttctctttatctctctagcttcgtatttatagcattaatttttgtagagagagagagagatgaaaaaacagactgtaatgcgcgtgagtttgggttggattagaggaagaagaagaagatgtttcgacgaaacggagctccgtgttccttaacgaccaataagagaattgaatgatacactatgtctgtaactctaacactaaacgacaccgtttgagccagcaccaaataagaaaacccaaggtgacggagaaacgagaagaaacacgttttttatatataaataaattagaaaaaaaaaataaaaaaaaaaaaaaagctctgataaatcccaaaacagctcataagtcataacccgatttctctctttgatttcttctcctccatttacgactgttccaattcctttacaactccgcaacccaggcgagttgttgtttacagcttttggtataactgtatattgtctttctaggttttacctatttcatgatttccctaattttcagtctcaattttcaagtttcaagagtccctcatcgtcttcttccatccgttctggcctaatcctgtcagttttcttcgtcgcaacatcaccatttcttccctcaaaaaggtacaattccttttgtggatccatgaaatttctctttttccagctcataaaagaatgaatgaaataacaaacatggaaataatcatacagcttcccaatttttgttaaaatggtttttcatttggcttatgggaattgaagtaaaataatgacatttttttggttataaatttaagtgttatatgtttcaaaagaattcaagctggtttatcatggtcagtgaaagagctttgggtagttttgagttccacattaaaaattcaagtttaacatagtttaggcctcttacttgaggtgcatttgatatgttggtatttaacacttaacaatctcctcatgttctgttaggtctttcataaacaatagtagtgcctaaattgaagagaaaataaaggaaaatggtgtgtcttttcctttgtgatcaaaagtctcatatctctatcagtttgtttcattgttgtatattaaaagatttgtaaacttacaatacaaatttgaggttgttgaagtggcaacgccaattgctaaagtggttgttgagaatgatacaagagtctgttttttggattctttattaaacactgtattggagaaggctaagcaaaatgcctataaataagttgaagacaaacagtggtatcgtttatagttttttattatctaaatggtatatttttatggttgctgaaagcatatttataaggttttcttggttgctgtactgattaatttttattgggatctttttcttatagcacaaagtttcttatgttggtagtaaattctgggatgttactcctgtttgctgaaaaagacaaatgcagctaccatcatgagctttagttctggccgaagtagcgagatttaataggagagattaaaggttctttaaggtctttgcccaatagataacaaaattggtgatgagcccttgattttttttaatattatttagttgaacaaatgactcggtaagggagtaaaatgtaacgagtgatatcctttacttgttgctatttttttttaaggttaattaaaattcttgttcttgaattttgacatgtaccaagttatgttccttggacttttaaagtcgttaaaaatgtctccttaactattaagattgttagatttaaggatttttgtccaattttagtaaaaaaagtctaacatggatgaaaattcaagag

SEQ ID NO: 219779 - DNA, 1818 bp, Cannabis indica
aaaaaaaaaaaataacatacatcaaacaagtcaacactaaaactaaacctaaatctattgcttgattagtaaattgaatattttccaatgaagaagaaggctcctaaagaaacataaaataaaaagattaatttaacagaactaaactaaattaaaaatgtaaatatcatagaaaatacttgtatattagagcattgaatagattgccgagtccttccaaacacttgaagcaaccattaacatcgtcttccaaaaatgataattctgtatcaccgtgagagtgagaatgagaatgtgaatgtgaataggaacgaggagaaaaagtattgagatgaagataacttctattgcgagcagatttgggtggcaacaaatctttgagagaagtatacctaattattccactctcatcgttgttattatcataagtaccgtatttttttgatctaaaatctatttttgaagaacttgtgcacctttttgttttcttcaaagaactcgtggaagacatttttacttttgttggtgaagtttattgtaaagattaaggggaagaagtaaaatataaagcctaacagagataatgaatggaatatttgttcttaatattaatttgtatttcacacctagttttattaggattccacttaaagttcactatctgttattcttttaatatatattttacaataaatatttaaacaacgatcttttgtataaaatacgtagaaaagattcttcccatatatatatattttataataataaatatttaaacaattatcctttatattattttataatttatatttttaattctacctatttttttggaaagatagtatattaaatgaatatttttatttaaaaaagaaaatagaaaattgccaattttaaccattaccacatattaacgttggtaatgtgtgagagagtgatttatgagttttataatacaaaatccattttgttttatgaattatgatttggggcaaattctcttcattcaaatattagtcttcactttttttcattcccatatttttagttttagctttcctttctagttttagatttggctaagttattggattattttagttgggaaaacttatataaaataacaattttattactattagttttgtggataatgaatatttgtactaggaagtagttaattacgtaagtaggtaatttaagaataaactaccatttgaaaattatcataattatattaatgaaaaattaccatatttttcataatgtatcttaattagttttgtagtaatttttttttgacaaagtatttttctcttgaaatgattctttaaggccgcttttaaaaaatactgtttgatatttttagttttctcaataaaactaaatatcaaactcacatcatcacttaacaagattttaaggttatctcctcattaagattaacccaacattataccaaaattgacaaaattctcatcaattttgttcactactttgattatttaaaattcaaaattgtttctccaattttgttatcttttcacaatttttgaatccattatgattcactttgatttgagtctaaaattgctcttccaattatgacttattttacaagtttggatccactttgatctatttactctttggcaagataaatcccataagtgtaactttcttagtttaattttcttatctcataaaatgagataattatcacgtatggaatattaattctaaaactctttattctcaaaaaaagatgaaacatctttcccatcttcatcactattattattatcatatatactaaat

SEQ ID NO: 219780 - DNA, 2552 bp, Cannabis indica
actccaaatgtccatatgaactaagtcaaagatgttttttgcaaaattgttattggaaataaatggtaatctttttttttttagctaattgaaaaatgtgacaatgctgatttaaaaaaaaaaaatagagttatctctctttttattaaaggaatttgaaatgtacatagatgggtgaccaagacgattgtgccaatgataaacaatattatttgtgtactgaaaaaaaaagaaagcattagcagcaaccgactcttattgcaatagaaacaatttttcacatcttttaacagtcccagtcaccacattccaataaagatcctgaataacacaagatttttgacgaaaagtgatagaattagagctgttttgggtaagatcataaatggaaaagaggttaatttggaaacttggaacatatagcatattgtgaagtgtgatgtgaggattaattttgactgtgccagaattatgaactaacacttagtgtccatgtggtaatgtaacatgttgaggaaaagtgtgatgagaaaaggaagtaaagcatgtaatattagaacacatatggtgggtagctctactatctaaaatccaagtaagatggggtggattgttacttgcgaaattggaggcaataggtgccatagaagccatatgaacatgagaattgttggtgagctgctggctgagaaggctgatcagctgttggcactgttgagacaaatccaaaggaatggattggccatcagcatcatttttggaggtgctggcataatttgcatttgctttgcctttctcttgtcattttttatccccataatcaagggggaatcatgtagaaagtagcatttttcaaccaaatgccctggtttcccataatttgagcatgagggtctgggtttcttggtacggggaggattagtaggtgctgaaccagtggcagcagctaatggaaatgtattagttgatccaagagaacgttggcgtttcttcttgtatgatcatagcaaagacacgagaaagattgggaatgggttcattgaacaagatttgagttctaaccgaggcaaattattcattgagaccagttaggaatcggaaaatttggttctagttatagtaatcttaaaagattttcatcgcaccacaagtacaagtggtgattggttgaaattccttcaactcatcccaaagggatttcattttggtgaagaaggaggaaaccgattgttcaccttgttgtaatcgggtaagttgtgtttgtagctaaaagattcgagggccatttccttcattgaatctttcagcaagatcattccacatatcggtggctaaatcaaagtacatgatactttgggcgatttcttgagaaaccgaattgacaagccatgacataaccatgttattgcatataagccaagaattaagagagggattatcgatttctgtccgaggaagggagccatcaatgaaggaaatcttcttcttggcagccaaagccatcgtgatgcctcttttccaggactggtagttgcttccgttgaggacgttggagacaagaatcaatccgggatgattgcctgtactcagaaagaaaggactggagatatcgtcgttgacaggacgaatcgattggaagtgaggagcagtaggggaaagatcattgaagatgggggatagatcttgaggttgaactgcctctagattcgaattagatggaagtctggaagcatgatttctgcgatgagtagtaacagaggttagattagtagcaacgatggagtcggacgtgatctcagctgcagaattgtcgaccgtggatggaggaccgccatcttgggagcgagttgaaggtcttgccatggaagcagtgggcaagatttcttctgataccatatgagaaatagagtataacagagaaaaatgtatatgttttacttgttatagaactaaagcttagaatagaagagtaagatctatatatagaccaggtgagtcggtgaagactctaacagaaaaagatccagctaactaacttcctaatagaaaattaactaactcttaataaagcactctacgtatacaaacaataagatacaacaggaaaatattaaatatggctattaatattccatatacttaataattaataataaattacagtctatttatcctaatagactcaggagtctgattttaataagctcatatactattattttcagtcatgaatttcaatttatttttgaatcaaattttttttttttttgctagaagaaaatatctaattgcaatatatatgtaaatttcaattttatttttgaatcaaactgttgatagttccgtttgaaaagaaaatatctaactgcaatatatatgcaaaattttcactactcaaagaagaagagaaagaaaatggagaagaatgagaaaatagtaattatttaccgtttgaatggcaaaatggacacgtgcacgaagcatctatatatttatataaaggaattgctacaaaacgaaattaatagtggcattttatatgattttcattc

SEQ ID NO: 219781 - DNA, 5353 bp, Cannabis indica
gaatgataacaggtttgactcgtaaatccttagcaacgagaaagattacaccttatgatagcttgtgatttctctgttccactgtttgtgactttgtgtttttttgttcttctgtcatctctttttatggtctatgatcttatgtttattggttcactttctggtatcattttgaattttttggacttgttgtatgaatctgggctccatgatgataccaatggaaatggatcacccatggagatattggtgattatttttattaatttggctttatgttatatccatatgtttttgtgggctgttgttgtttgtttatttgttttatttttcacaaagctaacacacacacacacacgtattttttgaagacaatatatgcttgttaatattaccatttattacttttcctatgctttctgtaccttaaaggttctatattcattgtctgttcaaatctcaatgttgatatatacatacatacatatatatataaatttttgaatattctcaatctgtcaatacctgatgtttttccttccataagaagcagcctcagcaagtcattgtctcggacgtaaaattggatggatcaacatcagagatccttgtaaaggaggaatttggagaaattgctactccagcagaaaaatgcaaagagacaaatccttctacaaactttcaagagagcaaaacaaattctcctaataaactagaggtatctctatcccatcactcttttaagttatactagtaaatgatattctaataggaactctagctgttattttaaaacaggtcatggacaaagctattttgtggctagcaattatattaaacgacgtttaatgcattttagtttcggctcaatctattcttttagtgcttgggttgcatgtgtcacagtgtattttttgattattgcaagtcaactttaacaaaacctacactgaaggatctaaccattctaaaggtggggtgaagatcagacacttatgatgtgtgggaatttaatttagatggttctacaaaattattaagatagattatcactgtattgtgtataaatggggtggagatttatgtaggtgattttatggttatcatttgtcaaatatattgcagatggtgttgttgtgaatattttaacaggcttaattactagcctttgcttactcctgtttactaatggacagcttgcaaatggcgattccacatttcatggcccagagtgtttgagacttgcagctggctcctgtgttgaggaaaaacaattggtcataagtgattcagatggaaccaccaggtgttcggaggccactgaacaagagcttaactgcgagaataagaatattacactaaagcatgaagagaagacgagctgtaacatagaaatacctaaggtagctactttcctcacaagcattttgattgcgtgattattcaaatgactctagaaagcttgaaatgttttccttgtttgaattttgaaccttcacttttttgcatgctgtgctgagggcatgaacttgagcttttctaggagatgtctgtagttcatttcatgtaatgcattaatcatattaccattcttgtctacttaccttgatcgtctgcatgaatagtacgttagtcaaacaaatttgtctttttggcaattgtgtttactttcagagtgaaatgtttgggcagacatttctatcacgcaagcattattttagcatgcaatcagatgataaaaagctgagtacaagaatggattttaatcataactgaagcctgttagatttgaaacaaacctctctactttttgagaaagagaacgttacatttcatgagtgacaggaacaaacctctctaatattaaggtggttcaaccatgcttagttggttccacacctcctctatcatagaggaggttatgggctcagtccttcccccattccccttatataatatatagtataatatctaatataatgacaataagaccaaaggaaagaaagggattagacattaggtcttttctctaatattttactatttcaacagtcatcacttgacctattcttcactatactgaaaaatttgtttatctgctttgaaggttgatgaaaatatggaagcaatggagcaacttgctactgctacaaaagatttaccgtgtgaaggaaatcaagcctataaccgactaatgtaagatggagcaacgtatactattaaaacggctgcactcacttgacttgaaagtggctttgcccctgctttccattttagattttttttcagccaatctcttttatttggtttctctttgatgagtcttgcaatctttaagaggtagagaatctaacatactactatggaatctacacatacttatattataacttgtgtttgaaattatttgcattgtgaaccaaagttgctggatcagacatgctgtatatgcaactgttggttcattctagtcccacaagttgagtcgagctagttttaatcagcctctaaccctgtttctcttttaactagcagctttcaaatgctatcgtagagtatacaagcctagatgctataataagatcagctgctgtcagcatgagatgtattcctgctgaattcgtaccaacccctccaagaacatcaaaaagtgacgactgtgatacgggggaaaaggttgccgagctttccacaaaatttgctcgaaatgaaaggataactattcctgctgaattcgtattaagccctccaagaacattaaaaagtgacgactgtgatatggaggaaaaggttgctgagctttccccgaaacttgctcgaaatgaaaggataaatattccacccagcaagtatgtttcttcggatttgctgtcaaggattgtagtgaacggaagagacagtctactacctgtgactaacactgaaaagttggctgtggctttaaatagctctacagtgaaaaatccaatcatgaccaagctgaacaatgtaggagaaacagaaatcgaaaaatctcagaaggctattgttgtatttgacaactctgtttcagacttgagtggaaaacaccaaagtcaatcggcaatgaggaaacttcaatcaaattcgcaaatcatcagagaaactatgtctgcattcccttccgcaacagaaagcagcagtttgaaagcatttccacttaaaagacgaaaatgtgagcctgatgacgacaatgttagattagtgcagctaatgggtggtaagcgggtaaagaagatgggtcagcgcgaaaattacgccaaagaccataacgcctctgtagctatcatattaccaatttcacagtcacaagagagtaaaaagacttcaaatttgccacgtagttcagtttcaaacaagcctgcaagtgacagcggttctgttgacaacgatcccaatgccatggctttgagccttttggctgagttgtcttctggtagacgtgtactggacggtatgaaaatacaggaactgaagaccatcgccaaatttttagatctcactaaacttagtaagcttaagaaatcagagctggttgaaagaatatctgccaaacgaaaagagcgtcaattttgaaggtagtttgtacagttgttttgtttttcatctcactatttcgggttactgttgatctccttgaccgtgtctcatgtcccagggcgctctttttaacttttatcactgtccatagcatcattccttttaacctcccacagaaatctaagagagagaaagaaacaagtatatgaaaaagaaacaagtatagaaaagaagctagcttttagatttagtcttagttttacatgaaatgcttttataatggtactagggggctttattgcagtgatgacaaagaaagaaccacacaaagctattcatttttttttttgagcaattgtggccatttcaactggcatagaatgttgggaaaattgcatttaacctttttgtatatagaacttggtggattttgaatccaatatgatgaatacataggatttgaccttatgaattgtttcttcagtatagaaaattgtaaacacgtattacagtttatttttctccacgcccatgttttgcttatagtgcatgcatttgttcattctttgtattttgtctttgcaagtacatcaatatggtttattaccactattggtattttgcactttatagtgaatgtacttgtgctaataatcgtatgataccaaacatttcaaagtgttgttttaaggtatcagtagtgtctagtactactatgaagtgacagtggtaggtgtgtaagtttttttttttcggatttttgaagtgtatagaattagcttaccaaactcgtccgtttgtgtgactgctgagcttttgggttttgggtgtgggtggattttgattgggtttcggattggctggccttttttttatacattttttcataaaaataaaaacagtaataatgaaaagaaagaaaataaaaggagttgaagaaaataaaaatgatatattataatattattgttttgaattaggtatttttttaagtttattttttaaaaaatgtataaaaaaatgagagaaaataaataaattatatataatcggatttagggtgagttcgggtgtaatctgattttttcgggtattaaagtaatcaaacttgaatttggcccagtgaatcagtctataattttttaaatccatttttttgagtttcaagtcgggttagtgggatttttagtgtaaatgtgacgctttaattagtggggcattgcgaatgattagcatcagtggtgtctaatatcactccaataattagtgatattctataaaaattattatattaaaatataaaatttaacacttaattatataagtaacgatataaacattatgtggtattaagataaatttttctatatttttatattattttaatattatatgttgtaaacttttcaatttattttgagttacaagggaagagaattactttttcaagttcaaatttttttcatataatttgtttggattttttaaatccaattataccagctcattgtgatatgaaattgtgaatgcttttacattagcaaactagtttttattattattatatatatatatatttttgtctaaatcagattactatctagtaaaataaaaatggtggcatacagtaacatatatggactcttgtactcatttttcataaacactttgttagaataaaaagttagttagcagctgttagttaaattcttcttctggtttttctgttttctaaactagttgtaactaacttttctttactctgtaacaaactctgttattgtattcataatat

SEQ ID NO: 219782 - DNA, 5974 bp, Cannabis indica
aatgttgatgatgatgagcttctcacgccactttctattaaagagagttaccaaccatgtgatgagtaaagaatagtaaagcccaattaatttcctcaagcccaatttgaacttcttaaactattattgacatcatattaattgaggcttcccacacagtccaatggatatgatttgggtcaatcttcatttggagttgctatcctctatttcatcttttactaatttatgcattaaatttgaaaattaacataatattagattaaattaaatatttctaaataaaataatttatgcaattaagctcataaaataaataatttaattgtatttattcagccaaataacatataaatatatgtaaattttgcactgtaatcaacccctaatccataagattcaagggatatttatagttgtttgagaattacattaggttttccttttcctctattcgggagtttacggtaaataataccctgagactatctcataaagtccagcccatgaagaaaatgatctgctgactaggcatattagatttggattgatttggtctacactgtgtgtattgattgtggacaattaatctatgaattaattgtataatattcattataggacgtttccccattaatctttatacaatattctgttgtgatctaactgctggaattttttttatttgtgcgaggaataaaaatggaaactggaagagtcttccaggaacatattgtctcatccctccggtctcgtggtaccggacatgcttcccggtactccttaccgagggtcgaaggctttgtgattacaaagctaggataagttcctggaaggacatatccaagtgtgctcgacccactttacctttgctgagggtcccacttatggatgttgggtgttgatctgtagtccatgttggatatgagaaccttcccgtttcttactttcattgtggaaggttgggtcacccttttgataagtgcagcaatttcctggagcttgtagacaatgggattgatcccgatctcccatatggtctttttatgatgggggacaaattgcccaactcgggatatgatagatatagaagggatgtttctaaggcaaatgtgtatccctttctcactagattggctcggaacaccattgtcttatcccttcccactaccactaattgacgaaaccattttactagcgaacttcctcttccctcacccctaaatgaagctgaaaacagccacccaaagaccaccaatcctaaacagaaagaagtagatcctgaacttccttcccattttccctcattttttcaaagtttgtcctactccatgttacctacttctactcaagaccttgatgcaggtacctctgccattcccaatcaccatcttactaagtcacaagggaatttttttactccttatccaccatcagatgtctttgcagcaaagagttctctagttaataatgctccctgtaccgactccattatcacatcacttaaagataaagggaaagatgtaatgatggaggatataactcatggatcgggggttacatgtaagacttttaagagacaagttgattaaaaaaatttgcgtagtgtgcttaaaaggtgtcacaacaaaaatgaagccaatgaacattacttgtcggtctctcctactactatttctgcccagtcggattcgaatgaggacttatccttttcttcagtggaggttgcagattcgcaaccccgcagggagccatgaaaatcataagctggaatgcgagggaattaggcaacccatctgcattcagacatctcaagctgctcgtcaaacagcagaagcctaatttactttttatcatagaatcaaaattatcttgtaatgcaatcaatcgagttcgttcttctcttagatttagtaatggtttggaagttcccagataggggttgaaagggggattaatgttcttatggttggatgaatttgatgtaactttaaattcttattcaatgacccactttgatgttgatgttgatgtttcgtcggattgctgtccaaagtttcattttactgctttttatggtgcactggaatctcatttaagacaccatacttggaatatgctaaggaatttggttacaccagccaccaatgaccattggttgatcatgggggactttaatgaacttctttctaatgatgacaaggatggggttccgttaagacgagagagtctaatggaggattctaggaaaatattggactattgcaacatgtcagctgttcttttcaaatgagataaattcacatggactaataaaaactacaatggtgtgctcattaaggagaggcttgacagaggttttgttaatagagcttggagggatgtttttgttgaatcccacatctctcacttggatttttatagctcagaccaacgagctattgaatatgtagtttctcttccaactcagtcaaaccgtgaggttcatcaccaaagtcaatttagattcgaacagttttggctcaaggaccccgattgtcaagagataatagctacaaactgggctcaatctcaagccgaaaatccaatgtcttttttgctgcaaaatattgcaaattgtaccaatgctctccaaagttggtattcaaataattatggtcaaatgaaaagaaatattatttctacctagaaacattcagcaactttgcataacagtcgagatttatctccttcacatgttgctaatatgattgatgctaaaatttttttgatgacttgttttaaaaagaggaattatattggcagcagtgagcaagaattgattggttgaaaagtggggattctaatactaaattctttcatgctagagcgaagtcaagatacaataataataaaattaaaaccctccttgacagcaatggaagaacccttacttctgaagccgatttggctaatgaagtgtcgagccacttctcttctctatttactgctataggggccgacgatgaagcaattaccacgactttggaagctataactccttcaaatactgttgacatgaatagctttctgctaaaggaatttaccagtttggatgtggaagatgctcttcattccatggctcctgataaatccccaggaattgatggcgtgtccgctatgttttatcaacgacattgggatatatagttgggcctcttgttactcagtgtgtgttgcagattttaaatgatggggtggaccttgatcagattaattcagctttgatcactttaattccaaaagttgaacagtctacgagacttagtgagtatagaccaataagcttatgttcagttctatacaagttagtctcgaaagccattgtaaatatatttaagatagctcccccagcggctatttctcagaatcaaagcgcttttctttggggaaggttaattactgacaatgtccttctagcttttgaattagttcactatctcaagaacaaaaagcaaggtcggtttggttatgcagcgttaaaattggacatgagaaggcttttgatctggttgaatggattttcttggaaaaggttatgtctaagatgggttttgatgccaaatgggttgatcttgttaagcagtgtgtttcatcctcaactctctcttttaacatcaacggggctgtacatggtttggttacacctcaaagaggtcttcaccaagctgatccactatcaccctacctctttttgatttgttcggaaggtctttcagctttactccgtaagcaagaggagttgggtaatcttaagggactttcaatttctaggaatgctccttcggtatcccaccttttatttgtggatgatagcctcctttttttccaagctactgaagcatcttgccaagcgataaatagagttttagatgtgtatcatcgtgcctcagggcaactcctgaatactgaaaaagttgtgatgtccttctccccaaatactagtgcggtggtacaaaatagatttcatagtgttctgggtatgccaattcgcgagctacatgaaaaataccttggcctacgatcttatgcgggtcgtgacaaaaaagaacttttcagcaatattaaagaccgtatttggaaacttatgaattcctggcaagcgaaacttttttccattggagggagaaaaattttgttaaatgcggttgtgcaatccatacctacatatgcaatgagctgttttagtttacctaaaaaattttgccaacaaattgagcctatgatagctaacttttggtggggttcaaacaccaacaaatccaagattcattggaagaaatggagtctcctttgccaatcaaaagcggagggaggtttgggctttcgttctttgaggatcctaattctctcttggctaaggtattaaaagctcgatactttaagcatggtgatttacttactgcatctaaggccactttaccttctcttacttggcaaagtatttgtgataggagagacctcctcgttaagggccttcgctggaaaatcggttttggaaataaggttcggtgtgctacagatccttggttgccaggtactacatcatttctcccgttctcttatagtggggatcgtgagtttactgttgaacattatataactcctgaccgacattgggatcttcctttaactgcgagtcactttggtaatattgatgtggatcgtatccttgctattcctcttagttctaatccaagagaggataaactgtttcggcaccattcggattgtggaatctacaccgtcaagtcggggtatcatttagctgaaagattgggaaaactgaatgattcttctccatctgattcgaatagacaatggtggaacagattatggtccctttccttgccaaagaaggttaaaatttttgtttggcgggtgataaacaatgctctccccactgcgcccaacctccaatatcgcaaaatcagccctacaacagcttgttcactttgtaattatcattgggagtcggttggtcatgctctcttctcttgttcgagaccaagacaggtgtggtcccaagcaaaattcaatcacttgcctctcaatatcaaaaatttacatggtccagatatcttttcttatttaacggctggttgcaataatgttgaactagagaagattctttgccttgtgtggtgtatatggacagagagaaacaaggaattacaccaaacaaagccaaaacaagctaaggtgatctgcacttttgctgaaacatatctccaacgattctataaagctcaagcccatccgatacatgcttctgggtcctcggcttcagttcaacaagatgttccagcaagtccttccaacgctagcctcccaggcccgattcgatggaaaccacctccaccaggtttttataaactaaatgttgatgcatcttttgatagtgatggttcaattatcagtaacggcgctgttataagggatttttttggagatgttatgggtgctttttcaaagccgttgtatggctggtactcagtaaaagaaatggaagcaaatggattgatacacagtctcccctgggctcttgaaaatggactgaacattgattttgtggagaccgattcactcatagttgtaaatgccattaacaagaagtctcctttaaattgtatttctttttatcatgatgtgattgatgatattatcctactttcctagagttgtcgcttctcatgttaagcgtggtgctaatatagcggctcatgacttagctagacatgctcttcgattggataataattgttcttgattgggggaaattccttctccaatccactctattatattgtaatggattctattcattaataataatagttcttttacaaagaaaaaaaaaaaaactatttatgtgggtcactaaatagtgtaactaaagacaaaattgtggtagtgtaaatagatcctaggtaaa

SEQ ID NO: 219783 - DNA, 3066 bp, Cannabis indica
atatggaaataaattaaacatggtgtaatttttcttgccataaagggaaaaatatacttggaacagaaagacaaaaccttcatcagaaaatatatttgcagtggtgttgttggtgtggaatattaattatattcatatataaaaaaaaatatatgtgactatgaggtataaaagtataatgttatataggaattaggataattagaaaggattatgattccaagattttaaaaatctaattaagtaggttgcgttaaagtgccgttgtaattatacactttatatgtatgagtttaataatataaaatatatttataccaatgctacataatgttgcccaccaagaaacttaaaaaaaaatctcatcttccatggggatatggaactattttcaattcaattttggactgacatgaccacttatttgatcatcaaaactattaaggattaaacatataccactaatagcaaattccaatgtagttgatgacacccaagaaaaaataaataaattaaaaggaaaaagaataagaaaactagagaagaaactttttaccatttttaagtgttgaactataattaaaatatatatataaatctatcaatatcttatttatttttattttgttttaattaatttttgtggcagctatagagtctaagaaattgaatagatatgggaagtgttaagaatgattattgcagttaattgatttaataaaggatgaatgagtagttattcaactcatatacaaattcattcttccttttttcttttttgattaaaatgttttcaactcttttcatagatggaaagtttagggtgggaaattctaaaatattttccttttcagtatgtaatacttattaaaaggtcaagatcaggcaaagcctctcacactcaaccacattcatgcaaattacttagtacattttattaaaacattcaactttttcatattccaccgaaaagagtttagacaaaaaaagaaaaaaaagtagtaaaaggaacggtcacgatcatattgcaggtttactcattgcacttacattacaacagttattataattttctaaattaataaaaataaataagattgcaaagtaattagagaaaagagagcttactttgggagaagggtaatcgagttttcgaccataaacgatgtggttctcattctgaatgtccaaacgagtaatattattagtgggagagttgttgttgttgtgtgatgatgatgatgatgatgatgatgacctggacctgagaaacttctcaaaaatagccataagaaggaacatggatatgagaatagcagtggccacaaacccaaacgacaccgcattgacagagttatcaacatgcctccagtactcttctctttctgtgttcaaagcctccatcactgctggtgcttctggagctatggggagcctttcttcacccattaattttaacacttgttaatttctaatgatttatctataattcccaaaaacccaattggcattctctgttgtttatcaaaatttgaggagtgagactgcgagagcatacagtatatgactgcatgaattataatgagtagcaactatatcaacattgggaaattaatacttatatatatatatagttacaaacaatttttccccttaaatttgagcttcgtagtggtactaagaaactacccttacaaaactaaaacaaagtttattttagagagagaagagagaaagagagagagatggctggaggttgaatagaccggttctctattataaaccaaggagagttttgagtgtggggtcacctttgattaatttgcttcttgactagcattggttataaaatcacatacttaattacacaaataacaaaaaaatattaaatatcaataatactttttaacaattgattaaaaattatattaatataaatttacttatatatgtatgtgtcattttttattttcttgaattccatgatggatatgtaaatgaattgaatgattggttaaaaggaaaattcacggccataaattatagctaatgatgataacatgtatattaatttcttcttttacctacgaaaaagcaaccaatacatgtaatagattgtaattaattagatgttatcatcgtgatcatcatattcatacaatacgacctcaaaattttttacagtcaagtttgattaataatgtagctaattttcttcttttattttttgaagggttgtgatgaaattgaattggtgatgaaatgagctgtggattataagtgaacggtcaacgtcgttgtagatgaaccaaattagtgtaattacgtgcacggggtacccgagggaagatactgctcaatttgggtgtgtgggtcagatatatttcaggtcagttcatggtcagaagtgggcccatgggccccgtgcaggtttgggcccatgtgcagcagctcctttacctttcgccttcttttgctccctccctcttcagtcctcctcattcatcaactttctcttcttttcatgtcttttccttttcttttttctttattaaaatattattatgtttttctcttttccttattatacgtaccaatacaatactgttaccacacttcatctcttgataatttactgtttctatgtactaacttgtttaacattttcatttttgagtgcatgggtaaatgggactgctatttataaatttgtttatggttttgacaaaactaaacacaataaaaaattacgcattattttacttattttataacacataattactaacaaactatattgtatacactactttctacccttcttatggaaattatgaagagataatataaggataaacaaatgggctattttcaaaaatatgggaaaaattattaaggttatgataaatatggcataaaaagtaaatgccactaaatatggcattatctaaccaatcaaactaaaaatatgggtttttttcttaaaaaaaaccaatataagacattaaaaagaaatctgaatttaaaattcataaaaaataaaaacttaattaaattaccataaaa

SEQ ID NO: 219784 - DNA, 1601 bp, Cannabis indica
gtaaacacagaatatatatatttatacatatatatatacatatttaatcagtaaattaattatatatatatttaattatttgttttcagtgttggaacatctttataagagaagaagctcattcacatatttggatgcaatttacttcattcaaccaactctaaaaaaagtaactttttttcctcttaaatgtaattattagactaatttattgttgagatatatgttattgataatattctatatatacactgaaattaatcccttagacatggatatttgggactttacagactaaagaaaatcccaaaaagccaaaattggaattttaatacgaggcaattctaatttatatttttctaaggctatgtttaaggttagattttgatattgaaaggaaaatgtagaaagcaaataaagatttaatttttcatgttccataaaaaaatcttatttaaccaatttttctttttctatatacattttccttacataccaaacatgagaaattaacgtttacatttttcttatcttttctttctcgatcaaaatttataacacgatgttaaactcatatacttaatataatttgcagtgtcaacttgctcatatcagacatggatggaaatgaacctttatacaaaaagtaagttcatattacaagaaaatcatttctcatgaatcttaaaaattttattataatttatattatttcaatattgtattgaccttttttatcttatttttttttttttctttttggtatgtagggcatttgtatttttcagttcacctattccaaaagaatatgtttcaagaatcatttccaaggataaacctgtcttatacagtcgaattggtgcaataagagaggttaaaaaaataaaattaaattatatttagtgtacaaaattttcttaccttttcaacatttttttttcaatgatcattaatagagatttcatatggtgaaactagatgaatttggagtacattcctatagatagccaggtatgccaatgttacaattcctattatagaatatgttttctatttgttttcatttatttcttacttttgattaatttctcaaaagggttttgtttaccaacaatgagaggtctttagaagaactttatggaggagatgatgataatgaaacaaatgaaaagatggcatgtttgaatgccatagctactcgaatcgccacagttttcgcttctttgagggtaattataagaatcatctgtctaaaatttcggtattaaaattgctgtctaattataaattattatttttaatattaacatgacatgcacttaacataattgtatgattattattgtgtgctaactttaatttttttttttttttttaaattgtgtaggaatttccttgtgtgcgctaccgagctgcgaagtgtggtggtgatgtaactgaaacaacgaattttcgcgatttaataccaacaaaacttgctgatggtgtgttggattgtcttatgaaatataagaaaacaattcctgataaatttccacaaacagaaacatgtcaattgctaatccttgacagagctatagaccaggtgattttacatgttt

SEQ ID NO: 219785 - DNA, 4090 bp, Cannabis indica
ctcaaactttacgggaagaaagcacatgcctgatcatctatcgatattgcgttatagtaacattagtaatgtaatgtgataagaataatgtaacaaaaactatttcaatacatatttggttacatattgtaaatgttatttaaaagacttgtatgagagagcttactgtaatatcatgtcccctattcatgacagtagcaggagctggtttgtaatctcttttcaatttccctaaattgggaaaaacttgaaccctttgatgaagaagatcaatgggagactgtaattttccattgttacaaattttccaatgtgggtcaatgtgaccccacttctttggtcctttaccacttccttcattgtaagaaaatgggctctcattatctgttacaccataaataaattctcatccacactctttgatattaattatatatgtcaaaatgattgaatgagaatgaccaagtataaaaggtatagacataagaaagtgtaaatatattatatgattctttgtgaaagaaaattgaaataaagacattaggcaaacagaatctttacttttcagacaaaaagcaatgatagtattgcaatgttttggaaacttattaattaaaaaaaggagaatatgtttatttggtagagaaatactaaaagaaatgccatatcacttttaggtcatgtttggtttatggtttgagaattgttaaaatgtattatttctgttaagcacttttctccgtgttatatgtaattaagtattggatcttatgtaacttaaaataaatatttttttgaagaatatcgttaactaatcataaggcgttacctacaaaaaatattgggtactactggtgaccaataacaatgctcttattataatagtaatagaattatgattactattacattgtttggtttgcaatactattacgattcttattaccattcttatctcattatattactattaccactacattccaccaaaccaaaaggtcttatataatttaatttaataattattatataatatcattaatcatttataaaatatcatatcaacactatattagtggtggcttgtaacaatgttttcattttgtatatgtgttttgagtaatgctagacacatctaggtacatgtatataatgtgtgtaatttaagtgtgtcacaattattattcaacagatttaaaaaaataaattagtactttatgttcttaacattgcttatcttgataccatgtattgcaatttacaatttataaaagaaaagaagctaatactttatttttttctcaagcaacactcacaaaagaatcgctaaattgtcattgtaaaactactagctcagactaacatgtaattggcaaactaaataagatttgattttcttaacaagttgttcactcattcgaaaaatatgcttagctaattcatgtgtagctataataaccgtccgacaaatataaattatggacactcttaaaaatgagcattgttattgggcactagtggtgcctagcacccttaagacgtgtcgttttacgattgactatcgatactccctaaaagctattatattaaattatatgagacccaataccaaattatagcgatattgacacgtagaagggtgcttgacaccattggtacctttagcatttctccttaaaaatctagataacaagcttgttacaacatttaacaataatccaaagtcatctttatctattgattgacttgtaaaaatatttaatatttccagttcaaactagaacatattgatcaacaaataattatgtataagaaatcgttacatctcattgaaatatattgtttctagtgatccttttttctgaaaagattttaatcattaataacaattaagcataaattacataaaaacataaattaataagtatgaatactaagaaaagaaaaatatgaaaaggtgttaatcccatccaaatgtatgatttctattttcagaatcacaataaaatagagtcaaaacacttatataataaaaaagaaaacaaaaattaaatggaaattaaaaaaaaaaaaagatgaagagaaagaaccataaagcttcaaactttaagcactaatctgaaagaaaactaaccaatttcaggctcagtagctctgcaaatgatgaaatggggttgaatggaaaagagaataagaggaactgtactgaggaagatgaagctcaagaagcccatttcttaattagtcaagtttaagaaaagagaatagaagagaagtgttagtagtactagtaatatacatatatttatagataactctcttcatccaattcatataataaaaaagagaattgttaaaaagtaccacagctacttaacaccctcctcgatgtcatgtattattggtgtcaagtattttttttggtatcgtactgttattagtgtaattaagtactgaacctatataactttaaaaaatagcttttagaaaatattgataaccaattgtagggtgtcacctatagaaggtgggcaccactggtgttcaatagcaatatttgtgtaattaagtatcgggtctcatataatttaaaaaaatagttttaggaatatcactaacaattgtgaaataccacttatagaaagtgttgagtaccattagtgtcccctaacaactattaataaaaaaaccttggtcatttatttgtgatgtttcgtttaaaaggtttatttctttggctttaattactaaatatgttacttgaggcaacatattaatttattttcctaattaaagacagatataataacatgttcacttaaaattaattgtatggtattaattgttatttatttgtgtgaaaatattattttggataatgtattttgtaaaagatataaattagattatttattttgttaaataagaaattaaacattgtattttttttaaaatggtataaaatagtatcatgaactaattttttttttatcaaactaagccttaataataagctgatatagatgtattaagataagactagttatattttctgcatctattcatactatattataaaaaatattcgaaaattgaattagggtactattttgtactattttaaaaaaatatattgccttatttttttatttagttgaaatagggtttgatcgataacttttgtaaaatacaaccaaaatggtattaagagtttacaaaatctatatctatatatttgtataaaattaagtcatgaggcgataatatgacagtctaaaattacttcaaatacatttatctcttttcttattaattctctcctttatttaatttttattcaaaaaaaattatattatatatacatatataatatagccgaaagtgtatacttataaataattttttttaatatatatacataattattcattgttgagttttttttatttttttaatatatataaaaatcattaattgattattaattttaggagttattgattttttggttttgaatataaattaaaactattaaaatttaatcgagtatccttaatacacatataagaatgtggtctatttcattatagatatagtttagtaatttcacatatctccttataaagagggagtcccaaattcaaatctcgttactcctccccattataaaaattcctcccaattataaaaaaatgcggaaaaaataatagctttatgtgctttaatcaatctctacgtatactatgaatctttttaagcttcctaaaaattttgtgaataacatccatatgtgtcctcatttctggtagggtaattctgatattcagagaaatatgcattgatgcactgagaacacctttgttggcaaaatgcattgatgtacacgggtcgagttttcgggttttcggatagtcgggttcgggttttcgaacttcgagtgtttaaaatgtgtaaccgaactcgatttttgagcggtcgggtcccacgggtttagagtcgggtatgacgggtttactgcggtcgggttcggattaacacccgaatcaatatttacataaaaaaaaattatagtgtacagtttaaatttctg

SEQ ID NO: 219786 - DNA, 9578 bp, Cannabis indica
tattaaaaaaattagaaagaattaaggagaaataagaaaaaaaaaaaaaaatttaaggagagattttagactgtcacgtcaacgcctcatacttcttctttatatatatatatagatcctgacattaaaccatatgatggatcgctctaacttttttttttcaaaaaactaaatttctcgttttcgtgtcaaatttttattaactattttcaattattttacttattattaatgcctattaacattaatatttacattaattttgtaatgtttggcattctttataaaaatataactaaaacaataaataataataacaattaatgtgttcaataattaatcatatatatatatttagggtttgaatattttgtatggtttccaaatacaagacaagtattgattattaaaaagtacaaagtaccaaaattaaatttcgataaaacacatcatactgtatacaattttaatagaataaataaaaactatgtttaaaacgatccaaccattaaacagtgttgttaattaagaattgtatgctataatttagatcttatcactcattgatttaaaaatatagcaacctaaaaagattacaacagtgcgaagcgcggattagttacctagtatacaatgttctaaattttagtaagactaattaataaaaagaaatgtcacgacaagtgttggcacggaaattggctttaaacgattagtttgtattgaatgctcttacatatttctataaagatatattagaaacttggggtgcatcaaataccccatagtgtataaattgctcataccgcattgtactacattacactaaaatgtgtggactagaacctttaaggtgcaattacgaattaacttttttccaaactgtgtggtgcgatgtgatttgtgatttaaatttcataaatgtagttcaaaccacatcgcacccttgaataaattctaattttttatataatttatacatgtattgactcttaataaagtttggtcgtccttagatatataaataaagagaatttaaaattttatgcttcaaagagggtcaaataacaaaatttacccactattagaccccattataatattatgctaatctttcttcttttttcaaaaacacccctctcatttcaaacttccctaattttgtcaatgcatctcttaccctcgagtactcaataattatgttgtattttttattttcaattgaaactatctaaaaccatcaagtactatagagcaccatcgagcattgattgaaaattcatctctaacctcaagaacatgcttatatcaagtatctattgagtaaccatcaaacctatcgagtttgtacaagtagaaagcaacaaaaaatagaaagacacgggaaaaaaaatatatccaaatgttttgaaaaaaaaaatcaatgcaaaagattaaaaaaaaaaaggcatatatatgttattaaacaccattaaacatgtgaaaacgaacattaatcaataaatgttagagaaagttatatgtccataaaagcttctctctaagcacccaaaaatgataaaatggcgaagggaatgaaggtggccaaggtcaactatcgttcaaggtgattcgatgtgggtttaaaataaaaaagttgcaagagagaaagagaaagattggctttatatctctcaattgaaatgttgggatgaacatttaccttgtacacctattttcatgaaatgggttttacttccttcggattcgacaccagctcccaagtctgattcttctttagagaaattatctcttatttcatatcttcaagccactttgagttctagtacacatcttcatatgactcaggctctctgaacttctcttcttcagctataacaatattagcatatttggcttatgttctctagttgatctctaatattttgaacttactattcttggttggtcatcattttcattgtcttttcctatatgatgtactccagattttctggaattttgttgtcgtcttcactttgttcttctttatctgttattggagttaaatgcaacttaacaatttgctcccccatcttcttctgcaaattgtcttctatttcttacgaatctagaaattcttcttcttgtgtaccatgaagaagcttcatcaaatatcacattttttgacgtataacagttttctattgtagggtcataatatttctacgctttctactagttgttgtatcccacaagatacattatatcgcttttttgtctaaattttctatgtagatggcttggcacatacagagcacgcacaatcaaacacttttacttcccccatagtttctcaaagggtgaaacaaatcataactttgtttggggaagtctattgatcacatgagttattatcttcataccttcagtccaaaatctctaaagacagctctttatgtgtagcatgctacaacgtatatctacaatgtgtcaattctttctatcgaccactctattctattgtggcgtattttcacatgtaaattgatagcttatgaagaattctcgtaagtactcaaaaatccatctaaggtctcgctaattttgtttgtccaaaggcatttgatttcttgttgacttctccctctgctatttctttgagctctttcaatttttaaaaagttttaaatttttctttgtttacccaaaaagttagcttgatgatatcgaagctatttttgacatgtggcacgatggaaataatcccaagacccggcatcccaggatatcacgataaagtcatttctaagtgatatccttcaacaagtaggtcacaatgatcctaaagagattaaccatgaagttgaggatgtcacctggacatcccggagctcaagaagatggaaattcgtgctctggctcgcattagtttggactcccaaaaaagtcctatgttcaatatgcttagccattgcactagaatacatgagagacatgccccatctaagtttcaaacgtttgagataagtcgtgacaaaaccccacctggagacaccatttaacaccctactagtttaggtgtgttatcgtgtttttaacttaattgtgcagctcgttgctaatcaacgagtttattgaaaattgtgaatatttaaaacttaatttaattacttataaatatcaaaataataacatatatacaaaaatggaatcccgtttacaaaatatttacaaaagtttcatagtgcatagtgcaaaagttatcgcctagcgactatacaaaatatgcttagctgtcccaaagaccgtacgctccaggcctaactgccccgacatgtacaatcttcatttgcttgctctcacggttgctcaaccctacccttgctcttacctacacatgcaagaaataacagtgagccaacagactcagtacgaaaagcataatcataaaatagatataacttggattataatcatgtgcccatacacccaactataaccatatctatgtgtccgacacgatattgagtcaacaacgttcaaacggcagtactatagaccataatatcagcctatacacggtacactagtcatactcaagtcataccgatgtgatattgtaaagtagtacagtgctattgaccataatatcaacttatactcagtacgctagtcatactctagtcataccaatgtgatactgtcaaatagtacttaagccaacatacattcatcgatatttaatataatactaaatatattgatatcgctattctaatgtaatctaacaagcttaacaaacatgtacgctaaacatgtaagcacatatgcatatcattatactaatcttacctcgtttctcaagtgtgctggccaacctgagtggaacagttgctcgatgatttacaggcccctaaatcacattttgtaaaactgatgagtgacccgctaaatcactttttggggacttaaacttgaaaataaaagtttccctatcgatggataacatggcaataacctaaatattgcaaaaaggggaaaaactagagttccctaaaatgtcacaatcggtagactggttccctaaccagaattctagttctgaggggtttcctggggaccaaccggaattctggttcctacaggtccatctgaactagaattctggttcagtgcatgaaacactcaaaaccctctacacacctaaattcaaacccaaaccttacaataacttccagaatacctaattacattataacaaagagaattcatgcaataaaaccagccataacaacaaaaaatgaaatccaccatgtgagagcaaagtttgagctcttaagctcaaactttgaacaaacctcacaagcagccaccaaatcaattcaatctaacctaaatcaactcaaattaatttcaaaagtaaactataacctcaaccataccacagaactctaattctagaaatcatacaagaattcaactaaaaacataaaataaacaaagaggagaaggtatatcttggattggaacactaagaacttgctaataatccttgagttgtgctgaaaaattcccaaaccctagctggttctagggagctcgagagaaagagagagagtggagagagaaagaatgttttcttgatttttttcttttctgatttgtaaaatattaaaaatctaaacattatctaataaaatgtagcataataacagatttcaaacttaggttagtctcacaaaaagacaaagaatcaaatggtcaaaaagaccattttaccctcacttatgccaaaaagtgtctaagtcacctaggggtaacttggtcattctcaaaaccctgactattcccgatattcctaatgcctatctaagttgccccgctactacaaaaaatataaatatgattctattggccaaacatcgcgttccaatattattgggcacaaaatatgaaaaatgtaaaatttcatatatagcataaataatacaccttgaattcaaataaatctccatataatcataaaccataattaataatctagtttcataattaagccttaattatctgctaattctaaattaaaactaagcggtctttacacaccaggtgcacactaggcaccttggttgacattcagtcagcttgggcaacacatgactagggtttatgttttcgagaacttctttggaccctaattcctaaaatccaacaaggaacaacacctagacatgagttgcatcaatgatatctgaaggagtacttcccaaatcatgggctcaagttgacattgtgacctaggcacggattctactccaccgagtaatatgttgaagaggggatagctcgaataaaaatattttgtcaccaaaattccgtctcccctctgtcccaataatgagcaaatgacacctgtttaatttttttaaaactcacgtgaaactttaaagcatattctaatagttctgtttctatacttttcttctgtttccgtaattataatttcacttttttttctattttcttttaaggctatcgtttaaaaagaaaaaaaaatgagatactaagtaaatgggcggctgtattgctcagaagaggtcccatcacaaatttttaatgacaactcaataaatttaagagtactttttgtaattttttattattatcttttacaattttatagttaggagaaactaaatgtagaaaagtctttgattcaaaaaaaaatgtagaaaagtcttctttataaacattaagtataatataataatgcataatttcatcaaaatttataatgcataacataaataattatttaaaaaaataataataaaaaaataagagagaaacattattaaaaattcaaaaattcaattcagttaaaaagtgataaatgttattcaaataaaaatatttataataaaaaaaatcactattactatagtacatcggcatcacttgatattttgttggtttctctgtttaaatccaaatttgaagacacttgacaagataaacatttaatttagctatatatttccactaaaaaaaagaatacaattacatcactaacatataattcttagtttcatacttggccaaaattaaagtatgaggtgagtaatgtcttttcaattgatgcatcattactatttgtatgatgtgaataatttttagacgacatctgcataaaaaaatatataagaataatatatatattaaagtaaattatatatacatacttatattcctacctctttggctccagaatgtttttgagaattcttcgtctttctcttaatcttttcaagagcattttttggtctccgggatgttccactaaatttttcttattttttacaccttttaatttgctatcaattgagttgctcgcatcattcttgcaaatttcaatagagtcttcaccttgtaagcatgcatcaatttcttccaaagctcttttaaaattttgtattgcaatctcataaactttgtttgttaatgatcctcttgttgcaatttgagtactaattctactctattcttggtaacgtcttgccatggatgtttttggatcatcaagaggtgtacttttgtatgtcgaagttattgttcccattttagcatactttatccatcttttcaaaatatactaagaaggaatttttccaatattgcgagaagaaagaactttaagaacatgtgagcacaatattcctgcaaactcaaacttcttgcaactgcatgaaactgtgtcatttgatgaatcatatttgacagtatgatgaaaacgtttaccattaggagtcaacttgcatgttgtttttgtctcatgctcaagacgaatttccataacacaattgtatgcttttgaaaattcaaattgaaacattttcaaaattgctggggtgtatatagaagcatcatgatttagaatttcaattggaagagatggtggtaacttacattgagttgctctaaaatctacttttacttcttcgtatcgacgattatcaactaacctttcaaaattttgtaagaatcgcaacatattatgctgatagctaacataatgcttcagaacattattcatactttcactccgttgagtagtagtcatgtttgtacaaaaaatatctctaccatagaccaaagcccatttctctcttagtttgaatgtcctcaccagccaatctttatctttgacattatatctttcaagcaccatgtttcatgcttcgatgaattcttcttcctcgtattcatatatacaatctccaaaatcttttgagaattgacaaaaattttgaaaaacattactaaggtgttttgctgcattttgatacatatgccaaatacaaagacgatgataagtttctggccattgagaagctaatgcctttgccattgctgcattttgatctgtaagaattggttttggcatttttcccaacattgctgttgaaaatgtatcaaataaccatataaaagtttcacatgtttcgtcatataatgatgctcctccaaacaaagtggtttgtttatgatggttaactccaacaaacatagcgaagggcctgcattcatgattttttctgtaagttgtatcaaaacaaataacatcaccaaaatgtgaataagtttctttcatttttgcatcagcccaaaaaatattagtcagcaaatcatctgtgtctgcttgaagggcataaaaaaattagaatcttcagatttcatgtgttgaagatattcaagaatgccacctgtgtctccagctctcatttgaattgttcttttagtacgtatataattccgacaatcatcaagaataaatccaagattctcacgtccaccagctgtcctagccattagttctagactagctttaggagtaattccagaactctcagccaattcaatttcaacaacttgggcagcagacagtctcctttgggatcgatgcaaatgactctttataggacttgaagtaacatgattatgctctgctataaattcaacaacttgatattttcctatttgacggcaatttattttcatctttgctaagcatccaaatcttgtttcagcacgatgacatttcacgttaacatttcgcttatcatttccacgtgtaccttcacatgaacaacaaaaagttctatccatcatttttccattttcacctttatgccctttacttcttcgaatgctaaatcctacattgtaagcataagtattatagaaattatatgcttcttcttatgtatcaaattccatactaacctttggtatcatttcactgcgaatatttgcatgatttatttgaactattttctcactttgaactgtggtttcaacatctttgtcatcatcctgtaatacttcatcaaagcttgaaatatagttttcatcattattttgtaactctaatcttcgaggcgagagaaaatctccatctaacatattactttccatatctatcatcaataattaaattgaaacatttaaaaaataaaattcaaaataccttattaaagtacttgaacataaataatattttttattattattattattatatttatgtaaggttatattcatctaaaaaagattgtgtgaatgggaaaaaaaattgagaaattgtaaatttctatcttaatagtttatatataatcatataaaaatataataccagttaagaaattttttgaactttacagtacaataaaaatgaatttaaacaaaaataataatatagcagactattaaaacttatcttaataacacaatatttaggttaatcagtccatcttcaattcaatcatgttgtaaaaaatttcatcatcttattttatctaatcgtactaatcacatccaacaagcattatctatcttttaaataataaataataatagtaatgactaaattttaagtagactaaaatgatgagtaagaataaaacaaagtatgctcactagtcccttcaaagatgctttcagagattgcttttttaaattgttgtacacacctttcttcaattcaaatttttttaggtttttcaattgactacgaaatatcaatgtgagcaaatgagcaaatgacaatatatattaatattttattctattaaaagaaacggaacggaattagaaagaaacggaactgttagttatatcggaaatggaaggtatcaagtgagttttaaaaaaattgaagagatgtcattacctcattattggaatagaggagagacataatattagtgacagaagattttcattcggatagctccacattgtgctcctctccaatctttaatttgcattgttttgttggtgattcttggattcaaatggctcacatatgggaggtatttgtgtattatattggatgttctaaataaagtgttgatcttggatttaatgattatgaacaatgatgattaatatttaatgtgtgtttgaatagctcataatctatgtgatagtttaacatagaatagaataaatatagaacactattaaattttaaataaacataaattattgtatccacaacaaaataaatatttgctaataaaataaaaaaaaaaaaa

SEQ ID NO: 219787 - DNA, 1209 bp, Cannabis indica
aacatatcatcctgattgtgtgtaaaaaaggaagtattacaccaaattcaaattattttctcacatgcgtttaacttgttaaacttgttattgaggccactaagaaatcatatcaaaatacattgtaatcaatcttttaaagcaaatatagttcattgtagaatttaatcaaacagtacataagcaaaaccaaaaaaaaaataagtaaaaatatctaacacttagatagagatcaaatctttctacataaacaccatatcaaaaataatccgcgataatattataagctctgctgcaaaacatcaaaataaaatggataatcatcctatatatgtaaaatataatcaaaatgcgttatgcgttatgccaacaactaattatagaatcaatatacatattaggcaaattgtattgatgaggtttaaccaaacacaaaagcacaatcttcaagtatttatatgaatcattctttactatccaaaaaaaaaaaatctccactaaatgctcatgaaataagcatatataataaaaagtttaataaaaaaaaataacacccactacttatcgatcatggtatcttcatgtaatattacttctcaaatcttaaataatgcttggaaaggaaaacacagaaggcctcaaaatgtgacaagaaaaattccaacctgatataaaacaataaagagaaataaaagaaaagtaacagcacaatcaaatatattttaattacaaaaagtggattttagattttgagtacatacctgagacaaaagaaatctgaaaaatcaatttaatgaattttgaagaagaagaggaacagtgaagggaagagaaagtgagcaatgaggctaattagttttgaaaatgataaaataggatttgcttctcactctcactgtcatgggatttcacaatccaatcatcaactgtcacgtgttatagattaagtttttttttttaatggtaaaataaaattaggatcaacattttgctcacacaaacttcattttaaaccttctttaaatttattgggtaagaaactgtttcttcttacctacccttaaaaacaagacacatctttttatatttttttggcatttgtatttcataaatcagaaagtttttgtcaagaattgttttcaaaaatcaataaggaaagttgggactttgaggataatcaaatatcataatctcaatcacaaatgatat

SEQ ID NO: 219788 - DNA, 1887 bp, Cannabis indica
aattttgagtttgtgtctgaaattagcaaacttcagaccaaattgccttagttagtccatatgccaaatgatcataggttgacacatgcttgatctgaaccgttttgttgagtacctttcctctaacgaagtacaaatcaagttcgatgtgttttgttcttgcatgtagaattggattctgtgtaagcatgattatactcaagttgtcacaccaaatgataagggattgagatagttgaagcctaagttcagagaataagtagtgcagccaagttaactctgcaatgatattggcaacactcctatattcagcttcagtactcgatcgtgagatggtttgttgctttttacttttccaagccatcagattggagccaaagaagatagcaaggcctgttgttgatcgtctatcatcgagatgaaatgcccaatctgcatcacaataagccacaagatcaaagagtttagattttttacaagtgatgaccaaactctgaattgccatttatatatctaagaattcgtttgacaaccaatcaatgagagctcaaaggtttttgcataaactgacaaaccttattgacaataattgataatatggtcatgtgatggtaaaatattgtaatgttcaaatgattgatcgatataattgaacatcatctagtggttctccctgttgagctaacaaacgaatgaaactagtcattgtagtaggagatggtttagcatcaaccattttagctttcattagaatatctctggcatatttagcttgagaaagatgaatcccagagtcagtgtatttcacctcaattcctaaaaagtagctcagaggctcgagatctttgagagcaaatagatcattgagagctgagatgatatttgttactgtagtttgatcattccctattattataatatgagcaacatacaccaaaattagagtaaaataattggatgaatgttgaataaagagagaatgaccagacttagaagaagtaaatccaagagtgtacaagttgttctgaagtttttcaaatcatgctctaggagcttgcttaagccgatagagtgcattttcatatcaaatttatttttccaggggcttcaaaacttgaaggttggaccatgtaaacctcttcttgcaattgcccattgagaaaagcattattaacatcaagctgtcgtatgagctaacattttgacaaagtgagtgtcaaaactactctaattgtgattggtttaatcactggactgaaagtcttagtaaagttaaatctaagttcttaatgaaatccctttgcaacaagccttactttgtgtttgtgaatagttccaactagattttctttaatcctatacacccacttgcaaccaataacctttcttcctatagggagtttgacgagagtataggtttttttttttttttctaaccaaggctagaacttcatcgctcatagctttattccaaacaatttggttaagagcctctttaagagacgatggttccctagtagccaaaaaagctttggtttgtgtatgccaaattttgatctagtgtgcatgtggtgtttgttacactggtctgaggctgtttgacaccttgtgactgcaataattggagattttgagatagcaacacttgtagggatagtgttagcagtagcatcaacatgaagagaatgatcgatggcagcatctgcaacaacagggtgattagtagcagtatctgtagcaccgtagtgattactagcaggttcagatgcttgaggtaagtaagcttcttgtgaactaagagacaagtcaaatatacttgtagaatcaaaactgcatggtactaatggtgaggtgtgctgagaatcaagtaggggtgttcatccaatc

SEQ ID NO: 219789 - DNA, 1625 bp, Cannabis indica
ctcggaagtccccatgcgaccagcaactctcacgacaaacttgaggggaaaattttatcctaattttcacacaatgtgacgtggcactcagtaatgtagcacgtgtcaagtatgtacacaacaagatgtggtatattcacttagggttctgtctttagagataaaccgagcgaattccatgccttgtatttctccaagagaagtgaatgtgccaaaccgagttccattctccgtgtagaggcatgcgataactgaaaatcttttaagatattttctttaaatatctccttgaaagtagcttaattagaatccctacttttatgggatttagtttattgagataatcgtaagatatggtatttgatttccgaaaattttctactatattcatattacattacctcttgtatatttcctataaatagtagaatcattcctttgtggaggggatcatttttctaactttctaagaggtcttacgctgctaaaatattaataagatttctcgagaatattaagaatatctcacgtggccggatcttgtgatcttaattattctctaaataaataaaaatgataccattatcatgggattcaacctctataaattcattgtgttcttattgctttattattatctaattagtaattgatctttcaattttattactttaacgactcatcgtcgttggctaaaagtgagatcaacaaaagtcatttatattattagaaaaagagtgtatttgttgtgtagagaagagattaatgttcgtctcttcctatgtgtttatgtattttgtattatttgagtctgtaatcaagtctacaaagaagaagaacaacagtgcaaccttcggaagaaggttcttcaagcttttgggagatagcttttcaagtcttgccttgagaggaagcaagcactcttcaaagaagatcgaaaagagttcaagcacttgaagttttagcaagattcgtttgagaatgtggaatacatcaagcttgtggcatataataagatagagtctatttatgtataagtcaattactttgtatttttgagacctatctaatgaatttatctctgggcgtggcaccgtggactagtaacaatctacaaggattgttgataccatgtataaaaatcttatgtgtttttatcttgtctgcaatgtttattttctgttaaattttccatttacataattgtattctgtagctatagaataactatttcattatcaatattcttattttgcagttaattaaattaattaataaattagtaattttaaaacacaaaatttcattgtacaaattacaaagtgtggaaaaaatatgattaaaattttcaaatcacgtcccctgaactttttaggtctttaaaaatttctcctaaactattgagattgttgaatttaatgatttttgtttgatttcatttaattttgctaatgtgacgattgtctatatattaaattgtgtccctaaactttgatatctatcaaatcatctcttcttaactttaacatgaattaaattgtgctctccaaaatttttatttatgttggactttctttaataaaatttgacaaaaatccttaaatttaacaattttaataattcaa

SEQ ID NO: 219790 - DNA, 7013 bp, Cannabis indica
atagtatagtgtcataagtacaaaggaactaaaaaagctaattattctttatttatttatttattagaaggggttattggcatgcatggtaccgatttctccattgttgctactctttcaacccaagccctaaatctcaatcctctcaagttcaaattcaatgtctagctgttacagttcacaatccaaagatggatttcaacttatggataacaatggcatcaagaaaaggcttaaatcatcatcatcatcatcatcatcatcaatggtgggttgtgatgacagaatttcgaaacttcctgattcaatgatctttcacattctatcgtttctcccaactgaagaaatggttcggacatgccttctttctaagcgttggaagctcatctggtattcagttccaacactctttttctccaatactactgccgatgaaattggcttagaaaagttttggaattatgtcgaaaattttttggaacaccgcaagaaaggtacgtactttatgggcgattcagatgtaactagttttaagcttatgattaagagtggtttctttcgaagaattaaggctggtttactagataaatggttaggttttgcagttgagaataaggttaaggaaatgtatctatccataggccaagagaattttgaagaaagtaatagctattgcttacctaaaatactagacaatgcaagatatttgactattttggagttggatagggtaaagttggactcttctcattcatttacctttccatacttaaagactttgtcattggaaagaattcatcaatctgatacttcaaaagatgatgtggtgtttaagtttttgttgggttgttcttgtcttgagaaattgcggttacatagatataaattcttgaacattgatggtaagctcccattgcaaagtttaagcctcaagttcttggaagtgaaagattcagcaaatgttgatggcttaaaagttgaagccataaatcttgaatctttggtaataactggaacttctgtgtacaatatgattcactctgcttgtaagaaaattagaaatctgtcattagatgatactagttatgatttcgagcttttattacgtactcttattgataataatccacttcttgagaatttgactttgagcacttgctatacatatgactttcttttcaaaatctcgggtgaacacttgaaaagtttcaattttaagaatcgttgcttatttgagagcaagattacaattgaatcaactccgaaattagcatatttttgttacgaaggtactatcgatctaagcctatcaatagagccgtctaattccttgagtggaaaaattgtgatacatgaggggggccattatgtattttgtggctatgatgcagcttggtttactgatatgttgaattttcttttgaatctcaattgctcttggaatattgtaagcctacatgctagtagatgtcaggtactcatattatgttttatttttatttgattttatggccttatttcaatgttgtatgtattattaagcgatttactatctctgaagtgacacgttttaatgatttcatgaaggctctcatttggcccgaaaatttgaagagggtatgtcgttcgccattgctcaattggaagcatctcagagttattactaaagatagtgatcctgaaagaatatcagatttgaaggactcgatgatgtggatttcaccatccttagaaacattgtctattaacaaaatgcagatattttagttgctttaaaatattgtaactgctgaatataagttaaagtcttttattagttttggaaaatggtagtgtagtcttttattttagtagtagctttgtactagtgagatgaacttgactactttactttgcataagaatgaaaatatttctctcttatattctaatgtgaccttgttgatattgttctgcttattaataatataaacatatcaacctaagaatttattagctaatattccaaatgaaaacttcaaacttcatgagcaacctaagaactggtcttggaatatattaaggctgcaatatttttcagtttttggttattataatctatgatgagttatttttcaattgtctcttcttgcttctgtaaggtacttcaggagatgtcttctgatgattatgaattgtgctgagatccttccttctctgctgagcccttatcatgagaattcatacaaccaatcgaagcagctcgccaagtaaattttgagacattctgtttatttttttcaaagctgcaattatcattggtattgtttctctggataggatgagtttatgccagaaatattcagacctggatgaatggctcttggatcccaagttagtgtgtgctattcaaaaacaataatgtgatacttggaccttttcttgattaagaataatataataatattattataagccatttttgtaagtattacttcttctgtggcttttttttttttttttgaacaaatgaaagtatttcctttaatatatgacaagatatagacattgattttgtaaagtaaaaaacaaatgatggattgaattctagaatagcagctatttgtttctgttctcttatttgttcttttgtaatacaatggtttaaactaaaaattaatatagtttttggcaagagaagatttgattgactgatctgtactaaaacaaaatttaatgtctcaactagcaactggtcaagtgtggatggctaattttaaatgtgaattatagatattatagacatattcaatcagctggattgaatcatagcttatgacagaaaatttattgtttttggcaagaaagatttgattgactgacctgtactcagatgtttgtttgtagcattaacagtaagatttctattgggtttgttttgttatgttaaattatggtttattttgtttcttgggatattgtattgagataaaaagtgtattgagctcgagtttgagtaagattgagatagtgattccaaaactggatgtggaccaagaaatcataatccactgtacgtgtttttcgattttcttactaagcttctttgattaaattcttctgtttcattagaattcatattacatgatcttgagcatagaaaccgagttttccttattgacttttacagcttagaacatagagagctataaagattgttatttcttcaccttgccataatacaccatcaaaattccagttagtttgaagctttgtggctaactgaacttgaaagttactttaccgctctttcgggactcagttgccaactccacagaaatacattttcctttccaccatcaggaagtgtatattggcaacgttgaaagtgggtgatgcaaacactcattttctgtttttgtttttgtttttgtttttttattccgactctgatatctaatacaccatcaaagtccaagtttgagtttggagctgttttgtggctaaccgaacctgaaagttttgagtaatttttcttgactcttggggcggttcaacaatgttcttgacgattgcaatggtgtcattcttctaaatttggaaaactcaaataaccctcagtaaatgcataccatgagaaagttacagtgataagcaaccagattaaattagactttagtcttagttgttaacctctgctagttcctgctggaacttggactggtgtagagcagtgggtgaagccgagtataggtatggtcaagatcaatgttgacggagctttgtttgtagcagaacgtgcctatggagctggtattgtggcccgtaatactgatggccatcttgtcgaagcttttgctatttatcggtatggtgaggtgcaaccatttgtggccgaagttatgagcttaaaggaagctttgagttgggttaagttaaagtattgaagcaatgtcattcttgagacggatagtcttgtcacaatccagtcactttctagctcagttcagttaaaatattgcaaacggttattaatttcttttgttaatgttcattgttcttttgtgtgtcaatctgcgaacagaactgctcatttctttgcttggagctctcgctctttgccaggtcttcgttttactgttaataatgttccgtcattgttacaggatattgtaatagctgatttagttggttgaataaagattattttcttttcaaaaaaataaaattaaaagttagatgtattagttttagaggctgatgtgacaattattttaaggcaccgcaaaatatataaggggagggagtctcttaaaaaggtaaggagaaaattagtaagagttgagactcgttgcggagagctccaaccctctcgaacaaattggaatacgagagaacaagcctctccaaagtttgtgatttgtaattttgtccaataattcaataaagtttttgtaagaatattagctattgtaattacaatttacaagggttaagaagaacttatcatacaattaaggatgcatacggggttggaaattaacgggaagtgctttcctgttttcatctccattaagaattttaattctcatttccgtttatttcccatcaggtatggggcagagaatctcctaatgggagcgcggcggagaatcccctaataaaaatataaagtttataataaagatattaaactacgtaaaattaaaatattatatattaattattatttaataaactaattattatttaaaacacaatttaaaattcataaatcttttttgaataaaaatgtaacttcattactttaaatcatccaaaaccaacaaagaaattacaaaaggtaaagtaaaactattaaacgtacgatcagcctcaagaagagaggatcgcgccaaacaatgcgctaccccattcgcagatcgcttcacaaaactaagagagatgttaccaatctcggcacagaaagccttagagaccatatttttattacattgaatattagaaataacccttaaacaattcgattccaaaattacaccattccatccattggtcttgatccaactcaaggcttctttgattccaatagcctcaacttcatgtggctgaagcgaacccattttcaacaaagtaacagcctgaatgaccaaacccgcaacatctcgagccaccaatcccaccccaaaacgaccctccaaagcaaaaagcgcgccgtcgacattaactttaatgctaggaaagtttgggggacaccatttctccggccaaccattgtgaagctctgtatgagactctgactcgaaccgctgtgcattgcaccagtccgagtaattcacttttgccatgtgaattacctcatcaaaagaaggagaaatcgaattccacaccacctcattacgaaccttccacaacgcccaaagagtcattgccgcctccacacaaacaacctcactccaccttgagaacccttcttcaaaccagctaccaaaggtcattgcagcaggagccacaatcggaacacaggtctgctgccagcagcttttagcaaagctacaacgcaccaataggtgcagtgccatttctggtgcagcagaacacaaagggcagcttgtatcaatttgcacatgttttgtggacagcataaacttggttggaagacaattggagcacacacgccataaaaagttaaggactttagggggcagatttaatgtccataacttcttccacagatcagaagaaaaaatatgaataggctgtccactttgcccatgttgcaatctataagcactcttcacagtaaacatacctttgctatctttcaaccaaaaccaatcgtcatgtgcgcttgcctcagataaaggaatcttccaaacaagcgcttgatctctatcatttaagacatcagaaataacctcactatcccattctattttgtcaactttcatcagtgagttgaccattctcccttcaagactcgggtggtcagtttctataaaaggattagcctcatccataagccaaggttcatgaaggatagcaatatttgacccattcccaaccagccttctcgctcccgctcgcaccaatgcttgggattccaatacactacgtcaaatgtaacttggattgcttccaatagtagcagtaaggaaagtaccattgggatagtatctagctttgaagatcttggaagctaaattatcccctcccactagtaaccgccaaccttgttttgctaataacgaaagattgaaatcacgaaagtcccgaaatcccatcccaccatcgaacttatgagaagcaagtttatcccaactcaaccaatgtattccgttggagttattagacttccaccaaaatctactaatagcactttccacctgttggcaaattcccaaagggagtaagaacatattcatagtatacgccggcaaagcttgaacaaccactttgattaggatttccttgccagctcttgagagaaatttattatcccaagtctgaatcctcttttgcaccttgtccaccacataactgaacgctgcaatcttatttctgccaatagagctagggagcccaagatatttgctattttcctcagcctctctaattctcagccgttgaaaaatagcttgcctcattcgactattcgtattagtactgaaaaaaaacagaggatttgtcaaaattgactctttgccccgaagcatcagcaaagagatcaagcaaatgctgaacattagcaacttccctctccctggctcgacagtaaagaaaactatcgtctgtaaaaaacatatgtgatacaataggagcaccattggccactttacacccatgtatgagcttcctttcctcaaagctttgaataagagctgacagaccttccgcacaaatgagaaaaaggtaaggcgatatggggtcgccctgacggagccctctactaggaataataggccccaccgtatgtccactactgactatgttataagaaaccgaagataggcatccattaatcaatcggatcca

SEQ ID NO: 219791 - DNA, 3781 bp, Cannabis indica
cccgttttccagcagtaagttcctatgtttcattcatatcatttcaatttaactaaatgagaagagagaattggtagttcattcaattctagttctacatggctgctttaagcttcccagttatcacttttccacataacccaaaaccaaactcaactctcaacaatcaacattcttcttcaaacttccaactccttccactcatagaccaatgcacccatataaagcaactcaagcaaatccacgctcaaatgctccgtacaggcctcttctatgacccctactccgccagcagactaatcacggcctctgctctctcctccttctcaagtctccactatgcccaccaagtgttcgaccaaattcctcaacccaatatctatacttggaatactctcattcgtgcctacgcgtccagctctgaccctcgacgaagtcttctagtatttttgcaaatgcttgagcagtgtagtgaatcacccaataaatttacttacccatttgtggtgaaggctgcttcggagatgaaggattatttggttggaagaggtttccatggaatggcaatcaagtcctctctgggttcggatgtgtttattcttaattcacttgtacacttttatgggtcgtgtggtgatttggatatggcttatcaggttttccgcaacattcccaggaaggatgttgtttcgtggaattctatgattgcagcctttgcacaggggaattttccggaggaggcattttctttgtttaaagaaatggaaatggagaacgtaaagccgaatgatgtaacaatggttagcattttgtctgcctgtggaaagaaattggatattgagtttgggaggtggctctgttcttatattgaaagaaatgggatcacatcgaacttgactcttaacaatgcaatgcttgatatgtatgtgaaatgtgggagtgttcaagatgctaaattgttgtttgataagatgctagagaaggatgttgtgtcatggacaactatgcttgatggatacgctcgttcggggaaatacgacgaggctcaacatgtcttcaacgagatgcctaagcaagacattgctgcctggaatgccctcatttcgtcttatgagcaaaatggtaaacccaaagaagctttggctgttttccatcaattgcaacttagcaagagtgtaaaacctgatcaaatcactttggtcagtacactatcagcttagttcccagtttaggagactattgatcctggcaggtggattcatgtctacattggaaggcagggttttaagttaaactgtcatctcacgacctcgctcattgacatgtatgctaagtgtggtgagctagagaaggcaatagaggtgtttaattcagcggagaagaaagatgtatttgtttggagtgccatgattgcaggtttagcaatgcatggacgtggaaaagatgcaatagatttgttctcacaaatgctacaagctaaggtgaagccgaattctgttacttttaccaacatattatgtgcctgcagccatacgggactcgtggaagagggaaaagatttgttctgcaaaatggagccagtttatggagttgtacctggtgtgaaacactattcttgcatggttgatatgcttggtcgttcaggcaatctgaaagaggctgtcgagttcataaagaaaatgccaatagctcctactgcttcaatatggggggctctgcttggaggttgtaaacttcatggaaatgttgaatatgctgaatatgcttgtagccagttacttgagttggatcccagaaaccatggagcctatgttcttttatctaacatatatgccaaaaggaataaatgggatcaagtttcaaggttaagaaagctaatgagagattctggaataaagaaagaaccaggttgtagctcaattgaggtcaatggcatcgtacacgagtttttagttggtgataattctcaccctcaatgtagaaatatctacacaaagttagatgaggttgtagcaaggttgaaatctagtggttacgtgccgaacaagtcccagctactacagtttgttgaagaagatgatatgaaggagcaagctctcaaccttcacagtgagaagttggcaatcgcctttggacttatcagtactgcgccatctcaaaccattcgtgtggtgaaaaaccttcgtgtttgcagggactgccactcggtagctaagcttatatctgagatttatggcagagaaatactgctgagagataggtatagatttcatcattttaaaggaggacagtgctcttgtatggattattggtgaaatagatggcagtcgttctgataataggcttaattatagggttgtttatcaaaccgtccgcaccacaccgcactgcaaaaaaatgcggtttgaaattctttgtggtgtggtcgcagtttgaatttttcttaaattgcgcggtgcggtttgctgttttgaattgttaatatgcggttcaaaccgcaccgcacattataaaaatacaaatttttatatttatttaggtcactaattattgtattgttaaagttttgattttttttttttctatatttatcttcaagctttatggtatttttaacaagtgttacttaaactttgttttatttgtgatagtttaattatttgatgatagtccaaaccgcagaaaccgcacagcaccatattattttttgtcagtgcggtttcggtgattttttagtttcgcggtgcaagtgcggtttaaaaaatttaaaaaatacgcatgtatgagttggtttggaaaaaaaaatggtcaaaaatcgtaccaccagcaccgtaaacacccttaagcttaaatgtaagctttttgtcaagtacttgataattttacatgtcaggtaattacatgaagatgaattgtactatagcaaaaataagagaagctgatatcataatcatcaatggtgtctcactccataaatatgtcattgtgagtaattatcgtggcaggactcgattctttggtcatatatatttgtatatattcactatgctttggttagggttttttggtatttattttaagctctattgttgccttacatttattttttttatggtcatttttttactttctgtttcacttgtgtgcatcattgataactgataaggcacgtgtatggttcttcatttggagaaatcttttatttttaggctatatttgaaagttagattttagttagagaaaaaaagtaagtaaaatataaaaataagcgtgtttgagcgagattaatactaagatgggtgacctgacctcttaagaagttcttgtgttgcactcctgtgcttgggtgtgcttgggcgcgagtagtatcctaagaagtcttcttgttgtattcataaaactttctttaaaaaaaaagtaaaatatagaagaagaaaaaattaatttctcaaatttagtgtaaaaataattgtattaaaaaaattgatatgtaaagaaattagtaattacactgatcaaatcttcatattactttttgatttgtaatgttcaaatattcggtacttataatatgttatgatcacaatcctcaatcatttcccttttaatatgctcggtgttggcttggtaaattgatttgtaagatatcaaatttgattttctttacttacatctacctaatattttatttctaaactaatacatatcaccattgaaaatatatgaccacttttatctaaaatctaaaaatacccctctcaaattttccatactttttttt

SEQ ID NO: 219792 - DNA, 3776 bp, Cannabis indica
tcattctatgggtgtaagggcccaatagaggcttgaagcagagacgttacaatctatctgagaacagatgttatattgaccattccctcctaagtaacgagcttgaaaaacttctcatctaccatgtggctcacagtttgactctatgaccttggattggacgacttgtttccttggatttcctgagtgtttccagttggacgttcttttggcccgtactaaggtccaatggggatgtagacatttgtcctttggcttggatcctgtataatcggagtgtctgccattgatttttgtccagttatctgataggcctgcctaaccaacatggtagcctgcttggaacggttatcaattacctcttactaagctctcataatttccatttgttgatccatccactcttagaattagcgtctttactcctcaaaagaaaaatttatagctgctttggtatcttgttgattgagagtgttggtatgctcttgcattttccctaaagtgggttgtaagttctgcagttcgatgtcatcaccaatggtccttcagggatttccaacagatggatttagggaagtatacttggcctgggtactggtagctccagttttttacacgccctgagtgaacccagccagaaggtttatcactccttctcttataaattgaggacctaccggaggttgaggaataattaggtcaggattcgacctcactggatcttttctatttgtaggagtttacacattaggatttgtaatcaccgaatcagtcgtatcgttttgaattcctccccttgtagttatatccatcttcgtgtgtcttaaaaagactcaaacaaagattgtgtctctctgctctcagtgaaagtactaaaaaattgatctcgtttttagccaatgacaatgaatcaaattaaagcgattaaaaataattaaataacaataatgataaaaataaagcaaagagaacactgacattgctatagaggttcggcctcgtgatggtggtaatagcatacttcccttttacttgtattgatttttgagaagagaggcaagaatttcttgatctctctctaaagttattacaatgatttcagagtatatctctcttgaatctatgattcttgtctctaatttttctcgtgttcctgaatagtgaaatggttccactatttataaggaagaattatatcaaattggtttctcaaaactaataagaattaaaataggaaacttgtttactttcattaaacaaataaagttaaatgggacactagatgagtttcctcttatttcttgtcaatgcaaatctatcccatgaaatttgggatacgattatgacttgcaagcttgaagattcatgaaacatgtctttgaaaatgtttaactcgcattctctggctgggagtatgcaagctgattgcacaatagatgctggtcagatggtgtagcatactctgtccagacattcttaactccttctatatagattgattatttactagtgataaatcaccctggacggcacatcataaaaggaactgctcgtttaggcaatagaatttttttcacgtgtcacccaaagggatgccacatcactttatgcagaaattgaaataacaataatgatacattgaatcctattttggtattaacaaaagttttaactctaacatttttttttcgacatataactgtattcattgagattgattccaaaatacagaatacaagcaagagaaaacatttggtgaaatcagagaatagcctcctgttctaagccaaaagcttgcttagctagtcagtgagcggcgtaattagcctcttgagggacatagctaattaaagcttgaggaagtgaagacatcaagcttttaattggttagaaattcctgtagatgaatgttattagagtgacctttaattacagtatcaacaagaatcttacaattagaatctatttgattgatcataagcgagtgcttttgacactatttcagggcgagttggagagaatgtgcttccattataaacgactggtggacgcctttccaaggtaaagctaaggatgcgaccacttctgaagtatgattttgaactatcaatccaaaacctattctgttcatttgaatattttgtgcagcgtcaacattgaacttaagctggtctggaggcggtggctgccaatataataaaggcctacttgcgtcttgaacgttgcaatgcatttgccctgcgttatgttttaactctaaccttgaaactttctctacctaactatttcctaattctattaaggttctattataaatataatcctaacactaaaatagattgaccaataagatttggggtattattgtgattttttttttccaaaatatagaatctaaattattatttaataaaatattagaactgttcattagcttgtacaaaaaaatgagatcaaaaaacactatttatcttttttttaaaaaaaaataatatataaatatatatatatgggagtttaattaggaaaaaaaataatgtcaacaaaaaattgtagaagcacttttttattttatgtcatcatagagagatgatacccttaaattaggaaaattaaggattattaaactttgatgaattaatttttttagttatcaaaattaaactttttaatagtttaatgaccaatcctttgattaattaactgtggcactcacaataactaatgtaaaataactatgaaagttaaaaattagttaagaattaaaaaaaatatcaaaaaagtacatccaatagataagttataatagctcaaaaatttatctaataaataatgcttagctaattgtagctaagagttatcttacttttagtgtttagttataatttctttctattatttttaaaatgtatttcgttaaattataagtgtaaaaataaataaatattatggaatatataatattttattatttgtatgtattataaatatattatttaaatggtttagaaaaaattataaaaaaaaattgatgcttagtataatgtaaatttataaggtaaaataaaaaaaaaaaattaataagatattttaaaaaataagataaaaaattattaagagtactctaaaaaatttggaagatataatcgaggtagaatgagaaaatactcacacatattatatatgattatttacctcatgatcaccttagcgtagaataagaacatattaactggtgttgaaaaaaacaacacgctagttatctaatcatacatatactgatttgcagaggtgaagagataagaataaaaataagtataaaattatgattatttaactataccatggaaaatgaaattatataattgcataaagaggagggaattgtaaaggaagagcgtgctgtactactacgtacaatattaattatttaaactgtatatagtcgatattattaattcctattaatattttggtaacgtgtatggactttctaaccacaattaatttgtaccctttttttcttgcttaataaaaacaccttcatatgtagaaaatctaatatagatatataggaattaacttttctaattcgggcttcatcatcatgcttaaagaaacaaaaatcaaaatcaaaattgaaaaatcacgtttttgcaaatgtcaaatatatataagaaaatataaaacagtatgcgtctgcagaaacagaaagtaattctactacagcaaaacagatcaggcagaatataaaatatttgcagaaaaataaataa

SEQ ID NO: 219793 - DNA, 3607 bp, Cannabis indica
ggtaaaatatttccaacactggttccatctatggaagctaaacaaggaagtgttgaatgttctagatgaagatgatagagcacaggttcttccctatatcctagaacttaaaactattgaacatgctactaaggagattattaaagaggatgttgaagctattccatcaaatgatgtgatccaagaaggatcttctcttccgtcctcagagattgatccagctgatgaagttccagcttcaggccagagtccaactagtgatgtcccagtcattgaggcttcaattgaaaatcaattagacctagttcaggaactaactgatccaggtcagctatagtccaatttcatgaactattttaaacttctttttgttgatgcggagacattatttgtgaccttatcatagggctttaagtatgtaattatttttgaatgtttctaatttgcattctttgactttatactcactagatatttgatgcatatatgatgaattttaactttgctaagtttagctttgcttctagtttcccgaggttctggttccaatggctcgagccttaagaagtttgcttttatgcttaggcttataaatcattttcataaatttcttagaacatggttccaatgtcctagaccttaaacctaaacaattcattataagaaaatttaacaagtatttcagtgatcttaaagctttagttctaattaccctgagttaaccaattttgaagcttggacttcttttaagtttaattaacctaagttaatttaactagtttttttgttctatataaatggtaaagtagttgcttacttccagatccctagggctccaagtttaagtggtacaccttactcccacatttaatattaattaagtttgaagcctgaacttctttttggtcaacgtgaattgacttaatgaatttattaacttaggaaatatggtaagatagttgcttactcccagtttcttgagacttcaattttaggcagtactttctactcccacactcaacgttaataatttttggagaggtataagatatgttaccccaagtgattaagagtctagactcttggtcacttgtttcaagacttggaaaaaattataatatgacacgaaaatcccttcttgtttttatttaaatgattccttccctgaggcatacatggaaataaagcataacataaaatgcaaataaaaagaaacagaattagaccacccccagcttactgatagtatcagtgttggtggtcaacgttccatgctcttgggatttttaggtgatatgttttgtcacctaccttaccttgaatttcatatggcccttctcagtttggtcctaggatccccactcctggctcttgagaggctgggaacacctttcttaagactatatcaccaatttcaaatcttcaacttttgactttggagttaaaacttttggggattttgacttggtacatctggagttggacttacgagtgctcttgaagttcttcaattagatctaaagattcttggagtaatgcatggtttcgagttgggtgataagtttctctcctatgaagaggcaccgtggtttctattagaattattgcttcacacgcttccacttgtcatttgcttgtggtttggccaccgttgaaaaacttttgatgattctgtccttgacacaaaaaatactgaatttgatcattatcaaattgttttgcattatcagacacaaattttgtgtggaagtccataacaacatacaatattcttgatgacaaagtctagtgccttcttggaggttactgtgttcataggctcagcttccacccacttggtgaagtagtcaacaacaacaatcgtgaatttgactcctccctttccagttggaagtgatcctaccaaatcgattccccaaacagcaaaagccatagactgttcatcaggttatctttattggcgagctctcggattttttgaataacgataacactattcacatttttcgacgtattcaatacaatcctctttcgtagttggccaaaagtattcttggcagatgatatttttggacaaactaggtccaggtatatgatatccataaaatccttcatgaatttcatgcataacaacgcttatctatgttttagctatgcacttcagatagggcattgtaaaccctcttccgtatagttttccatccatgaacacatatcttggggcttgatactgaatcttccgtgaagatgctctatcatctggaagtgttccaaattctagatacttttggattggagccatccaggaagtggagtgattaataaccattacccataatgttttgtgcttggagcaaaaagatgggcaacggggactaattcgtgcttttccatctttaggtctgttgctaactttgctagcatatccgcaaaggcattttgatccttggggattttcttaacggaatgatgcttaaaatattgcaacaactctctggactttgctacataattagccatcttctcccctttagtttagtattctccaaatatatgattgactactaattgtgaatcactatagatctcaatgttttgggctctaacctctttagctagttgcaacccaactatcattgcctcatgttctactttgttgttgaaggcttcaaactcaaactggactgcactttgaagttggtgtttttgcgaagaaataagaatgattccagcgctagagcctttctcctttgatgctccatctacatatatcttccatacttccagcttcgggatatgttatttagggttgttgttcattcctgttcaagagtcttctggatgactcgggctttttcaatacttggcaaaggggatgatttattagtactctgatggcatggacttgaaagtaaggtcttaactttcgtgaagcaattagtaagcaataggaaagcttttcgatcattagatatctaaactccgcgcccaacaatcttttgcttacaaaatatactggaagttgtacttgtcattcttcttacactaaagcaacacttatggcctgatctgacactagcaggtacaaaaataatggctccccctcgactggttttgaaaatattggggccttggttaaatgttctttaagtttttggaaggtatcttcacattcagccgtcatttaaacttattgttcccacggaggatgttaaagaacaaaatacatttttctgttgatttggaaacaaatctactgagtgctgcaattcttgcagttagacttgaacatctttatatttctagggtgaaggcatatcttgaagagctttagtcttctccagattcgcttcgattcctttggaattgacaatgaaacctaaattttttcctgaggaaactctaaaagtggaggtttatggaaatcgtgattaattaaaatttttgctttttaattaacttataaaatatttatacaaaaatactcgggatcccgattacaaaaacactttacaaaagtttactgactatacaaaatactcgtcgcctagcgactaattacaaaaaacactgttgtcccgaggatcgtacgctccaggcctaaccg

SEQ ID NO: 219794 - DNA, 7372 bp, Cannabis indica
cggatgttggatggggtgtcgaaaaatctaatatattcaatatccaatcgaactaattagtattttcatttactttggataagtaattagattttatattattataagtaaaaatatttatgtatataaaattaaccttaaaattttactatttttttcttgaattggatggatccaatccaatctaatcccataaaatacggaacctaaaatattagatggatctgatccatccaaaaaatactagttctaaaatatgggataaacctaaattaaactaataaatatatttgaagaaccaattcaacatcaaatgaatagaactaatccaatccaacatctaatggatgtgatcgattggatgactaaaattaattggatcggatcagatggtaaaatttaacatttaatttataattggatcgaatctaaatagacctaaaaatattgaatgtgattcaataaacactcctaactatcaatattattttgtgaaaattctgaattcaatgggtttcttttagaaaaacaaaatttaaacggtttttttttttttttctaaacaaaaaaataaatagcaaacaaataaaaacaataagtcttcaaacagcgttgtgtcaccgttaagtctcgagtccccttaacacttgccacctataaaagggtcgcctatttcaaattttactcaattcacaccaaaattatctgcggtgtttctctctcaaggcctccatattcctcttcttcaaaagctcatttctctctctacaaactcatttcgtctccgatcatcaaaatgcgtgaaattcttcacatccagggtggccagtgcggaaaccagatcggcgccaagttctgggaagtggtatgcgctgaacatggaattgactcgacaggtcgttaccagggagacaacgaactccaactcgagcgtgtcaatgtgtactacaacgaagcgagttgcggtcggttcgtaccgcgggcagtcctcatggatcttgagcccggaactatggacagcgttagatctggtccgtacggtcagatattcaggccggacaactttgtctttgggcagtccggagccggaaacaattgggctaagggtcattacactgagggcgctgagttgattgactcggttcttgatgttgtgaggaaggaggctgagaattgtgattgcttacaaggtatttcttttagtatgttgtaaaatttatcatatcaataattgaattaaatgtatgttagcgtttaaagtttctgataaagtttgatcttcttagttttccatcagccatctttaatctcaaaaattgattattaactgcaattttatgtgtaattgtgttcaggattttcaggtctgtcactcgtttaggaggtggtactggatcaggaatgggaacacttctatttcaaagatcagagaggaatacccagatagaatgatgcttaccttctcagtgttcccatctccaaaggtttctgatactgttgttgagccatataatgcaacactctctgttcaccaacttgttgagaatgccgacgaatgcatggttttggacaatgaagccctctatgatatttgcttcaggactctaaagcttactactcctagctgtgagttcttttccccttaaccacgttcatagtatattaatgtttttagtgatattggcgtaatgaaaagttcaatggttatcttggttttgttttgtcaatgttgatttgattattgattttggcattttcagttggggacctgaatcacttgatctctgctacaatgagtggggtaacttgttgccttcggttccctggtcaactcaactctgatcttcgcaaacttgctgtaaatctcattccattcccacgattgcatttcttcatggttgggtttgccccacttacatctcgtggatcccagcagtacagggctcttactgttccagagcttactcaacagatgtgggattccaaaaacatgatgtgcgctgctgatcctcgacatgggcgatacttgactgcctcggccatgttccgtggcaagatgagtaccaaagaggttgatgaacagatgattaatgtacagaacaagaactcatcatactttgttgagtggatcccgaacaatgttaagtctactgtttgtgatattccacctactggtttgaagatggcttctacattcattggaaactccacttcgatccaagagatgttcaggagagtaagtgagcaattcacagctatgttccggagaaaagctttcttgcattggtacaccggagaaggcatggatgagatggaatttactgaggcagaaagtaacatgaacgatttagtttctgagtatcagcaataccaagatgctacagctgatgaagaagggtatgattatgaagatgaggaggaagctcaggaggaggatgactaatccattggtttctgttttgcttattttcttttttattcatgggctttgatgtttgtggattttaaccctgtttttgtttccaatacaccttatctgtgattgaattgtttgcttgttggctagcttctctcggctggtctcatacttgatttggttgtaatagtttagatattagctgtctgaaaatatgttccactttcctggtgttaatgaatgtggccactggccattattctggtgttattttcacaatccattagttatcaattggttctgtccttttgagttcttgattgcaaccgaacatgtcactgagataatagaacaatgaatattgagtagcacaaacccatgtgatggacagagcactatttgttaattttcatgaaagaaaagatataattgctctgcacatataggaccctcagctggggttcattcagtggtccatcatcctgtgtgtcgatttcttagagtttgtgtgactacgtatatggtatcattaaagaaacttggcctcattaaaaagagatatctcgtagctctcctagagcacagcaaaggagaaactcaatggtatcagaaataattcaattcaactaagggaagaatcaagcctagcattgcaatgaatttcagtaaccctactgagaattggtgcctaacttgatcttcgaaagccccagttggcagcaatgtagcatagtctcaaactgtggtaccatcaaacttaacttaacattaaagtaatttttataaatgttatctagattaatatatttttaatttcaaatttaatacatgatagattaaatagaaatgagttcacattgctttgtcaaataaaccaatggagactagagttttccatcttttgaaattggaattgaaactgcagtgaaacatgcacataacttcaataatcagcataaaatcgcttccaacatacttatctgtttcttaagacttgataaatgttaatatattcattgtgtcttaacaagtactaccaatttccttacaaacaaaaaaaaaaaaggaaaagaaaaaacaagtactaccaatctattctacgaaaaaaataagattaattgcatcaaagttcttaatacaactccaacccaattgtaaaagaagcttctatttcgtaattgagacaaataacatcacacatcgtatcactgagatgatctaaaataattgtctaagaactataacacaatacttagacaagccaaatttacaaggcaatgttcattttgtaacctcaagatttgaactaattaaaactattttttttttctctatttgtctaataaaaataagttaagatatagctcaatgaagaatgtaagtacccagcgaatggatgctcaaataagcaacaactactctatacaaatcaaatataaaaagaggaaagataagaataaactctagtatgcctataataaattaaaactttaaatttaagaaaaatttttggcgggtgtgtataaatcgatctaattcaatgataattgatcgatccagttacaattgatcgtcaaacattgaatatctaattttgattggatcaaattagatgtatatttgatcaaatcgaatgttggatgtggtgttaaaaaatctaatacatccaacatccaatcgaaataattcatatttttatttattttgaacgagtaattaaattttatgttgttatacgtataaaagatatatatataaaaattaacattaaaattttatttatttatttagattggttggatctaattccatccaatagatattggatctaaaatattgaatgaatctgattcgtttcaataaatactaagtctaaaatataaggtaaacctaaattataccaataaatatacatgaaatacatcaaatggatgaaccgatccaattcaatatccattggatgtttgatcgattggatgactgaaattaattagatcacatcggatggtaaaatctaacatctaatatataattagatcgaatttggattggcctaaaaatattggatgtggtccaataaatacctctattttttgctataacccaataagacacaatattacaagaatatattaggctggcctattaaacatttatacaacctgttatacctaaattttagctaataatgtgaagtccacacgtgtacaggactcgaatataaaccagcccaagttatgcattattaaatgcacaataaataactcgcctcgacaataacagttaataaaaatattttaactcatcatcgcctaggcaaaagccagatgtgaataataactattaactagtaaattcagcgagacaacagtccaactcggggtgaacagaatacgtaatgagagttgctcaagacgaataaacaaagagcttgcaacttattgactcacagacatgcaagagcttgcagctaattgacccacatacttgcatgtccaaagggtgatattaacattcattcatctcgctcttaacacgttaaagtaacaatcttgcttatacctcactcaaacagttaaggaagattgcaagatgcatcatcactcaacacttagcatttttctacaaagatgtttaagaaagtgttgacagtaagaactcgtcaacgaaataacaagaacccaaaatggtattttcaaatcttaatagaagacttaaagtcaaaatcttacaaccttcactctctagaaaaatcacttttttcattcaaatgtttctcaaaaaaaaaaagttcccttacaatgaattcaagggctctatttatagtgagctctcctctctttgtacccccaacatatcccaatacatactatatcaagtcactttcacccattacaatacagtatcctaagtgacctgacacctctgaaattctaagttacactaaaaatgcccctttcattttgtgctttagaaaaaataaagtgtgtccccgttatttatacttatagtgatgttgttatctcgcctgatactttcttgccaagtttactggtgtcagcaaggaaagaggaaccagcagagtattgacgtctttggaggagtggacgctggtgagaggcccgaccaagggtgcatggcgagggtgcagacatgggcctatgggcgagggagcgggctcctacgagcgcgggcatgggtgcctacgagcgagggagtagcacgggcgtgggcgcctatgtggaaaagggagcgggcgcgggcgcgagcgtctgcgggtgagggagcaggcacctataggcacgggcgcactgtgggcgagggagcgggagcgagtgcttgcgggcgagggagcaagcacaggcgcatgcaggcgagggagaaggcgtgagcgcaggcgcctgcagacgagggagagggtgcctttgaggaataactcgatgtgactaaagagaaatcaaggacaaataaggcaagcaccatctttcatcctctcttgcttatacagaccatcttaggctattcacctttccgattactatttataggaatgcctcacttcttgaattcttgtggttaacatcatgcaaggagaatcccatgcgtggagctccccttagtgagaggaggagctccccttagtgagagaaggaggtcccctccccttgatgagaggaggagctcccttccccttggtgagaggaggagctcccttccccttgattagaggaggagctcccctccccttgatgagaggaggagctccccttggtgagaggaggagctcccgtccccttgatgagaggagaagctccccttggtgaacttttgggcataccactaatgactccaaatattacacttagtaattttagggggtcaacagaaagatatcacttgaaaggtgaaaacaattaagtacaatcagcatagtcttcaatggataaagacaaaagaatggttatctaatattatcccatataaataataatgaaacgtgggggatgtccacgtttctgttgggagtttatgttgggttttatgccttgatttgttagttaagcctacttttaggtcagggtgatacgtacattttgggaacacggtagtgcaattgagtgggagcgctagcataaacatggaatctatagcttctatctggcgaatagtaagcaaaggatgatctccttcgagcttgaccaaacgaacataaatggtggagtactcatttcacataagctgaaatatcatttatacggggtcaagtgttttaaggataaaatacattgtagggtgtaacggtaatctaatccctttacagtgtagatcattcatatagaggatcattgatcaaattaggattataacaatggataactaatgatgtgtctatatggtggaacatatagagcattctatatactgagagtgcaattctaagttctatgcgtggattcaacgaagaattaataagttagtgaattttagtgctaaattcttgatctacttattggaagctcggttatatagacccatggtccccccactagttgagataatattgcttgtaagactcatgtaattggttttgattaatcaattataattctcaaattagactatgtctatttgtgaatttttcactaagtaagggcgaaattgtaaagaaagagttttaggggcatatttgttaattatgatactttgtatggttcaattaataaatatgataaatgacaatattatttaataattatttatagttattaaatagttagaattggcatttaaatggttgaattagaaaattggcgtttttgagaaaatcagatgcagaaaagataaaactgcaaaattgcaaaaagtgaggcccaaatccactaagtatgggccggccacttttgtaggaaatttaaactgatattttcattattttaatgccaaataattcaaacc

SEQ ID NO: 219795 - DNA, 1714 bp, Cannabis indica
aaataaactgcttctgatttagagatttagggaggaagacttagttgatagtattgactatcgaattgaagtaattattatggatcgaattgaggtaattgctatggataaatcagatacacatacttaattattatatattattattgtgttgtatgttatatacaaattgatcttgaatttattattaatttttctaaccaggattgctaccttaattttgaggccaactctaataggcatgtccacaaattttgggtgcccataagccagcattatatataatctaatcgagtcaatcgcaacaaaagcaaaagtgaaagataagaatagtacgactgtccttatgtttttggaatgatggaaaaagcaaagtcgcatactctcaaaaagctaaagatttccaaccaaaagaaaaaaacaaaaagataaagatacccaaattattatatatcattacaaaaaagtcatgctacaatcatacacttcccactacgacattaccaatcttatacaaaacgtttattatatattcattaataatttaaggtcattactttaatgcaccaaagaaaattacatttaaagtccatttgtttattcttttatgtcaattgtagttctttgataaagctgtcctagtcccaatttgcatgcgttagttaatggggttttttatgaattcattgcctttgaactatgaagcaagtcacaccattatttactttgattactatcggtagttggcttcaaaaatatagtgtaaaatagggtcattatgtagtccctcagtttgaaattgagggacctgccacttagtattttgaaactattatgtattgatgtaaaattattatgtattgatgtaaaatttatatgtttaaaattgaattttaaattaatcgaagagatagaaaaactcaccaagaacattctctgtatatgaactctcattaataacaaagactcgtggactacggctcattaatgcctgaaccacgtaaaagtcacatgcattaattatcccaaagctcgcatcattatctcatttaattggttgtcaaaaatctcggtcaacattttagtgttttcattgagagctgtgggaagcattgttgggagaacaagaatcaaagaatcagagctgcaatggtagaaactcgaaacaacacacgccaaccttgcccccccaggatcctcagaacctagaaggtgaaggggctgcttcaggggtaaacgtggtttctgaggaatgagatgagacgaacgacgaggaatataaagaaaatttccatgggtatgatgcttacgacaaaggtagctacactgagttgctcttcctaaggcaaaaagcagctgatcacgtacgaggccgaactggccacccaaaaagaacagaataagaggatgcatgagttaatgttcgccatgtaaaaggctatggaaacggctggaatacatctctactagaaaattgggttttagtgaaatacattgagtaactctaaaagtgtatagtgacacttcaacgcgcgtcactaatgagggtgactagaaagacaattttcagtgacacttcacacgtgtcactgaaaccttttgcattcattttccgcgtgtcactataggtatatagagtcagattttgccagactaaaaagttaacaaccacacacatgaagtgtcactatatctttttttttttctttttatt

SEQ ID NO: 219796 - DNA, 3601 bp, Cannabis indica
ctgatcacaatcgcagaatcgctctccaccacaacaaaaggatggtgcatttaacatgtactaaatcatgccccctgaatttttcaagtcgttaaaaaattccccttatattgttgaaatcattagatttaaggacttctatccaatttcattcaattttagtaatataacaattgtccgtgtactaaattctgccccccgaagtttgatgtctattaaatcatgccccataaacttttaaaactacaaaattgtatcccttaaattttatcaagtctgacttagtttaataaaattaaacaaaaatcattaaattcaacaatcttaatagctcaaaaaaaaattttaactacctgaaaagttcacatagtacgatttagtatatgttaaaatttaaaggagaaattcaaattaattaacataaatttttttaaaaaaaatacagttgtttttctaatgtttttaaaacaacttattttcattgctgctacacaaaaacagaaacaccttttttttttttttgaaaactacacaagtaaaaaaaattgtaaaaaaacaaaatccataaaaagaaaaaaatatatatatttataagaaaaaatacaattttaagtagtgtaaaagatatttataagtaacctgggttttgaaattatgcaatcgcaattaaatgagatatggcagcagggcagattgattgactcaggtatgtcatcttctaaaatttcaataactaatgatttcttttaaatgaaaccacacaatccaactcaaataaacaaataaaaaataaaatataatgtaatggtcaactactcctacagctatctagaaaatgatacatcaaacatggctgcatctccagatcaagagtggtcatcctcccagcaaaggtagaatatgtttaaaagataatcagaggggatcatcaaatcccacattttcaccactagggatatatatagagtctggaagttggggaaaaacttcactttctgtttctactctcctccttctccctttcacgcttcttgtaaagcctctcaagaactctcttggcctcacactgaggaaagttctccagatcaaaatagtgtggtgctatatcaactaacctgttgcccaaaccaaatttacatgtaaaagacagttaatgatcaaagcagaaagaacaaagaaaacaaaataaatgacttcatgagagactaaccactcgccgcgaacatctgtcactgtacgtataaaattcctgcttgttaacacatactcattgtagatgacccactctggtttgtggtcaaggcaatttgaaggatgcaaatgcacaacctgtaaagtaaacaagtattagtatgtcaacacacaatgatcgatcgataatagagaaaaacaaacaaggcctataggtacctggttgtctttcacggttaaatagtgtccagtgcgttccagatgagccacctgcatgaaatatccagctagcattgcctttcttatgttaatgtagtagtcacggctgctgaaatcagtactgcatagcttgaggttgtatcgtgccatgatgcggactagctgttgcctgacattgtcagcagatttaagcgccctagcgttgacaaaattttcgtagcaccaagactgatcctcatctgtaacattataacaaacaaatactactgttagcatgattcccttaaaaagtatacgattattatatgacactggaaaaggaaataaaaacagcacagtttttcatatgagtacttactattttgcttgtaggcatgatacacgttcagaagtgtgaggtgatctccatcaatgtggccaaacctagcttttgcctcatccgcagctttttgagcctccctaggccggacaaagcaattgggtactaagaaagaaattggttatcacagaggaggcccacagtaggtcagcagaagcatagaggcgagacggcaccatgtgattcatgagataatactgagaaactgcaactatctgcatcagcacttactttgaatttctatggtgcatgccgaccgggggcatgaaacctatacatgacagttgctgatgacaacctaacttgacacaatactactcttaactgtagggatgcatagcacttctctacgcatttaccagttagaggacacaatatgcacagatacccatctatgcacatgccaactcaataggctagcattagacaataatgcaacccgacaatttctgcatttctgcagaaatgactctaatgtaatgacaaacataactaaaatgaaaggatacaagaaagatacctgaaagcatggcagaaatggatagaatctcatttgaacagttgaattcagggctaacaaccagcatcttggacatctgaggatctagtggaaactcactcataatttgccccagctttgtcaagtttccttcatcgtccaacgctcccaaataattcaacacctctagtgctcgcattaatgtctctggagcaggggggtccatgaagtcaaagtgaaccagatcatctattcccaatttcttcaaagtcagtactgtatttgctagatttgacctcaatatttcaggataggtctgtggctgaagatcattattaaaactcctctctgtgtaaagtctaaaacattttcctggttgggttctgccagcacgccctgatctttgatgtgcactggcctttgatatgggagaaaccaacaaggactcaactcttactcttggattataaactttttgtttggcaaacccagggtcgataacataaactatcccgtctatagtcaaagaagtttcagcaatgttagttgatactacaatcttccttccaggtgggcctccctcattcagtggaggaggagcagggtcaaatatcttctgctgcatagctggaggaagagttgaatacagaggaactgctttcacaggacccacctgatccccaagatttgcaacttccttgtttattttacgacatgcatcttctatctcctcctctccagtaagaaatacaagaatatcaccaggaggctcacacatatgtatttggacaactgtccgaattgcagcctccaggtagtccctttctggttcttgggtgtaaaatatttccacagggtgaagcctaccaggaaccttcataagaggtgcaccactaaaataaccctgaaacttttcagcctcaagagttgcactcatcacaaccagcttcaggtcaggtctatttctcaatacttcctttagcagtccaaaaagaacatctgttgccaaagttctctcatgagcctcatcaagaattattaccttgtagcgctccaatagtggatcggtcattgcttctcttaaaagcataccatcagtttgatacctacagagagaaacaatacaaaaagaaaagttaagccacttaagatgagaccattcaaaaaaataaacaagcctaagttaaaccccaaaattgaaaaacagagaagtaagatttaaaagaataaacttacttcaaaactgtctttgcactgctgcagtcctcaaaacgaatgctataaccaacttcttctccaatggttacgtccat

SEQ ID NO: 219797 - DNA, 2352 bp, Cannabis indica
tttttttgcttgatgatgctacaactattctttcaacccttggtcgacgatcccatcttgtgataaattgatttggggtgataattcaactaacttctattctgttaagagtggttcctggcttgctactagattgttggagcacaatagaccttctacttctcaagggtcttcgagattgtggaagaaactataaagtcttcatcttcccccaaaagttgaaatgtttgcttggtaaatttcacacaattggattccatccatgtttaatttgaatacgtatggtatgcttactgatgacctttgccctttgtgcgacacccaggaggagactactcatcatgctttgtggggatgctcttctctttctcaatgtcgaaaactttgtgagtttagccttggagatcctttggtcacttctactaattttatttcttttatctatcttattttggatccactgcctaattctcaattggagttaatccttgttatcatgtggagagtttggtatgggagaaataaaattgtttgatatccactgagttggtggtcaattgggctcgtgcttttttaagtgattatcagaagcctctttgggttccaaagagactaatcattggagttttcttgggcatcacatatcgaattcatcttttcttattatgccttgttgggaaccttctcttgggagttgttttaaggtcaatattgatgcagctctagacttgaaaggtggtttttgtggcatgggtatggttatccatgatgctcatggggttgtctttgcctcgactatctagcacttggttggcttttttcaagttaaaactgcaaaagctcttgctcttcatcatgcatgtatccaatttcatcttcttggtttggataatgttcaatttaaaattgactatcttaatgtggttaacaagatcaacaatattgttcttttggactcatcactaggcttaatttttagagacattcattgtaatttggctctcttccataatatggttactaacaaagtttggtagccaggtcacccaaattgtattcatcattatctagtggctgatgccataaatctttaatgatgtccccctctttctcttttttaagagcttttgctttttagggcggagtttggagttttcttcttaaataaataaataaataaaataataataataaaattttattggaatgttactttttattttaaaatgaaataaatattccactaatagtgaaaaaggttattctattgtaataatactccaattatgcatggaactaaatataggcgagggggcaacaccatgtatttttaattaaaggtgaattttattagagcatcttcaatagagggattacaaaatcccacccttagagagttggtattagaaatgcattgtagctataaaagatcaaattaaaattgtcgccacaccaacttctcatggcagtattacaaaggctgcacacaaagataaggtcatgctggttcaatatagtagctgatctaagatttatggtttgtgctaatcatgaagatgaaaccattgagtatgtattttttacttgtcagtttagtatatgagatgtttgattgaacttaaagctagcttggttggaatgaagatcaaatgtatgcaacatatattcatgctgtgataagatggcttgcccaagggaaagcaatgaagagcaagcacatggtggtggttgctgcatgtgcagcgctagctagtgtacagattgtggttaaatcgaaatgaaattttgttaaattctaaatgttttacaattgatacaattgtaaaatatgatgttaggaacagaattattagctgggcgaaaaatttgtaaatagatttaggcttgtttttcaaataagaagcgatgtttaggttgtaaaggtgttttgagacaatacaacaacttcctgagaagactgtatgagaacattcagattaagttatatttagtttgactcattatgaaatatatgtaatttaaattgtataaggaaagagagaattacttattattcctcgattttgatcatttgcaaaaatggaaggatccttttgtgataagtaatgcaaagctgtacatgtaacttcaaagtcgtcggacatccatgcaatagttgaatcttctctttcactttcaagcagaatatttgctaaatctacattgaaaatgttaataattagtacgaacatttcaaattaaaagaataaagtgtttggcagtacaagttaagtgatctttaacattttttttaggaaaatagctagcctcataaaactactaacacacctccatgcaaatcacaattgtgat

SEQ ID NO: 219798 - DNA, 3818 bp, Cannabis indica
agaaaatagggatgaatagagttgtctaagcgattaaataataaaaataacactaagatatatactggtttaagtccaatatatcgatgtgatctatggctccactccagtttcgtaacaccaccgaaatcctctttattgattaagcaagaatagggtacaatacagtcgagactgattctctattggattctctcaaattgtttactctcacactcttacccaagaatcttcttcatctatagaagaattttcatacaaaacccaaatctaatatctcttttttctgtatatctctatctctctacctctcaatctctctctttgaaattacctcttgaaactcttatgatgaatcacaccttgaactaataagtgttggtggtatatataggctcgggataaagatcctaatttggtggctgtaactgttaagttagttacgacttaacaaacttaacaactcctcaaaacagaatctccatgtcaacataagacaaagcgcttccggacgagcttccaaaatagagaggatcgaagcgtatgctgaagggacttcccggataggaaattagatagttggagttgactatttggagctcctttccaggaggaacaactagctatctggaactcctttccggaggaggagtatctttcctgaagactacacccagaatgaacaacacccttccggattatcattccacgagacttctttcagatggacaagttagctatccgagaaaaaaattttgagagacaactaactttctattactagaacaatcttatgaagattttttcatttaaaaaaattataccacgttaacttataacgggagttgaaaattaaaaatttcatgcccccttaaaatttgaattgtatgcttaaaagtggcacctaatttaaaaatgttacacttttttatactatatttagactatatcattaccttattagtatccaaaatattcatatttcattacatgtctttcaagagtttgaaacttagtctagttcttggtgtgattttaggttttaggacaattttacaactcaatggagattagaaattggtctaaaaagtaatagttaaacaagttgaatatcatcatatcatatgtcctagttaagcaacattttaatatatgaaagtctatgtatggttaatgtagatcatggcaagattttatgatttgccacctgaaatattggaggaaattaatcttgttcttgatacaagttttgttattcccaaatctcgaatttcattaaagacctgacatttgttttcaagcacctcgtaatgactaaaacctagtcctctatgtccttatttttccagtggtctttcctctatgtggatcataactcaatcatatacccgtggttaattataatttattatgatgatgataatgtgaactatcaagttataactatcatatgtcatatgacattaatattgtgctttctaaatatatataacaagtgaaaaaagatagttttaaggagaagataatttatttatttatctgatattttagataaagatgccgaagttatcaaattctagtattaaatgctcgtgcagtggaagttacttataagttttacacttttgtttaactgtttaaaaatgaaaagagtttagacttttgttttgtagatgattgcatatgttattggattggaatgtacctgccaatattacttataagaataatattacttgtctagattgttttaatttcttacaatttttgtaacacttgcttatatagaacaaccaaaagatatagattgattatagaactagttgtgcgtgggagtaagcctgaaacaataaaaagatctagaagcccaacaattggaaaaatcaataattgactgcagttaggccatgtgtttaagagaaactaattaaactcacaattatcacagcttcgtaccaaatttattatgttaataatatttgaaatgaagtttaaaaagcattaaagatcatttgtaaagtgtgatgaccaacatagtcgttatggccaaaacccaaaaggaaatatgtagtggaattgaattgggacaacttattaaaagagaattagtagtggtcaattatagaaaaagtcacataaaaaaaaaagaagaaaaatagtgaagtgataatgggtagagtgtcccatacacgtgggagtcaaaatcatgattgatgaggctaagaagccagcttgggaaatctaggattatgttatgttatatgtatgtatatatacagtgagttggaagttctagaaacgttgttggttaagtgtaagtgacgtccttggtaacgaaaggggacatgggaccccttcaatgaattgcattatatgtaagagttttcttggcctttgttttatggttgttgagctataaaacccattgaatgtgacaaaatagagtacatgcattgtacgcgcgccaaaaaaccaaccaaaatcattatcaatatttatatatatataaatatgaactcatcaattcactactactctcttaaattcctcctctttcattggggcatttggtccctccatttggatttgctttgagctacctctgcacaaatttgctgtgtcttcttcaacaccaagtctctgtcatggtccatccatgctccttttatgtcatttcattttgttttgttttgttttcttgctctttttcttttttagtctttaactgggaaaatccaaaggtggtatattcaaggtaatatcacagtttcaaaccgtagggaaaatcttgtgttacattacacagtataggatctttagaattagaccctgttgggcttttaaaagttactcttgggcttctgaagttccaaaaatatttctatgattagataacgactaggtttcagtttaaaaaattatcttaattaacagaaacaagttgtagtagctagctttcttagtatatatcgtgcatgtaatttattaatttactcttttaaaactagaaagcacagtaatattatttcgtactaaattttataatataacaacctcgaaatgttttttttatgattacagttatatctaaaattaaacattacgtcacctcactatgcttaatttgagcaaattaacactttcttttctttttcttcaccaacaaatcttcgaaataaaagagagtaaaaagtaaaaaccattaattttcgaatagctaagaggaaagaaagaaagaaagaaaaaatagaaaaggtaaaataatttggagtaagacaatcgcatcaaatgtgaaatggattgaaattgaggaggataatgctaaactaagagagattcggagtagaagatggtcccatgtcacaggcttccagctccactaatttcgatttcccatgtgggaaacctctatccaattggtctccaaccaataatatcacgccaagtgtgcacgagagcgttatgttcacgtgtgagccgtagtaataatgggatgagcaatgaagagttcggcgggacctactttggcttagttttaggggaccacatcacacaaccaattaccaatggcagccgagccgatacatagttaggaacttaaaagcctgggttatctgagccgacagctcattttccattagaagaaagccaaaaataacgcgggtgagaatgagataacagtatttcaccaataaaatataacagtaattaaaaatcatgagtctttttcaaagaaaaaaaaatgagagcatttattgagattttgacattttagagcaatgagataataaatggaccacttctttaccggccaggcc

SEQ ID NO: 219799 - DNA, 3297 bp, Cannabis indica
tgcagaaaaggtaaaactgcaaaattgcaaaaagtgaggcccaagtccgctagtatagggccggccacttttataggaatttacctctgatattttcattattttaaagaggaggttgaagcagagcaagaaggtccagccaagtccactataataatgtagacttggttttaagtatattaggaaattggccctaaggccgagacaatggtttccccattgtggcactttttgtaaagacaaatttgctagtttggatgacatttgcttttattttatctttattaaatgcttcatacttttattcttgaactttaatatatacttgtttgcttgcattttcattcacaatttaaacaatcatattatgatcaaataccaagtactttagaaatttgcattgctcatatatccctttgataatatctaagtatttaattatctactatgtgcgcgagcagtttattatcggccatgcttttgatctacgagcaattatcaattctgcctcacaataacagttataatctgtttcaagcaaacttgaatatacttttaatgatttatcactttgtatatttttgattgcttatatgaatagttaaattgtatattcatacattaggtttaagtacttttttcaagacaccttgatgtctcgtttaatacattcctatacaatgcgagtcgttagtatgaagcttcacatgtgagttatgagttatatctcatttataacttttgattttcctttctcgtcaaacaggattttaatcaaaaagttattcataatagttcgatcctccttctcgtcaaaaaggtttgatcaacaacaacttgaaaaaaaaaattaaaaaaactttaaagttggtgggttttcactatatcatgtatttccagataaattctggttaatcctacacatatgctcctcaagtaattttaaagactaacactttgtaattacttgaaaaaaagaaatgattcactttattcataacagaagttcaaaatattacatcagaaatgtgagttacaatcatcagtttactggtagtatggtcgcaaatgttccatgttccagtagttcgttattagcgagccattcagctgagccaatttgtaaacccttgttcctatgaaaaaagttttccccttgttttttgctcttgcagctcctactaaagctatggcaaaaacaaggtaagaaacgaatggaaaatcctaatatgcaaccaagaaattgaggaagaagggatcgaatgctggtacaactgagattcgttcacaaataatggaagaactaacctatattaatctgttggagcaatctgaagatgatgaggataagatcaaagagttacaggggagaaggggattggaatcgaatcaagctcaggaggatttattccaacctccactatctccttgaagctcactgaaagagattcaaagaatggaggatgctcagaaagactttttgagcttcgtcaaagcaaacaagcaatgtaacagtaacattgccaaaggtatgtctataactccacctgttctgtgatatacaaatgtaattcgtaatcttgaaagctcttttaacagctttagacagggaagcaaggtcaagattgaatgggaggacataaaagaggaagttacctattggaagccctctctggtgtgctatgtcctaggatcaaatccaccattgcacgtcttttagggttttgccaaatgactgtgaaggtagacaaagtaaagatgctggcatatggtattttcattatcagatttaactcaattgagaacagggattcaatcttgaatgggggatacatatttttcaatagaagaccagtcataatgaaggcatgggatccgaacacaaactacaagaaggaagatgtgaagcaaattcccacttggatacaacttgaagatttggatctcaaatattggggccaaaaatccttattcaagattgttagacagctagggaatccaattatggtagatgttgtcactaaagaaagggagaggctcaactatcctcgggtattgatagaagtattaatggagtaagaactaccggagatgctagaatttgaagatgaacatggaatgaatactcatgtgggggtgcactatgaatggaagccaaccatttgtaaacattgtgatggtatgggtcacttgacagaggagtgtaagaagaaaatgaaggcaaaacaagaatgggtgattaagatagataaaaggcttgaggttcccaagattaagatggatgagcatggctttcaagcagtcacaaaggggaaaagagttcaagatcagaaggtggctgctataacaaaaatagataatatattcagcattcttgctgaaagcaatagtgatcaagtggaggatcaacaagacttattggacacaataattgacaatagaagagaggggggaggaccctctcttagaaatggataagtttctttgctggaatgtctgaggaccagataacattcagaaacagaggtcaattacgcaattttttcaggcttagaatgttggtttggtggggctcctagagataagagccaaggttcacaagatgggaaccttgtacctcaatgtgtttgatggttggtgtttctcaacaaatattacttggcatcagggttggagaattgtaattgcatggaatctggtgaggtacaaggttgatatcattagatgcacaagtcaattgatgcatctaaaggtttctactttggacaacacctattgtagctttgttactataatatatgcctttaatgacaaaaatggaagacaaagtttatggaaatatctgagggagttggccactaaagctaatttgcttttgatgggagactttaatgaaatattggccaaagaagagagattggggcagaaagttaaatactaccctgacacagactttgctgattgtgtgaactattgccagattgaagatatcaaggccacgagaaatttcttcacttggtcaaataagcaacaggggaatgacagaatttcttccaaaatagacaagagcatggctaatcaagcatggttagatcactatcagaatgctgaggcaaacttcctaaataagggtctgtttgacccctcttctggcatactctctctgtatcctaggtggacaagtaggaaaaagcatgttagatattttagaatgtggaagagctatgctgattatgaacaaaaaatatctaaagtttggaggaagaagattgctggaacaaagatgtaccaggtggt

SEQ ID NO: 219800 - DNA, 3706 bp, Cannabis indica
atatatatatatattacataaaagactcaatatatatccagcttttacgtacattttgtcatcaaaattaacataatcgaagaagttgaattcagtggaagcagaagaagacccctatggaaatggctgaacatttggaccataccactcctaatggtaataatggacaagtctccgatgccactactccccagaatgaagatcttaatgagtcgcactcccaatccttgattgctgagtcttttgaccatgaacaaactcttgcccacgatgaatctttgaagaatcttcaagtgatacatttggaggcaaatgctaatgaagatcagattcttcaaggtaacattttctttctttctttctttctttcttgggtcatgtatatagaaactaaagatggtctacatcttcaccaactcagatctcataggtcaaaagattgatcaagaaataaaaaaatgtgaagataaaaacgatgatcttgacaacagagccccaaagcctattgaagatgttcaaaaggtaaatcaatgctccaaataaatgcaaaacttatattttcatgatcttcttcggttaatgaattaatgtgtttttggggattgtaattaatttcgagaaaaaggatgatgagctatatatattccaagaattacaccaagagttggaacgtatggaacaacaagcaagtgaaacattaaaagccatggatgcagagagccaacacttaacaagagtaaataataagtaaatacatatctagtacttataatattaattacttgttttaatttcaaagtaattattaattctaatattgggacactatttaattctattgccatgatcaagactctctgacattcttggagaattgtcgcgtttattacaagatcgtaattcagatattaatgttgttgacgaggcattgcaacaaacacttctagctctagatatggacaaggtatatgaatatattaatgttgttatttttgctctattattagtaacataattattaaactgcatattgttgatctcagtttgacgaaaatatgattgacaaacgacaagatttaacatgtgaaatctatgataaatatgacaaggtaatgtatatatccactttttcttaaaacaactttcttcattaattattaaattatagctagcaatagcaacatctattttcttatgtatattggtgacatttaacttcagatgttggaatatgctgaagtcctatttgctgtctattcgaccactgagcatgacaatgacactaatattaattatcctagtaatcatcacatgaatgatgatcaagatcaaccattgccacccaatgataatcttgatcagattaatcaacatgatgttactattcatgatttggagaagagcagcagcagtaggatggcagcgccaccaccgcagagtatggcggtactgacagggaaggagaaaaggcaggtaagggctaaggagatgcagaataacatgcttaggcttcgggaaatcattcctgattcgaatagtactaagatgaccaaatctcaagtgctccaagctgcttataactacatcatatttttgaagacacagcttggccttgatcatatttccaggtaattatatttaattgttctaattttctttctttgaaaaacatttataattattcagttgtttttgcagcttgcttatgttgaatagttttgcagatcatatttattaattaatgaatttgtatgtgaaaacagaaactgaagatgggtaataaagaggtgttagcatctccaattgttcaggagaaattgtactgatcagaacagaactgtggcttcaaaacaatttgttgatcgatttactaaagattagtactattgtattgatgatacaaaagagagattttagtttttttcataataatagtgaatgttacatgattaatattaatagtgaatgtttacaaaattaacctattgaccgaaaaagcaaccacaacaaataaagccttggacccaataatttatacaaaaagagatagaaatagaacataaattgtgttttctaaagaatgattttgaaacaaaaatttaaattttgcatgttaaatactgtattattctaaaaatgtgattggttgtcattatttaataattttaatttttaaaaaattgaatttgttattggttggaaatctaaaattaataaaaagaaaatagctaattaggatttttagtgacttaacttttaatatctaatcattaaccaaatcgtgccttctgaatttttttaggtcgtttaaattttcacccaggacccatttccggacccagacccagatccgaaccgagactcggggcccgaactcagacccggacccggactcgaagtgggatcgggacccgggacccggaactgggaaccgagacctaggaccggactgggacccaagactcgaacccagacctggacccggatccaaactaggaccctgactcgagctggccccggactgggacccgagaccgagacccgggacccgggattcggatcgagaccgagaccgggacccaggaccgggacccaaacccggtcctaggaccctgactcggacccaaacttggacccaaacccgacctatagttggtgttggggtcgagtttattgaaaatatattatctttacacaatctattaatacatgtcaataccaaacatagtattatcttaaataatactaatacaaaattaaaatggatataaaaattataaattaatattaaaattcttaaaagaaaaagagtcgggtcggatctgatccgatccgagtatctaatctagcggaacggggcggggcagatccttacatgatctggatcatgtcggatcatagtcggatcagttccaacccgatcaatttacactcctaggggcactatttggtacatgaataattgctacattagtgaaattgaacgaaattggacagaagtccttgagtctagcaatttcaaaaattctaaaaaaaatttaatgacttgaaaagtttggaggatataatttattacataacaaaattcaaagggtaaaaattttaattagcttaataaaatctttagagaatcaataatttagaatagagaaaacataaaaatatttcatttataaaagattattaatattagttattagataatatatgtgaagatataatattcaaatgatatagagaaaaatataaagaagccgatgtatagtgtaatgtaaatatgtgaggtaaaatagaaaaagtgaagtattttaaaggatagagtagagaagttattgggagtgctctaaaaaagtacgttgagaaccaattttcctaattaatttggattcgatcatctattacattaactatcagtgaaaatgtatgaaatctatattttctttcattattattatgtaagcatcatattaaaaaaagaagacgtaatattgttaattttctattataatttttttattaaattttgtatttgaaaatacaaaacgccccaaataattaacacgtttactaaggagagtctcacgaaatcttccctctttgcctttaattacatttaaaaacgacttgtaaatcttattatgaccgtctctcattggttgtccacaaatttcaatatcaagaaaggtatctacaacttcttgtacca

SEQ ID NO: 219801 - DNA, 3941 bp, Cannabis indica
tttttttttttttcgatggaattaaggttttatgaaaatcgaaataaaaaattggagaaagaggggtttgaacaatgccaaagagtatttacaaatcgatgtatatttgttaccttcgtagaaatcgtggaataggaagaagaatgcagcagagataaaaggtaaaaaaatcgcagaattaatggaactttgattgtgaagaattttctcttaaccctaattatgggtaaaattgttatataattcaggtttgtacatttaaattttaataggttttaatggagcagttagatttaacgtaaaaaaaaataaaacaatcgttaaatcaagaattatcgttagatagtcacttttagatagtcacttttaatatataaagatattgattaaaccgaatattgttacgacattaaacttaattgaacttttaaggactccaatgcatctttatgtttatttgctcaacaaacaatattatgggaagtgagaataatcaacttccatattttgtgaaactttatagagaatttaattaattgatgtgttagataatattatgtgatgatccttaattaaaagacttgagttttataagtcattagttagttgttattataatttgtaattaatgtgggagcattattattattattattgagactaataattatattcatgtaattaattgttgtctgggtaataatttctctcattagtagatcttgaccttttaatttttatactaattaataatccaaaataaaaattgtacaaccttaacaaaataagtaatatagatagattgatttttctgtacttttttttttttttgtaagaagtatagatagattgagtgatttttataatgtaaatacctagccattaagtaacaagctaacattcacttgttatttttttattagtatatttaattgaatttttaaataaaaaataaaaatttaatgacatggatcaattagagactgtcatgtgactattaacttaacatttaacggttaagtatttatgtaagttttaattaatataacttaaatattataactgttaaaaattacacttaaatatttatttataatcgattaaatttaaatatttataccataaataacttctataataatggtacattttctttaaaaaaacaataataattgtacatgtaatgttatagtacaaacaagttaccaaatgttatagtacaaacaagttaccaaagtcttataattaattataatctccaagttaattaagttggaatattgtatcatcattatcaagatattaacccttaattattccaaattaattaaactataattgttttgtgttggttgttaagacaacattatcatgtatacaaatttcctctatttatgaaagcacatttgagctttgagctgtaaaccaccaataatttaaattaaaataaataaataaaataaaacaattgtgggtggtcctatcctatacctatattatatatgtatataattatttataaagaaaaattcaagatattttatcttaaatatttatatatcaaaatggttaaaagggttaatatgtatacatgggaatatgaaatcatgatagttatttgtgaatgatgttaaattagattgcaataattttataattttatgttaaatttagatgttgagattgatcattggcatcattcaaggaaattgatttgtcacttttcttttttttacattatttgtatattggtacttgtaccctttttttaattgcaagttaacccctatattttatataatggtctatttttttatttatttgtttatatttgaaaataaggtagtggtgtgtctaatatgtaaatatattgagtaatttgtggttaaaatttttatgtttttatttttatatagttaagttattggtgtgtctaaatacaactattgatgctcttatatatatttgtatattttatatattaaataataaaatgttagtaaaaaatttatttaagaatacattaagatcaaataaattatattttaattgataagttataactatatagaattacactaaaaaaaatcaaaataccaaaaaatatcaatgtaacaataataacaataaacaatccttaataatacatcataataaaattatttttgagtaaatataatatttatatatgtattataatttagaataaaattattaattttgcataaataaatttacaaactatatgtttatattttataaagataaaattatttttatataaatatttatttttttaatacgacacttagaaaatgtataaataactaattacaatttagagattatttttatttataattgacccaaatttagactttagtttttttataataaattaaaaattatttttgaataaagtatttttagatagatatttaattgtattattgttgtaataattatatatagttattatcattaataaatttgattatgttgaaagagaaagcaccaccatctaataaataaaaaaacaatagagaagaatttagaaaatttgtggggtaatcattaatagtgttcttttttttaaaatggtataataatgaattcatgatgtgagtttttaatttctattttgataaaagagaaactcaactaacttacctatcattttgtgtaataaatgaaaacacaagctctaataagtgcactaatcattctagtgtactaactttttgtctaattaatttttcttttttattatttacaacataaatacagggaattattatgcttttcattacattatttatagaataatgttagatatatatatatatttaaattgcacacaattagtaatgtataataaaatatttactattgagaaatttgtggctaaatttgtgtgtatttacatttctatacatttaattcttttatcttttatatgtggcaaaactactttatattcatttctatttacaaatttagattttcagttaaatattactgttaaacaccaattaggatcactattgtagtattgtatatacttatgtacatgtatttattagtctaaataatttttattatttaaatattatttaattaagataatatcgcttttaattatatgtatgtgagtgcgttataattatttaacttatttattttagggttgcatctgcgtgtggaattttaaaaatatataaatgtaaaattaagattaatttttttttaaaaaaaatgtattaaagtatattttttaaaaaaataaaaataattgcaattagtctaaattctcaaaaaaaatgtaaactaagtaaagacaaaggaagatttattaggtttgtcaaacaaacaaatgaggtaatttagtaaataaaatgaaaagtggagaaccaagagtgattaaaaatttatagtaattaaatattaaattaaaaataaaataaaataaaaaattaacgaaggggtggcagacaaaacccaaatccacattagaaaaataaaataatcataattactattcttttattattattattattaaatatatatatttatatatatataattttagaagagttattttagaagattttctatctgttttagtatttaaggaatccacacaaaaaattagtcttattttttttttatgattgtatatgttgtaactatttaagattacttataaattttcagaaaattactatattagtgagacagaagaagaactatgaaaataaataatttttattattttaaaatataagtgttgactaagaaaattgtcaactgactcagaaactaataaatgtcgattaatcaccaataacaagttaagaataacaaataaatagaaagaacacacaaaattataaaggttcaacccccttagatatgagtaatgtgacagtcagtagtcc

SEQ ID NO: 219802 - DNA, 3136 bp, Cannabis indica
aaaaataatagagagagagagagttgatacaccagaagcaacacgttatcaccatgcaaaaatgaaaaatctgaaaattaatgtgcatttaatatcagactagaaagaaatcttaaaaaaaataattgttataatttattataactgaaaaaataaaaccagcttaacttagtgtatataatactgtgttttagcacatggttttccatggtcttctaattttggtagttttaattaaattctgagaaaggagcaaaaagaagaaaaataataccaaagtcatctaaaaaagattcaataacagttacaaaataatattacatatatttttatatatttttcttaaacttatacctcattcgtgttatttcttaaactttatttcgtagtttttatatatttgcattccaggattttgatcaattattattattattattattattatagaatatgtgagctaaattttatatatgtttacataataatttttaacaaatgacaagaagaatgtatatacaacaattttaaaatatattctaatttcattgcaaaaaaaaaaaaacaattttaaaatatataaaaatatataaaattaattaattatctactttttaagatggtaacattgtagcatgtagatatattgttgtaaaagaacaattacgctaaaagttaatcacacttttttttggttaattcaaacatggttcataaacttttaatatctttctcctaaataaagagaaacaacaacaaaaataatattatacagaatgtaacatctaaccaactatgaggtaattatttaaatttagaagtgaaatcagctgaatattaaagaatccataatcaagctagtcctgatgatgagtagatagaataaacttattccaaaactatataaattttgatacttttttcaaaatctctttttctcaagaaacatatgaaattttttagaatatatatagtttggaatagtaaaataattaataattttaacatgtatggtattattgttaatgaatattttttaaaaagtaatcgtatacttcttcccatgcaaacgaagtttataaacttgaatatactttttccgaagtaaaaagtaaaaaaacaacaagaatgttgcgataaatgttttttttttttttgagtgttgaatgttgcgataaatgttaattaatgaaataatgaatatacaataaacaaatattttagcatgaaaactaattttgtaaataaatatttagcatgcaaggaaatattgtaaataaaaagtgaagtaaccatacttattttagtacaaatgacatttacaaacttaaacttttctcgagttaagaagggaaaaataacaaagtaatacaataaatgttaatgatcaaattatgagggtacttattaacaaagtaaaccgatataatagaaataaattcataacaaatgagtttcaatgaatgggactaggacgcatcatattgtctaatttcttagacttgtaatacttatttaaatattctttgcaccctaaaagtttaacttccaagatcttctaattttagtaatttaatatgcttatcccatgcccaaaataacttattttaacccttacacaacatatgataactatagagggaccttttgagactctaattgctcaagctacttatttgagtattttttttttcttcgtctaaagtttctaaatttttaaaatggtaaatgtgtgtgaacattgtaatatgttaaatgttattgtaaactaattaatatttgctaaaatcatggtactatgtttgatacaaatgacatttataaacttgaatttattttgcttagataattaaaatgaacaaaaacgcaataatgatattgttacaatagatagctagctaattgaagtagtgtaaagtacttttttaaatgtttttttgttttttttttttttattagaataaataactattataataaacaacgtagtcataatagaatgtatagacattagatgaggtggtaatttactccaactactaagtcaatcaatgtccactgaaagagcatacttagctgacactaaaagagagatatttactaacaaacaataaaatcaaagacattaacttaagtagactgtaatctaactaccataagagaatctaactctatgtagtgaattggtaagcaaagatctttaggccattgcaaaccatacatcaaggttattgcttacatctggtcaaaaacaacttaggaaaggtttagacattgcagcgatgatatcacccctacaattatgtaatattgcaccaaaagtagaagttttagccattgtgttaacaatcacatctatatatttaatttcaccctccctaaatgtggatttaaccattgcaaagttgttggaacaaccttggaagacaattcacattgagaaggaatcaaacctgtaggattccaggctgaatggaattcatcaaggtatgagatagcaaagtataacaatacatctaaagttttaggctttgttccatgatgttctttgttcctttcgttctaaatactccaaatgatgcaagaaaattgctccaattggaggtttgtctattctgtagactcctgaagcaataattattttagagacattcagttggagaggacaaaatcttggaaaaaattcaaggctctccaaacacgcttgggacatttgtaaagaaatggagcatgcgtaacagtttccctctcaaactgacacaatgagcattgacttgtgtcactaatatgccttgcatgaaggatatccacagcaaaaaaacaatcatgaataacaagccatagaaaaatacggatcttggaagggatagataacgactgaagtttcttccaccattgtaaggaagagggtgaacttgcaacaagttgctgctcttcaagttggttttctagtctatatcgagatttgactgagtatgaaccatgagattcatgatgccaaattagttagtcctgctaagtaaacaaagttaatgagatgctttgtatcctctcattatcagaatccaaaaagaaggattttaaaagggggatattattgggaattatgccctaaaagtaagtaattaatagataa

SEQ ID NO: 219803 - DNA, 2213 bp, Cannabis indica
atttaaaatattttaatttaatagtacttattatattatttgcatttgtccctcctaaattttcataaatgaatgtttagtgtataaatttaatttatattttctatattattatctcaaagttattcttaccttgccacagctatgtaatttgattttgtcattataaaaaatgcacctaagtttaattaattaatttgttgatattatagaaccgatgcgtgaacatgatagcacacctgttccacgctccattggatgaaacagaggctgcagtgggagttggaacagtgggatcgtccgaggccataatgcttgcgggtcttgcctttaagagaaaatggcaaaacaagcgcaaagctgagggtaaaccttatgataaccccaacattgtcactggtgccaatgtccaggtaattatttatttataaaattaattattaatttattagtattaacaaaattaattaatttttatgtagtatgtatgtatgtattttttttaggtatgttgggagaagtttgcaaggtactttgaagtggaattgaaggaagtaaaggtgaaagaagggtattacgtaatggacccagtcaaagctgtggaaatggtggatgaaaacactatctgtgttgctgctattttgggttcaacctataatggtgaatttgaagatgttaaactcttaaatgatctcttacttgaaaagaacaaacaaactgggtacgttaccttatatatataacaaaattttatacaaaatatcttcccacaaataattaatgaattaaattataaattatgcagttgggagaccccaattcatgtggatgcagcaagtggtgggtttatagcaccattcctttacccagaattggaatgggatttcaggctaccattggtgaagagtattaatgtgagtgggcataagtatgggcttgtctacgctggagttgggtgggtcgtttggaggacccaacaggacttgcctgaagaacttatttttcatatcaattatcttggtgctgaccaacccactttcaccctcaatttctccaaaggtaattaaaataataaataaaatttcttaattatgaccaaacgtatcattgtacttattctgtgttctttatttttcacaggttcaagtcaaattattgctcaatattaccaactaatccgattgggctttgaggtgagaatatagttagtaattaataaatatatttatattatttagtaagtctattaaaagaattaatattcagtaaatttcttatttattttgacatacagtaaagctttttaatttaaatttttttcataactatgtgttatacaagaaaatattagtgctgtaacatggcatacaatacaagtgcaaaatatactactgtaacatcatagatttaattaatttggattttgttacatttattttcaggggtaccgtaacattatggaaaattgtcacaaaaacgctatggtgctaaaacaagggctagaaaaaacaggtcgttttgaaattctatcaaaggacataggagttcctgtggtggcattctctctcaaagacaggagccgccacgacgagttcgaggtctcggagctactccgtcgcttcgggtggattgtcccggcctacacgatgccagctgacgctcgtcacgtcagcttgcttcgtgtagtgataagggaagacttctcgcgcacccttgctgagcgtctggtgatcgacatcagcaaggtgttgcaagagcttgacaagcttcctgccaagaatggcaaaagcagtactagtgatgatgaagttgatgtgaccaaaaagagagaagatgagattaagaggaacattgctactcattggaggaacattgtcatggctaagaaggctgataagataatgctctcatgcagttaattaccttaattatataaggtgttcttaattaataaccatttaattttgcatgtagtagtacaatattattattaactacacatttattcaaagggttttttatttttgtatttgtggagattgagtcttgacaatgctctttctctcttggcatcaattacaatgtgtgtttgttctcaatgttgtgtaccaaccatactaaacatttttttttgttcttgtataattaaattaaaaattaataaatttgtcttgttatttgatcgtgtttaatattatttatatttctcattt

SEQ ID NO: 219804 - DNA, 4944 bp, Cannabis indica
aatgacaatattataataaaaaatgtatattaaaatttatcataaataattaatgacaaaaaattgaaaaaaaaaaattattatgtgccaaatatttagtataattttggcacaacttttttagcataagtcaaattcagtacaaaatttagcactcagagaactaatttttttaaaagtactaaatgttattctaattttctcacagggtgatgtgatgcccatctaagtgatatgtggagaagatttcataacttgtacggacagcatgctccatgataagttgtttagagtgatttattacttataaataattaatttgaagagaaaactcaaataatcggttagagtatactacactattcgaccagaataaatgtagacagaatctcttcaaggatattctctaaataatcaaacaatctcgaccaaggccctgattttgtggaattaattcacgttggcagaagaaaaaaggaaaccatctagttttttttttatcattatttctcttgatttagaaaagttattaagttttcttatttatatgcaaaccatgaaacatatttcaatacctccaattattgatctttgagcttaaatcccagtgtaattcgaattgggtaatcggacttctaaactctctctactctctattttcacataatgaaaaaagagctcgggtaaaagtactctaatttatagttaaaatactcaatttgcgttacattaattgtcaaaatattttaataattaatttaaaaaataaatatttagtaaatcataatctaactatatatggaatattaatttagaattaattataatgaatatcaatttaatctgtgagaaaccaatcttttgatttcaattacgtgtgaaattaaatgaattgatttcataataaatattaaaaatattctaataacttacttttagattttagaattaatggcctatattttttttaacattgtaaaataataataatgtacattatatccaagttgtcaaaaaagaaaagtatcctcatagaaaaaaaagaattaaatacctaaaacatgtatttacatctctggtgtactccttagataacaattaatgtaaataaaaaatatagtattgaattaaaaaaaaaaaaaaaattaaagtgtctgcaacattattatctctcttgagttcagaagggggcaaaaaacaatccatagacaatccagaaatgttaaatccaatctcttcaatcttccatgtctcctcaatccttctcttgtgattatgagcttctccatacctataaagcatggctgaggtgttaccactatgagctatgttaatcccatcctcgtatctgtaatcctctatggatgatatcattgttgtttcccaaaatacactactactttccttgttgttctttcccttcatgggcttcattctaactagttttgtgtcttcaaactggatcagaagtccagtgcgttgactgaagtaaccccacattgtatgccgtgatatctcagtttgggccgtgctttgggccttgaggatgtttggggccgtttctagcctcaatacaaaacagtcatcattcttaatggttttctctcctacacatacaccttcaagaaacaagttggctatgcacctggggtccaatccctaataattaattaaaaacacatatgacttagaaatagaatacaataaggtcactgactttttctttaaattattatctttattattattaactatgctattattgctcacctaatttattattcctgctgaaataaatagctcatatcaaatgttaaaggtacacttaaatttcaaataatttctaattagacaaaagtgcttaaatacaacaatctcaataatttaggggcatttttaacaaggaacatgatttggtacatgttaaaatttgaaaagcaaaaatcctaattaactttattaatatattgtaatatagaatttttcaaatttaaatttaataaattatataaaaaattactaataagtagaagtgtgtgtttgttacctttcaagttcagtataaaagaatgagaaatccattttcacttgtgtgggggtgaggtgagggtgagggatgtttattagtgtatatgtattgtcggactacttttattttctatgaaaaaaatgctaataacactcctttctgtattagattattattaatgcaattaagtatcaagttaacatataataattttgattagatatttgttacatgagtattgagttagaagaagtttagactaaaagaatatgaaactctaacgttggaggaagctaatattacatcattttaatttaaaaaatgaatttcacttgaaaatacaaattttttagtcattaaaatttaatttacttaagtttgacattctcattcacatcaactctaatctcataccaaataccaaatatcgataaccaatcataaaatgccacatttaaataatgctagcgactactaatgtccacttaacaattttttttttctttgtgactatcaatcatcattgggtttatgtattttgatcattgggttgtttcaccatgatgtaatatgatataatatatgtaattgtttaggaatggaatgatccccaaattataattacctggaagaatcgacgaagtggtctaggagggcctttgttagcatgagaaggttgagaagaagactgattccaagcgagtttgccatcactgccggcactgactttgaagccagaaaccacaagttctaagtaccacaaatcaggattcatttgccaaagcacaaacccaccaacctcatgaccttgcttccctttcgtctttacactaacaacactatcatcaccctctttcatttctgaccccctcatcttcacctgtcccactgcgtacatgctattgatcgagttcaacgcccctaatccccctgttgctgccaaatattgttgcaatatatactttgccgaagaagtttcctgcattttttatttatttttaaatcatattaacagttgatgaggaaagacattaatttattgagacttacaatggaaccagttttaattggacgagttaggagaacgttgccagattggagctgaagaggaataagaggagaaccaacgagtttaagcaaagccataaactcgttattggatccagaagagagatgggatttatcattattatcattattattagaagagggaagcttattaatattgtcaatggattgtgctttcatcaaagaccgtagattttgccaccttaaaaccgcgttgctccccatactggtgaacatttcttctgggataggaacctcaacaccgtatccagcccattttctttgtcaaaattcggaaaaagcttcctcatagattagaaacccaattcttatataatatatatataaaaaatgaagaagcaataattttttatttaaaaaaaaaaaataataaagaaagaaaagaaagaggaaaaaaggaataccttgatataggtaagagtagtattatgaatatgaaccctttcccctctttctctacggcccctctaaagtggcaacatcctattaagaacgagtgatttaatggtcagaatatgcaatttcatacagtgaaggggctagggtcgatcgatgaacaattgagagacaatgaaacaaaaaaaaattgaaaaaatgagagaaacagagagagagagaggctttccttgtgtgtagatgattttgtgggcacgattttgacggctttcatctttttatagatatatattactaacttctatatataaagagccatttaagacctcttataattggtatctataaatataataatgtctatgattagtcacattggattagttggggaaaaaaaattatataaattgtgatgagtttataattaagttgtgggtggttgcgtttcttttaatgaaaatgcttttaattattaggactatattattatattatgtatatatgaaatagagaagagaacatgctatgcatacgcataacgcaacaagttcccaacaagttcccaaaagaggtcaaagttttattttgacacctaaattctgtttaaagctatatattgtgattgaatatctcattaacaggtctttgaacacttagggtgccccttatttgactagatgagtgatcatttttcagaaataatctagaaagataatatcatatataatataaagtttataaacgacctattttacacataccctattcaatctatctcaaccatacacttcacattctaacatcatctaattcaacacattatcattatgatcttttttacataaagaagtgtaattatataaatgaaatcaagataagcctcatgactattacaaatagtgttatttggtattgagaaagactcaataatgctaattatattttaagtaaagtacagacttaattaaattgtgagcaacaaagctaaaagatctaaaactctttgaataattacatcccaaaaatgaatttataagacttttacaattagcaacaaagttgtcaatttcccacctcgagttggcaattttagagcatttctaatagcgatatcctttaaaggtgtcaaaaactttcacattacctaaaaatataatattttattttatttatctttcacatcatttttagtattttttattctacaatattctaatagtaaacagttttgaaaattattaaaataatattatattattatttaatatatattaattaattaaattttcttactttatgacaaaataacgataaataatgataccctcagttattaataatgattaattggtcccttatgtttttaaaaattaccattttagtaccttaagtgcatttaaaattttaatattttcaaaataaccctattt

SEQ ID NO: 219805 - DNA, 1943 bp, Cannabis indica
attgtactgctgctctttcgtcaccaccaccaccaccatcacagccatctccacttctaccaccaccaccatcacgaccctccccaatacttccaccaccaccaccgtcacggccaacgccaataatacttcctgagcaacccgccaattatcacatgaaaaattgtccagagttcaacatcttgccacagttgtgtattcaacagttttatgactactatattcacgatcagccgatcagttcttcatgttgcacgacctatcttagtgtcttcaacacgtgtactaaaactccatggtcgaagatcagcctcaaatgccatgattattgccaacaccaactctcatcaccatgaaatgctcaactagcacacactacctagctagggtttcatatcttttaagtttttaatattttaatcttggtagctattattattatagattttgctttattattattattattatctatttatgatttcttgatagaaattttcattattaattagtttaagaaacgtttttttttttgagaattttattttattgatttgtgatagcataaattaaatcaaattgaaaattgatgcatttgcaacgtgtctaaagcaaaatctatagagtgctagtacaaattaatgaaaggaaaaaaagaaaaactaaaatacaataattaattttctagtatcaaaaaagtaatatttcgtcataaaaaatttaagcacacagcaaatggtcaatgaaaatctaaaaatatgggcaacatatctcgccaaaataatctcaaattaaatatagacactcataaattaatagaagaacactttctatcaggaatagaatatttttattaattaataatatgatatgataattaattaattaattaatgtgttcttcaactttgacctctttccttgtgaaaactgatcaatgagctgtgaaaatgacttacggttgacaaaacgacattaatcatcaaataaacgacattaactgagaaaaacgatagatatgcatggcaaaattgaaacgacaaatattgtaaagaaacgacagtatttgataaaaatgaccgtataaataaaaacgacaacaattcagtaaactttgaaaaaactttgatgagaccttgacaatcataaaaagatcgtaaacaaactacagtacataataaaaacgaccctattttcaaaacgaccattgttgataaacgacaactaatatattaagaaaaaaatatattttaaattggaaaacattattttagggtacgttctgtttttctgttcccaatttttattcaaaaaaaaaaggttataacttgttcaaaccatataattaattaattatatcaaactattatatttttgacaagtttttttttaataaaaaaaagttaatacgataaatatctaaataacaaatccctaactgatttttttttcttctaaatatttgaattcctgaacccttatatataaaccaacatacagtaatatatatatatatataatttaacaaaattagagttgagtatccgtagtaattcaacaatttcacaatatgcatggtgagtcatgttgatgccattaattagtgagtcatggatttgattttggttgcatgaaacatttatttgaatttcaaccatgcatgttcattatattcaacatgaaatttctagggggtttccgataagtaacacttgttgcaacaagattcttcatttcgctaatagcggttagtatgaatgaattaataataaggcagttaattaataatcatggatgcattattatttccaaattaaatcgaaaatgatgatcaaattaagtaatatatatatatatatatttatataagtgaaattaagccatgacatgcatgtggatatatatattaggtagctagatttcttgaaaacataagaacaatat

SEQ ID NO: 219806 - DNA, 2560 bp, Cannabis indica
tggtgccctttagcatttctccagtcacaatatacatcatcataaaattctgacacattcttatagtttattatatattaagctaactatatataataaactatagagtatggggccaccaaggtgtttagcacttttatgacatgacattttataattggttaacagttctctataatctttattaaattaaaatgagttctattattcaattgtaccaataacaataatattatactttataagggtgcttggtaccataaatgccctttaacaattctctaaactataactataagaatgtgttactccattcataattaatttgaaatagaattttataattctgaacttttttctacccatatttatgtgtaggcatgaagctctgattatggtgtgtggtggaagtgggattactcctttcatctctataattcgagagataatgttccaaaacacaattcccaactctcacattcctcgagttgtcctcatttgtgctttcaagaactcaactgatctggccatgttagacctcttgcttccaatatcaggcccacacgcgaatcaaatctcccaaatagagcttcaaatagaagcgtacgtaacccaagagagcgagcaaccaacaatcgaagcccaaagcccaatacaaaccgtattgttcaagcccaacccactagactcacccatctctgcaactctaggcccaaacagctggctttggctgggtgcaataatctcctcatcttttgtcttgttcctcttagtgttgggtttggtaactcgttactatatttaccctgtggataaatctgggggattttaccactactcttacagatgtctttgggacatgttcttggtgtgtgcttgcatttgcttggcctcaagtgtagcttttgttttgtcaaataagagtcgtaactctaagaaagataataataataataaacaaattcagcacttggaaatggagacgccgccgacgtcgtctccggctgcatggtcttacgtagtagggaatagagaggtggaaagctttcctaatcagtcactagcccaagctatgaaagtccattttggtgccaggcctaatcttaagagtaagttaattagtacattaatatatatgtatatattatatatataagttaatggagtgattatgattaattatcttttgtgcatgcagaaatcttgttcgagtcgaaagcatctgatgttggagttcttgtttgtgggccaagaaagatgagacatgaggttgctaaaatttgtgcctctggtttggcagataatctacattttgagtccattagttttaactggtgaagttgtaaatatgagtatactatattgccttatacttgtgtatacatgtggattttgtatcaggtgtaaactagtcttgtacataaaatattaactaatgtcatttttttttttgagaaaaagtgtttatgttatataattaaactgagttagacctcgcggtcattacaaaatagagtttccggtatagaagagaccgttagagacccaaacatatgatgggaaaaggcccatctagccacattatgagcggcaaagttacatgttctactgacataagaaaaacaacaactattaaataaaggagaagacttagtacaaaatgagatatagttctctaaagcccaatgagatcccttcccattgatagcgtcgataaccactctcgaattattctccacaataacaaacttgtagccgaaatccaaaacaattgacacagccaagcagcaagccgcgggtggcttaactaatgtcattttgtacaagggaataataccctttgcgataaattgtactcattgggtatatataactgtaaaaagagagtaccatcatattttctagataaaatatgcgctttaaattaaaaatactaatcattaaaaaggaaaaattactaaactttatggttaacctaactaagattcttttactaaatttactttaacaactagtgccatttattaatgaatctctctagatctcaactccttaaagtttcatgctcattgatagtgttctcagattattttctctaaaaaattaataaataataaagccaaaaatagctagctatcgtcaaataaaaatttatagttttttttttttttttactttttcttttttgaaatttgcaacttcattagaaatcaacattaagtacaaattacataacactcaaatttggaatacaacaataaagccctcctagcaagattataagcttatacatttgaatctctagaaatatggaagagggaaacattaggaaaaatttgcttatccgattctgatgccgtccgtctagtttttcataataacaaagatttataaagtcagagaagttaaatttacaactttgcatttttcattttccgcttactcggaaattataaagagtttcgagtctctcatttctgcaaaatagcaatatctccaaaaactagtgaccagtttttgcctgaacacagaaactgattaagtgatgtcaaaatattac

SEQ ID NO: 219807 - DNA, 3361 bp, Cannabis indica
atatgacaattgttggttttttttttttttgggaaacgattgttgggttagagggcaaagtttttgcatgccgcacaccttcctctagtatttggtgaaatttttgtgtgtttcgaaaaccatcttgtaatattaaaattgagtgtaattcggagtaattataatatcgggcgtgtttgtttaactaaatcattacccaatagttatgaattagatgtaattgaggggtctcaattactctttaattttttaattcttatgatcctcataaaaattgggtgtaattaaaaaatattatattttttagatagttaatattatttttctaatttccataaaaaaaaaataataatattatttttctaattatagctctttcgccaaacatgaaaagaagaattttcatatgaaattactttttgacatacagacacatcaaaatagagtgtagctaaacacactctaagtttggtgtatttattatgtaattgaaggcaattaactccaattttttattgcacttataggaattatgtgtattatgtaattacgaaatattattatttttgtacaattaattactatataattattaacttgccaaatataaaaataaaaatttatatgttatcacaaatcactattacaaaaattagtattcttgttaattctcaaatcgttttttcttagagaccgtcattaataaaattaagtgagtatttaaaattaacgtctatagttgagaataaccatcgattttaaacactcgtttagtatagccaacgatttattattgttatataataaatttgcgaattttttaaatttggtatgcatgacaaatttaaacccctcttataaaaatatccaaaattccttgccattttctctcactctcacaccaaataaccccaaatccccccaaagacaaaagccccatctacaccgacgacggccacccatcagccactgtcgtctctcttgatctctctcacaccaaataacctaactaaaatagaacaataaaaaaaaccagagaagagaaatgagagtgtgcatcttgatccacattggtcaagtcggtaactctagttgggagctctattgccttgaacatggcattcaggtaggttttttttcgtcttgattttgtcatttatcttcatttgggtcttaatcaaatcttcatatattgtcgaaatttttggtttggtttttgtttcgtaagtgtttgttgaaattacttcgaatgtttgttcaagtttgtaactttttgcttttttttggcagttgggaaagagattgtggatccataccttgatagaatctgaaaccttgctgataactgtactgggcttcaagggtttttggtttttcacgttgttggtagtggaactataaaagtataggctacgattttaaactgtagcgtatagtataggctaaaccataacctatagtataggcgacagttttcacccgttggtaaaaaattttgcctacagtttttcactgttgtctattctacccgttttgcgatggttgaataggcggcaattatagagatcgaagagcatggacggatccacatagaggcaggggcagtagcccctcttgaaaaaaaaaatcagaaaaaaatatataattatattttgattagttacaacatatatttgtaattcaaggtgataaaatataaagataacattggctttggcatgattgttatggtcaagtcctaacaaaagcatctatttttaatatttagtttacttccaccctccccttcacaaaaaaaaaaaaaaggtttgctcctctcaactttagttttggatccatcactgttgaggggaatactttacccgactatttaacacaattttttactagtgaattatctcttgaaattcaaatacattttttttattttataatagttttttcgttgaatttaaaataatttaatctttaagttatgtatatacaaattattgctttgccttgtgtttacccagaatttggccctgatgacgtggacatcttttttgacatgtgacaagaaggaaaatactcttggagtttgacgtccctagtcatagtagtcaacctcgggaatgggtccctagcccagcgcccaagttaacataggggactcccaagtgggtgttcagatcacaccaaattattttcaagtcaccatccttcagctatctgaaccaacacgacaaaaagacccctagtcacggatcaggaacttaagaatgtcaagatgacatctcggatgccagcctggcacttagggtttcatccattgcccaagttgacatttggaactagggtttcagtttcggacctcaactttgggcagactactcaaaaattgcacttagacatatgcaagacttgccacaagcatgccagagaccccaaattcaactttgaaacacttcccgtttagagcacctgggcacccaacaccaaggttgacattctcagtcaacctgggcaacacgacgactagggtttgacttagaaacttctttgcttcccgactcctccaatccaacaaggaacgacactcgtacttgagtttttgcaagtagtgcacaagggggactaaccctggacccaacacacaggttgacctgggcaccagctcccaacgccctggttgacacattatcaacctagggtgcttccaaccattttactgaaatttttttttgagcattctctccgtcttcatcctaaatgaatatacaaatactttcgggaaacaaacggattcatctggtggccagaaagctgacccagtgcttaggttgacattgggccccatgttaacatattttcaacctgagacacttccaacgaattttccagagatgtcttttgggcatattctttgttttcatcaaaaattaagatacaagtgctctcgggaagcaaacaagaccatctaggggccaaaacacctagccaatgcccaggctgacattcaacctagcatgtgtggtttctttactcagatgcaaatttcgccctgcaaattctttgtattttggttcaaaatgggagaggagccgtcatgtcttgactaaaatatcatcaaagtaccaaaatgactctcggagagcctcaaaaggagcacctagcgcccaagttgacattcaacctagcgcgggtggtttcaagcatccaattttagtttgtcaacaaatctatggtagttctctatcacaaaaaagatgtagcacttgtgacaagtcaaattcacactttgatattttacattttcgacaaagtgaaatatcaacaaactggtcgcaactcggatagttttgagtctcatgatttcgcg

SEQ ID NO: 219808 - DNA, 4580 bp, Cannabis indica
aaaggaatgctttcccttgatcctttcttacctgttccttcctcgccgtgcttcttctccggcgacgctcctcgactgaaacttgttagactctgtttcgtctgtttctcatttctcaaatctgttgttcttatcgatctttcttgattcgattctgcaatggctactgatgatcaaagctctacccatggtgtcgacaatgacgggatatctacgatggaaggagatcctcctaatcccacggcacaacatcatccgaatcaacaaactgttcagccaagaagctttcttgaagatccatcacacccatactatttgcatcatggagacaacccaggcaatgttctagtttctcaactcctcactgggcaagacaattacatgtcttggagcagagcaatgattttagccatctcagtcaagaataaactcggtttcttggatggtaccatccctaaaccctcttcttctgaacatattatgtacaatgcttggtttaggaacaataacattgtgatttcctggatattaaattctgtgtctaaagagatttcttctagtatattgtatgatgagtctgcagctgctatatggtccgatcttaaggttcgttttcatcaacgaaatggtccacatatatacaatctaagaaagagtttgatgaatttaaagcaggagaatcaaactgttagtatgtattacacgaaattaaagactgtgtgggaacaattatcaaattatagaccagcttgtgtctgtaatggttgcacatgtggtggtgtaaagaaacttcaagaacaccatcacatggaacatatcatgtcttttctcatgggtctttcggattctttctctcaagttcgaggaagcatattgattatggatcccttacctgaaatcaatagagtctttcaccttgtaactcaagaggagaatcaaaagggcaattccaacactgcttctgaacccaatccaggaatcgcatttgctttccaaggagacaagtctaactcaaataaatcagactctcaaggaagtaagtctcatcctcccaagaagaatcggccgttttgcactcactgcaatgttcttggtcacaccattgagaggtgttacaaaatccacggatatcctcctggttacaacaaaaataaatcgaaagatgttgctgcgaatcaaattcagacaaatcaggacgtaaacaatgtccaaagtgaaggacagaccttgctgccccaacttaccaatgtacaataccaacaactcctcaacttgttggctggacaacaaaccagtaattccaacaaagatcttggtaatggtacaggtaactcaggtattgtcatgtctaatatattgaatttgcctaataatagctcctggattttggattcaggagcaactaggcacatatgttctaatataaggctatttcaatgcgtatacaaggctgttcctaccaggttgcttcttcctaatggggattttatttttgttcatcaaagtggaacaatcaatatcacggatcgtattaccttaaaagatgttttatttgtgcccaactttaaatataatataatatcagtgagttgcttgactcatgacagcagcctcaaggttaaattcactactgatgagtttatattgcaggatctaaccaacaagaggacgattggcaaaggtgaatccaaggatggtctctacatattggatcatacacctactgcttctcctattcttgcacctgttcttgctgtcactgctaatacttggcatgctaggctaggacacttatctgataaatacctgaagttactaagaaataagctcaattgtaatattgatgccttacataaaaactctccttgttatgtttgtcctatggcaaagcaaaagaaacttcctttttcaaataataataattttgcttgcaacacattcgatttggtgcattgtgatatttgggggccctatcatattccatctcattcaaattttaaattctttcttactcttgttgatgatcattcccgattcacttggatctatcttttaaagcaaaaatctgatgctttagatatcattcctcaattcttatcatatgtccaaaatcaatttaattgcatgattaaatgttttaggtctgacaatgctcctgagctatcttttaaagatctttttctaaaacatggtattttgcatgattttacttgcgttgagactcctgaacaaaatgcagtggctgaaaggaaacaccaacacttgttaaatgtcgctcgtgccctttgttttcaagctcatatgcccataaaattctggggagaatgtgtaatgacagccgcattcttgatcaatcgcataccttccccaaatttacaaaataaaacgccatatgagttgttattcaaaaggcagccagattatcaaaatttaagaactttcggatgtcttgtttttgcatccactcttactgctcataggactaaattcgatcctagagctcgaacatgtgtttttcttggatatcctcaaggggttaaaggatatcgcctttatgacattaacaacaaacaaattttcatttctaggaatgttgtttttcacgaaaacatcttccctttccttaaactgaatgaaactactgctgatattgatccatttgttactactgtgttaccttctcaggatatttctaggactcctattgatgattatcctcatgttactactaaccatcctagctcaagttctaatgcagaaaacacttgtgacaatacacctacaactgtccatataccggccacttcagatgagttgcaggaacgtgcaactgaacctactggagttgttactcgaagaactaacagagtcacacggccaccagcttatcttcgtgactttgagtgttactccactctacaggacaaatcttcaactcctcatggtttaaataaatatttgtcatatgctagactaactgaatcttacaaggccttcatccttgcagttacttcattaaaggaaccacaaacatacaaacaagccatccaattccaacaatggcttgacgctatggatgctgaactcacagcacttcgtaacaacaagacttggagtgtggttccccttcctcctaacagacgagtcattggttgtcgctgggtttataaaataaagctcaatagtgatggttcggttgaaagattcaaggctagactcgttgctcaaggctatacgcaacaagaaggcctagactttttcgacactttttcccctgtggccaaaatggtcacctttaaattacttcttgccatctctacaataaaacaatggcacactttacaaattgacataaataatgctttcttaaacggagacctcaatgaagaggtctatatggccttgcctcctggactaaacatttctgattatgattctgcaggtaccaaccttgtgtgtaaacttcacaaatcaatctatggactacccaatcttctcgccaatggtacaagaaactcacggctgcattaattcaagaagggttcaaacaatcaagagcagattatacactctttactcgaggagcggatgaccattacgttgctctccttgtatatgttgacgacattgtcatcaccggacccaacattgatgttttacaccaagtacagaccacactccatcaacaattcaagctcaaggctctcggtcaactcaaatacttccttggattcgagattgcacgtgcatcttctggtcttttcctctctcaaagacagtatacacttcagcttctcgaagacaatggttaccttggatgcaaaccagcaaaggccccaatggaccctcgaacaaaattagatgatcaacaaggggaacttttagtcaatccttctgaatatagacaattaattggcaaactcctctatcttacattgtcacggcctgatattacctatgccgtaaattcattgagccaatttatgtctgcaccccgaacaccacatatgcaggctgtgtctcacctccttcgatatctcaaaggaagtcctgggcagggactactctatcccagcaactcttctctccatctccgaggtttttcagactcggattgggcttcctgccccgttacaaggcgttccaccaccggtttttgcattttcataggtgattgtcttatctcatggaagactaagaagcaacctactatttcaaaaagctctgctgaggctgaatatagagcccttgctgcaacaactagtgaaataacatggctccaataccttctccaagacttccacattccgcaagacaaaccagcttttatctattgtgacaatcaatcggctattcacattgctaacaatcctacattccatgaacgcaccaaacatatcgagttagattgtcacttcatacgtacgtgacaaaatcagcaactccaccatccgattgattcctgtctccagcaacttacaattggctgacgctttcaccaaacctttgccttccactactcttaccactcatactgccaagatgtctgtatatgacatatacagtccaccttgaggggg

SEQ ID NO: 219809 - DNA, 2259 bp, Cannabis indica
tgaatgtcactattggagatgctctaagaagactccctatcacactctctagttaatctatgataaatgtcatcttttcaataatgcttaattttacttaataactaattataatattatacttttattacagtaatctgttaatttaatacctgttctggtattacaaatatcatctgttaatttaaggcatgttctggtagagataagtggtatagcaacaactggaatacgtgtatcaacatctgggataggtgttgcagcaggtagaataaatggaagaaaacattgattatgtcatcctgagatgttagataaagaaaagggaagagagattcatgaaatataacatctctggagtgataaatttggttattttgaagatccaaccatgtgtatgccttcattctagggagatatatagctaatgaaaactaaagcacgacttcttggagaaaatttgtgtctatcggagtccaaggtagatccataagctagacattcaaatcatctcaagtgatcataaaagagtagtttttttgtataaaagctcaaaagaagtaaggtttttgagtaaggcaaataatgttctattgagcaagtatgttgcagtttgtatgatgtatgatcagtataccagtggtaaatgagattggaacacaaagcttgagccacatttagtatgtgttgatgtttcttttcaaccaatgagttttgttatggtctttccacacatcagtggtcatgagtgatggcttttgaggcaaaagaagatgtgagctcaattttttagctttgttcaatcggataactttaatttttgtggaaaattgagtgcagaccatgattaaaaagtttagtgtaacttgttgagcttcatcattatttttaagcatgtaagtccaagtaaacctagatttatcatcaacaataatcaagaaatatttgaaaccttctatgctaatgacatgaaatggtccccatatgtctatgtgtattaaatcaaaaatattttttgcaaagttgttttgtgaaacaaaagagactttcttttgttttgctcagtgacaaatagagcaatggtgattggttttaatagaataagaagaatcaatcatttattgaattaatttgaaatgtacattgaaggaacctaggtatttatgccattggtctacattattatgatcaaataaaagctttgattgactagaatgaacaaagagaaaagactcttgttgcaggatgtagagttttccttgtcttctagttgtcccaatcaccacagtctcaaaatgtgtccaaataagacaaaaatcaaggtgaaaagtcaccaaataagaagtggtggtaatgaagttatggattgaaaaaagattaaaccagaatttgggtacatagagcacatttgttaaagtaatagatgagtttatgtggattgtaccaatgttatacacaccatcagcaagtataacatgcttaggataaggtatgtcagaaaatgatgaaaagcataattttttagagtaaatatgatgagtagctccattatcaataatccatgataagtgagaggaagcaaatttataaccaaccatgtttgaggcagcagggggaagagcaacaacatgttcagctctatgggcagtttgattgatttgttggatgagaagggaaactagttgttggcattgcgcagtgagatcagtgctaagggtgatttcaggtgcttcagcaggagtgtaatttgtggaagcttgattggtatgggcttcacctttctcaaacttcttcttgtcaccatattcaagaggcaggccatgaacgaagaagcttttatccaccaagtgacaaggtttaccacagttagaacatgatggatgaggcttcttggtgcaagatggattaggaactaatgatggacgacaacagaggctaaggtggagatgttggaagaatcaaaggtcctttgtcgttcttcttggacaatcatgccaaatacactggaaaggctaggaatgggtgttgggtatttatgccataaataaaaaccatattaatataatcctgaacatacaaattggtacacatgttactttgacgattatgtgtattaatatacaaattctattaaatcctgaacatattgttatttatgattatagtgttgtttacacagtagaaaataatcatgataatatgcttcaaactaattagtctcgtgatttatcagtacactggatttatactgatatgata

SEQ ID NO: 219810 - DNA, 7768 bp, Cannabis indica
ttttgtaatttttagccaagttcaatttaattaatttcccacgattttatatcatgagtactaaattacatctcttatttttcacattttttttaaaaaataaaattaagttaggagatcgatggagagttgtgacatgttaataacaataaactacaaaagatgttaagtctcattataatttgtcattaattaagggaacaaaaaatcttaattaggcaacaatgaattatcattatccaaattaatgtaattattttatataatcaaaattattttcataaaaatttgtagctatataaagtaaaattattattactaagcaattatttttatagtgatacaacatacatacatactaaatccaccattattataattttgactatttttttcaaaaaaaaaaaaaaaaaaaactaagaaaggatataatatataactacacactaacaaggtattaaatattattttaaattttatattttataaaattacaagccgaccatttattttgcttaataataatttaaatttatttataaaatataataatatctcgagttcatgattgtagtaaaatgtttttaaaattagaattgtattattaaaaatttagttactaatggttaggattagagaagaagttttaggaataggaatagagtttaaggaattaaaggaattttatttttatttttatttttttgactaaaattgaattaagtgtgttattagttatgttttattttatgaaatgtatggtctaaattattattaattaacaaattacagaaactataatacaaattttaaaagagtatttaccctttagagtcactgcttatatcttgttcgataattggtagaaatagactgtttatatgtcactttataaaaaataatactatttatctcaaaattttacaaaatagtttttatatggaataataaaaaaattgtaaaatatattgttttaataattaggtaaatattatgtttagtgtgattaatttattaaaaaagagaaaatgtcatgttagactattttgcaaaataacaatattattattattatttaaaatgactataaaaataaggaaaattaccttatatattatttttttaattcttttttatattttatgatttcttagttttttttttcatttttatgatttaaattgttctgttggttgctatttgagtttgcaatttaaattgagttgcagtttagattgctctgtaaattacaatatatattttgtgaaaaatgtaaaaaaaaaaaaaaactttgaaatgtataaatgaaaaaaacccttaaaataatgacatttattttgagaaagaaaaataaaatgtctttttaaagccctatattgtttttactaactaaaagtgggccaataataattggtagtgatgtttgctttttattaaaaattatttttgagtaagtgtatagtacacttctttggatgttttagaggcttctatctattataacatctaaaaaaaaaaacgtattttagtctaattttgtgtatattataattaataaagattgcagacaaattttcagaaaactctaaagagtttttaatgtcaaaattaaagtattttatgttacgcacgattattattattttttatacgtataataagtaaatatttgaatcttcattccaatactataaattatttaaaaaaatttaaaaatttacaagtagttttatataattacaacgtatgcgatcataataaaaaatagtactaaaatttttctgtatgtcaaaacacataagacatctactaaaatatgtactacaaatattttcattatttatatatagtgctaacaataagctaattattaataattagcttctcactcaaaacaatttttgcttccttttaaaattaattacttttcaataatgttattctttgggacttaaataagttaaaggagccaaagtcataagtgcaaaaggtgcatgggacttcattggctttattaccaactgattatgattataattaattagcaacacatgaatcatgataagatcatcaccaaatattagcccataattattttttaaaaaaaaaaggaaaaatatattagaagatcttgttggtttaactatgaagattagattctacaatggccaagaatataataattaaaataaaaaataaaaaatacctatttatttctccctacgtttaattatgttgcaggcattaagcaaacattaggatgagcttgaagttagctaagttgttaatttgtttgtttattagttttctaagtgttattattatattaattattaaaatctatgccaaattgtcaaatacatataattactatataacaggctgtataaatcttggaagctttgtctagctagctacttttttgttcacaatctatatctcttattttgtatcaggcacacatctctaaagttgtttattgcaattttatatctatacttatatatatatataagtatttatagtacaagtgtcactttttgattcaattggttataggagcatcttatttttagcatttatggtctacattatatctaatgtttctgtccattgcctatatgggaaaaaataaagaagtgtgttaaaagcgcagtaaaaaagattattattatacaataccatacaatatcacacattgttagaaattttattataataaaaaataaatccagatatatacaattaaaataaaaaaataatacaaaaactaaaaataagaaactaattaaatatatgttataacacacatatatacattatatatattgcatatatataaaagtaaaagaagaagaatacaacacatgtaatataatacatatatagcaagagaacaaagaacattggttataagtttgatgagctggatctattctagtatgtatacggtgaggggctatggacgaacaaacagtctagagtgttgtttggagccttggttttacttttagatagtaaagtaatctgagctcagtgggatgttgcaaattttattttaaaaatacactcaattacttattttgtttttaatatgaatgatcattcgtctttttgcatatttattgaaaaactcactgtgtatttccaaacagttttgaatcttttcaattaatgcatcaaaattaatattttgtaagataaggtaaaatattgggtcgttacagttggtatcagagccttgacccagctagaagtgtggtcgacgaggacgtcggaccccgtaaaggggtgattgtaacagtcaatagtcctatgatctataaggggaaataccgggtaagctgtgcaatcccacactgcctggggaaggtcaagtggattctgaggttgtgtaggtattagactacacagttgaagagagcttaaataaattgattgcgtactgcctatatcaacaaggtgtatcttgttttccaatagcccatcatgaaagaactccatggttaagcgtgcttgacctggaacaattttagggtggctgacctcctgggaagtcttcccagaaagtgtgcaagtgatgacaaagtacgttggaaatactcgtgtttgtttgtaggcaggggcggagcaagtcttcccagaaagtgtgcgagtgatgacaaagcacgttggaaatactcgtgttggtttgtaggcaggggcagagctacatacaccccaacaagggctatagcccccctgaatttttcaaaattatgtactaacgttgatatacataatcatatgtagaagtatataaaaaacatattaatgcaggcacaattttttgtggatgaaaaaaattaaaaaaagttaatgtttacttatttaaatataatttattattaagaatatatatagttttattatatatatatatatatatgaaatgtaagtgtcatatataataattatatttatttttttattatatttaatttgattagttttaatttaaaaatatgtacagtaaattatttaattaatagtagtaaaattaattaattatactatttttaaattcaatataaatttttttttccttaagaaaccacatattaatattaattttagtaatatttaattgaaccttgtcaaattttaaagtatcactcgtaatttatttttaatttaattacttgatttatttttataaaatactgtataaaatatttataaaatacattttggtcaccaaaatttaaatttattgtatattgcattgtcccatattggcccccctaattatttagttctaactctgctcctgttaatttgtaggatcaatcattattccatgacgttacaatacatgtatcaatttgtagttgttgaataataatataacccataattgaagtagtgatagattggtagctagcaaactatgtgatagattggtagctagcaaactattttttcttcttgttatttattttttacaatgaacatgttaaatatggtacactatgttcatgagtataatttaaatttattatgtgttttttttttttttttgttaaagaatttattatgtgtttagaaatagtcaaaaagtaaataaagaaaattagtagaaatagacaagggtaggacagagtttcatcttttgggtctagctactttttagttttcacacattgatgcaataaattaacattagtttaaattaattaggaaccaataaactttttgcagtaaccacatgtgttttacaatttacaccactctctctctctcaataacaataataattataatttttatctacttttaattataattaaatatatttattccaataatgatactataaatgtatatatagagagagtatagcaacaaagcaattatatggttctcttccgtacattattcacatgataaaacaattttattaattagagaattattgttagataatgaagtgttcattacattattgatgagctccatatttgggaataattattttattgtaattataataaacacttttataaaataaaaaatatatgaaaaaaaaatattccaatatgttttctaaatgagaaggttgagaaagagattataattattaacaaattctacttatttatgagtaaatacataaatcaaataatgaatgttctaattataatattaaataactaataattgtaaatataatggccaaaaataacacaaactcaattttgtgttaaattgaggacaaattttagatcatccataaagatagtctaagaaaacaagtgaagtgtatttaattttttaactatggataattttaaatggatattatatcatttttaattatatatttaagattaaatatgtattagtatagtctaattttcttggaattgaagccaaatctaactagattaattaaagtgaagaggacaatttattaagatcaatcacatcgaaattaaatcttcttcgatcaaattataaatgtttttataataaattacccaatcatataattgattaagcctgcccctcacattaatttaaaacattatatattagtggatgctattaattattaattatttattacttcacaatgtccttgaatattgtttaaaatataattttttaaggaactttttatttattatttttaattgtggacatttatacaatacccctctccatcataaataaaacaaaaacaaaataattgaaaataaataaatcatgatcatcaactttcattatctctagctttttattgccccattcattattattattattatttattttctctcttttttttctcaaaattgctaaaaaatattattagttctagtacttatttcaatgtcatactgttattggtgtaattaagtatcgggtctcatataacttaagaaaataacttttaaaaaatattgttaatcaattataaaataccgtctaaaaaaagtattaaacaccgctaatacccaacaataatactctataaaagaaacatatccctagttccaattattttgtgggatctatgatgactttgataattaaatagtggagagaaaccctattttattttggagccatttatttattgcttcaacgtgaatcacgacaatgtatgtttgtattgccatatataccaataatacccttacttatactacaaaatatatattaataaaggattaatattaggcaccatatatatatagctagtgactactaataccatatttatacggtgtatttatattatttattaaatcaaattattatttaacatttctcatattaataataaccactagatagtatttttttatggcaatttagtattattctttgtttgggtcaaaaattcaaaactcaccacaattcttctttaaatgaattaactatacttgacatgaaggctagtttagtgtaagtggtactaatatgtcatcttagatatgagaactctcaaagtgtatactgatgatccaaacaagacatgctaaagtatataatttttcaaaattgacacgtaattctaaaaattctctgaaaaattgaaaaaatctaaaaagaatttacaccacgtaatctatttttgaaaaaaaaaaataaataaataaccaccccctatacacattttttaactacttaatataattaatcactaacaccaaaatgtttatagctagctagatatagtcatgatatccttccttgattcacccaaatataaaaataatatccataaatattttttttttcccaaacagatctataactaaatttcacctatattttttttcaaaaaaagtacacatatcaaataaataaataaatatagtattaatttattatgatgagttgatgacctaaaaagaaatctaggataattttggtaaaaaatttgttggctttcttatttgttgtttttctttgaactcgtttttcatggaatatatattccaacgtatatagtgtttgaccagttaaagtccaatctcatattttacaacttatatttgtttattgcatgcatgtatttattaacattttaattaatttgttaggtagccgtaggatcgattttgttaaatataagtagtatagttcctagtattataactctatataataataataataatgatataaatatatgaaattataattaatttcttttcatacattaatatatctctcttttcacacgtacgtattcgattgttgaccacaaaaattaataacgagtagtcaatattagctattaattagaatcaacaaaattcaaacctaaatttattgcaaaaaaaaaaataaataattaacaaattcaaacctaaattattttgacttatttgcattgcatgtgacttccaccatattgatattgactcctcctctcctcctacgtctattaatttatatatatgaaaagaaaatttaggtaattaagatatagagagtgatccatttagaatttttattttatagtaacttagttgttataaaaaaaatagtttatgttataattatttctactaaatttattttattttataggggcttcttacactatttagtttataattattaaattaattaaaaatatatttatttttttttaagtgtaatattttgtttaattagtaagaggtatagccctcatataaggcaatgaccaatgggttcgtccatatagaggtggtttttgttataactttaacttattttttatatgaga

SEQ ID NO: 219811 - DNA, 2748 bp, Cannabis indica
catgaatatttttagagtgtttagcctagagattcggattagcctcatgtggaaaggagtcttggaaactagacaaattatttgcaaaggatcttgcaccataatagccaatggtgaagatactagtttgtactggcaacgatagatttcttggatggagtatgatgaatttaaagagactatggaggttatttggcacaaagctccttctcttcgctgtgtggttgatcttctctatagaagatcaagaacctagaaccaaggttttcttgattttctatttggaagagacttgggtggtaagatcggttccatacaaattcatgtttactcttaagctaatttagttatttgggaaagttctactaaggttaatttttcagtcgagagtgcttatttggagaatcaaaagaagagatttgctaataataattttgatttggaagtggttatggaataataaaattcatcctagacaaagtatgatgctctagagggcggctgctggtgctctgccaacaaatgataaatttgtttgtggagatttgaataactgccccttttgctggtctgccactgaaagtctcttgcttctttttgtgagatgctccatggtcaaagccatctagtttggaggcatgttccctatctaaattgattaattaatctttggagacactttagtcaaatttatcgcttttgccatagctgatatgatatgaatgctctaaccagacattcctttcttatttggcttgcttcagctatggaagtcatatggttatggaaaaatagaattgggcatggctattttgaccctgtaagtttggactttctgttactcgaggtaaagaagagattcctggaaatgcataaccctcaggcttctttaaccaggactcctatttttggtttgatttgctgcaggaaacatttttatgtttcaaaagtgattctcgttgatggttcatacaaagaaggaaattttggcagtgccattttggctgtggattttgacaaagagacctgtttgtgcaaaccctagagatcaaattcaacaacatgcatacattattttgtagaaaactactaaaaccaaactattaaattttcatattttttcttggacaaataattaagtcgctcaattagaagagttgaatgatatagtgaattaatgtatttaaatattcacaatacattattatctctctgctaattcccacgtgctagctatattagctagtcatctagggttattaattaacagtgtttaaattatattttaaatatcctactttacttataaagcaacaaaatggtgtgatttaacaaagtgttcaacataaataataagctaaaaatattctaacacctctggcttttctcttttgagccttgccaatgccaggaaaccagccacgagccactcgagtgtttttccctttaactttaatggaaactcttgaaacaatattgttgacttattgctacttgggtcaatcatcacatcatcatcatcttcttctcctatacatacatgaatattattgtataaaatacaattaatgtaaatatagtgggacacatcatcacatatttatagtactaatatatatatatatatatatattgtaatttagcgtgaaactcattaattttacgaatattgtgatttaagggcctataaatcgtcgagcagcagtttcacttaggttgatcgacacacctaaatttgaaaacgaggtaaatattgtataatcatatgcatatgtatttatatgtttagcgtgcatatttttatggagcctattagattacattgatagcagtaacagcatacttggacacgagaatagggttataaaataaacaaataattattagtaatttaattttaaatatataattaattttaagtaagtttttataaaaaaataaagtatcaagttacaagttatttatatttactttttttaatttctaaattaattacagtcattcaacagtgatctaattgttaaaaataaatgtaaccataatagttatatatttgatgtaaccattgaaacctccttctattaaaaacatatatagtttaaaatattcaattatattgcacttgtataaaaaaaatatacgtgcttgtaactaaatattttattatatttttgtcaccctaatttatttattttttaaaaaatgacagaatattgattataattataatatacaccgtcatattaaaaaaagaaaattaattataattgttttaaattttaaaagtagactgacaaaaataatagtataataccctattttataattttccaataatgtgtatgtaaatattatatttatatgagtttagatctcggcccgttgctacattaaaaaataagtttggtagaatatttactataattattatatatccagtcatatatataatattaaataatttctcaaaatattttgtttttttttaaaaaaaaaaaccgacatagagaaaaacaatacccttttataaattttgcaatatattatttatgagtttagatctacctgctacattaaaaaattaaagatatctctaaatagactttcattaaaaaacgagttcgaggtgggtcctggtgtccaggcccaccgggcattatgagtactttaagttggaattgtcgtgggatgggcaacccacgagcgatacaattcctatttgatactgtggcccatcggaaaccagat

SEQ ID NO: 219812 - DNA, 1427 bp, Cannabis indica
tatttggaggtctattttatggggtaaggagatcatttttgaagctggtggttgctggctcattagtaatggtactaagatttctatttattatgactgatggattcctagcatggatggtaacaattcttcttctcctcatcatactctgcttgaggatgctactgtgcatgactgtctaatggttggtggaatgcatcgttaattaataattttttctctacaaatgaagctagtgttattcttgccatacctcgagatcatgttccacgggtggaattttgagagttcaagtctttattctgtctagagaggatactggaatactatacgtagtattcttgcattaggcaagattctgttctaatggtaaacctgacttatggaataaagtttgaaaattatatctcttcgagaaggtcaaatattttctttggaaggtctctcataattggctgcctacttatgcaaatgtgagtcagtgtggtgtccctgctactcttacctgtacttgccccttttgtttgataggtctcgaaaccaccttacgtgctctttagagttatgataatctttcttctattcgtataaggtcattacctcccaagtttaggcacctaatttttattgttagaacatctataagttcttttatgctttgtctttatgttttttctactaccctgtttgaaaagtttattgtttgtctttagaaaatttcgtatcgacgaaataaatgggtgaatgaaaaagattgtgtaaatgatgaccttttgtttttagagtatggattacttacagcaatattgttctaccaatagttgcactcctcgtcttggcaatgctcttgagaatcagccgattgtcagatggtcttgaggtggtgaaaatcaattttgatgtaggtttgagttccaatttgattaaatttggaccttaggcagttgtttcgtgatgatactagttttgtcttagctcctggtacttgaacttagaatggtagtttctcttttgatattgttgaggcttaatttggatatctttgcttgcgtgtcgttttgtctactagaggatagtgttggagtctgatttgccttattgtaattaatgtcatccttcataacaaggttgatcaataattatacttaggatgtattgttaaaaatatccttattgtaattattttatttatatttttctatggattatcttaaggctgctaatagtggctcgcactttagctaagctagcagattattatgtttggtggcttaattactctgattgtattgttgttgctttgtagataaacttttataattaatgatgttgtttgagacttttttttctttttcttttgaagtttttttcactagatatactcttgcggttttaacgacgccatttttcctcttttttttttaaaa

SEQ ID NO: 219813 - DNA, 2146 bp, Cannabis indica
ttttataaaatatatttttgaaattatttttacttttctaattaagaaaaacaaaaattgattaaaatagaattaccaaacataataatatagttactctttaacaattatcattttacttaattaaattttttatatatatgggtactacgtatagtaagaatttttttaaggtacttatttacggataaaaattacaattttttttttggcaatagtataattaatgcacccacaattaagaatttttgaatagtttcaaatagaaacagcctattcgaaacaaatacaagtgcaacaaattatttggatttctattttgacattctaaattatcttctttttttttttggaaaatttataggaaagtctcccataactatattatattatacactcctaataatttattcatggaccaagaatattgtattgcaatttttctaaatatatattcaactcccagtctcccatggcaattattattacttgtggtaagtcaatacatatgaactttataaaataatgtttaaaatattttttttaatgaaaataatgttaaaatatattaatattctgtaactacataaattaattaattttttttggaaagaagacagatatatattccattaaaaattatttgaaagtgcaaaatattttaatttatggtcactatttaagtagttatctaatttaattttcttattactaatattgtcaaaatatattctcacttaattttgagaaaatttttaataaaaaatttcacctatataaatttatagtatcgatctctaaagtttgctgctcaattttgtctacactaaagaactagtgaatatttagaagtccgtatatttgttataatatttcttctgcataaataaattatctaccatgtgtaattgatatgtcaatctatatatttgttaatcattaataaattgttcatatatgtatatttagttttcacttttcatattaattaattaacaatatatgatacattcaaaaaattggtaatgtagccacattagattatgagtaagtgaagatagattttgcacttttaattaatcagagagcactatattaagcatatatttatatatatttggttccagagaaaagagtttttattatggggggagacgagacgaaagaaacagatggcattcatcaatatttgagctgatatatattattatataataaagtggtggaaaagaaaagaaaaggcagtagcatctttattcctaaattcctaatatatatatacgtggcagtactaagctttgttggataattgacagcttaataggtccatctctatatttaaatttgattatctctatatactatataatataataatattagtttatcacttttgaatgttgcggcacatgctaaatgaagacattattttgatacccaccacattatttcacacactagccttccttcactgcttaattatattatagtatttagtaataattaaattaaagatgttaatgtttagtttcccaacagcacaacacaatttatcaacgtctaactaaagagataatataatacttcaatattttttagagggatatattaatgatgatgttgatcatgatattgtatatatattcaaaatacatacattaatacaatttgctttttgcacaaaatttattaaactaggtaaatcccttatatatttggaggctgttgagtcagagcacttgctatgaacagagagagagagagagagttgaccaaactcagaagtaacattactgccaatatttaatggtaaaaggtaaataatccttaaaatcccaaagaagcagccgtaaagcgcagagcagtgcgggaagcttactacaaaatggtaataaataaataaaataaaatgagatttataacaaaatatatatatattatatttatatgagtgtacgtggggtgtaaatgtaataaatgataatgaatgtgatttttggtgaatatatatatagggaccggatttcgtcccgttactgtacggacacggatttcaatccgtgatgtactgcagggccggccctaggcataggcgggctaggcccgtgcctagggcccacactttccgggggcccaaaataaaaaa

SEQ ID NO: 219814 - DNA, 2201 bp, Cannabis indica
atctctaaatgtacttcttatttatgattattaaaacaaagaaaatgctttgagaaaagctgctctctttgccaacaattttgttgttggttatgtctcactcttcatgcatccattatgatcttatagacctatttcaactttgctttcttcttactcaaataacaattggccttacatgcatatatatatatatatatatatatatatggagttatattataatatcaaaaaatacagttgtaaagttcatgcatgtatataaggaacaaacctaattttcttgtttagtaatacccttgttctttggtacaaattgggacaaactaacactaataatatgatcgtttgtttcaaccaatcaaatttacccattgttttaaaaaagagtgtcgatctatgtaatattttggtgcacgtatcattattttactcgtaaataattattaattaaaggaagaaaaaaacactatcatgattatatggaggcaactgttgtagtagtaggtagcatctttctaataagtaaggtcatatcgttatacttaaaatttttgtcttcttagtcaaaaccggctatgcatgtgggagcacatgagatgagattattatgtaaagataagatatatagcctaagtaccaggaattcattacaaaaatttgacagatccaaatgaagactcttctcttgatcatcttcataataattctaatatatctctctggccagtattttaaaacataaaaaatttctctataaataatttatttctatatgatagaacctttcataagttatcagcagcatgacaattttgtctattttgctaactgagataagggggaacagtctgaccacacaaaccatattttaataataataataataataataataatatgtaataatataaagaagttcctatactgaccaatttcatttttataaaggagatttttgacatttgtttagaaaaattattaatcgttttttgtgattcattggtgtacaacatgtgtgtgtatgtgttcatatgccttagttatgattagctcaacgtgtattattctgtttcagatttactgataaagagttaaaacaagtggcacattttattttttttacataaaaaaaatatatattatatataaaaaaaaactctgtaaaattgactagaacaagattctcctccactacatgattttggtcatttttttttatatatatatggaacagtgtttatatagaatggcacactaaaataaactttgtttacactcttgtaatgtggcccactgagactacttatgaaaaaaaggcagtttttcaccattaaaaaaaagggattcattatatgattctttttagatatacatgaatatatatatatgtgttaatggaaaatgtgaatgcaacaatcaaaggtttattcccaattcactattgaagctcttctattatgttttccagttggaatactactctactcataattgtatatatacttgtgtgtatatagcatttctaccaccaccaaggtgattggtatcaccacgcgttttacatattttagaagctttgttttaatttttataaaaatagtataatttataaataatatttttaaatatattgtacaattttattttattaaaattgttgttaattctaatacaataacaaaaaaaaatatgaaaagtttgaaaaaaaataataaataatagtaattgatttttttttaagtttaaaaacagtaatagaattgaaaatatactttgaaaattgagataaaaatgaccaatcatgataagttgttagcccctttaaaatttgagttcattaaaaaaaatatattgacccctttttttttttgactctgtacaataccccaacttgcacactataagaaccggtctgggtatcactatgaagtgacttaatattaaattacactaataatactattacactttatatagttacttttaatatttggttggagataatgaaatagaatgaaatagaaaggaaacaatctttattttattcttttatttagttgcatattaaaatattagaaatcattctaataaaattacttttctactattttaataaaataattatttcattctaaaataaatcgaaagactattctcataaaaaaaaaattaataattttttattaatttttcatata

SEQ ID NO: 219815 - DNA, 3539 bp, Cannabis indica
ttaattaaataatcaaactgggaatattaaaatacggaatttcagtgaacaaagacataacatttttattgacaaggccaggatgtgttgtggtaacataggaatcttctgccccacataaccatggatggtttaagatattgacatcatcacccgtaccaacaatccagtgagcctctagctgaacaagtgattgagcagtccatatgctacgccaaacaaaactcagatttaatcaaatcgtatttgattaaatcaattgtaactcaaatatatatatacttgtgtgaatgttgagttagttacgacatatggaaatgtaatttatcacccacaaccaccaatataattaatatttagttttaaggtggtaactgaaacaataatttttcataaccaatctttttttgctcatcaaactattaaaagtaatttagtggtaaaaaagtatcttgtttaacttaatgaattagccctacctatatattaagccttaattaattttggtaaaaaaggaccactggaaccttggtagtaaaaagaaaggtaacctttttgttaatttttcctctttgttaaagtaacctaccacctttattttttattgattaaatatattaagacttaattaaataataaaagaatagtgaaaaaagtaactttgtagttgaattataggctttctttttatttctaaaagtaatcttatatctctaaatatagttgagtatgttgagttgtggctgtatttttttaacaaagaacttattactttgaaaaagtaacctgatagttaaatttattgctttattttttcttctaaaagtaacttggtacatgtatgtgtaaatattgtattgtttgttgagttgtgattgcacaaagtaacgcgttagtttaaaaaagtaaaccgattgttgaattttatgttttgtttttgtttcagaaagtaacttggtatctttatctttaatttttgtatagttttttgtgtttttattgcattcttacataaagtaccatcttaatttgaaaaaaagtaacatacgagtttatttttggcttgattttattctaaaagttacatgataattgtatctctaaatatggttgagtcacagtttgttaagttgtgactgcatttgttaacaaagaaccttgttattttgaaaaagtaatctggtagttgaagtttgagatttaggtttgcttctaaacgtaacttggtgcatgtagtgttgagctagttacacaaagtaacctagttgttgaattttagattttgtttttgcttcaagaagtaacttgatacttttatttttaattttggtatagtttgttgagttttaattacatttttgcacaagttaatgtgtttttgaaaaaaaaaaaaaaaaagaaagtaagatagttgttgaattttagactttgcttttgcttcaaattgtatcctgatacttttacctatgattttggtatagttcattaattttgattccattttttctaaaagaaacaagtaagtcagtaagtaaccagatacatgtatcttcaaatgtggttgattgtgttgagttgtgaatgtatttttaacaaagaaccttgttattttaaaaaaaataatctggtagttgaatttttagctttaatttttcttctaaaagtaacatggtagttaaattttttgctttaatttttctgctagagtaatctggtacctgcattgtgtgttctcttatggttgcacaaagtaacgtgttattttgaaaaacctggttgttatattttagacattatttttgataatcttccagtaacaagtatttacagtagagtaaattacagcaaaatcctcaaaagtttaaaattactagccattaacccccaactcccatttttttggcggttggaccccccaaactagcattttgttagcaattagtcattttcgtctatttttagctgttaatgatcatgttagacaatccatgtgaacagagtgtacacgttgcacaatattatcggtccacataaataatttctttttctaaaagaataaaattttaaaaataaattattttaattttttccttttttaaaacaaagaattttttttctttattctccttttttttatgtttttatttcttcttcttcttcattctttgtaccatcgccaccacactcaaaccacctttatccatcattaatcaccactgaaaccaccactgcacaaccaccactacccactaggccactaccatcacaaccaaaacataaaaactgccaccacaatcattgtatttattaaatccaaatcaacttaaaaacataaaattaaagtgaaatacaaaatctatctcaattccataaaataatctctattctactcgattcacagatccaaaaaataagatccacctgattattatcataaacatcttaccaagactaaaaaaaataccgaaatgaggaaataattaaacaaaaaaaaaagaaaaagaaatgatgagttgatatcatcggttgtagctctgataacgtgtgttggtttttggggtttgcggcttcgaatgaacagatatgtttccttttgctattagagtgtgggcagacgagagaggaagagaagagtaaggggtggggtttacagggactgggacctccatcggtcagagaagggaggaatgtgatgcgtgtcgtaagccacaacaaatttactaatgttttaattccaatacctccaattattttagtataattgtaagtaagggtcaatcccacgaggactatgtttattcagttattcacaaattagtaacaagacttagaagagggggtttttgatgattagaataaaatagcaataataaaaataaaaaaaaaacaaatttaaagtgagactatgatatgagaaactagttaaaggttattcgccacccttaacaatcattcttaattcctattaataaatgtaagttaagtttccaatcaaactattaatttcgcagataaagctgaagcagtcaattattccaatctccctattgtatgtaatcaaggcgaagcgctcaataattaactcttttacctaaggagtaaatccacgaagcatgcaatttatttaacttagataaagctttgagattcatggagatagattaatctagacaacaaattaatgaagcatataattcatttaacctaggttctattcttcatcacaattaaaaattgtaatttatcacaaacacttagaatcctagactattaggtgaatagtaatcctaagatgacggtagattaaagtaaaatctaatttagcagccgtctactcaagattaaaacaataatcatgacattaaacatagaagaaaagaagtaatttgatataatggaaactagaattaatattcaataatgaaactaagaattcttgtctcgggttttgaaataacccttaactaaaagaaaactactttgaactagacattataacgaaaatctaatatttaataagagttgaaggagaagaaaag

SEQ ID NO: 219816 - DNA, 2636 bp, Cannabis indica
gcataaactttatgcgaatgatataatagcatagtaaataaaaataaataacataattataaaatatatagaaatatttattttaataattaataaaaaatacaataaaatttaatatttactaataaataaatatattttcttaatgaatagttattttatttttatgtgtaattaacattaaacatatttaataaaaaatatttttatttaaattttaaaataatatataaatttcttgtattcaaccaaacaactaaacaatataattcaattaacgggaatatgatatatattaccttatacaactaaatatagtttacacatttttctacaattatattctgtttcataatatttcttataattaaattattttgtaacatctcgtaccaaacgctcctgctataacatgaattctattgttcattagtaatagttttatttttctctttgctattttagccatttcaaaggttgtactatcttgtataattttatattataatattcttatttgcatttacaaaaattaatgatacatgcacttaaattatgtattaaaatattaaaataacaaaagggcatttaaaacactttgcatttatttggtatttcggattgtataatattatattgaattatattttatgtaataattttataaaaaaaattatatacagtattaatttttatatatgctatggttaaaaatgaatttgatgtaaaggtatgaagaaaaaatctaccttaaaatttagggtttaattgaaatgtgatttagtacaaattattgaaatataatttagttttacatgtaattacactaagaaaatgagttaacaaagagtgtattgaaaaattgcaaaggaaataaactgaaacaatgttttgccaagcataataaatccaattttgtgtaccttaaatcaaatctaaattgtctaatcttcttattcatgtctagctgtttatttcatggaaatctttttcaaattatcttgttttatttcctagcaacttttgtttttgcttcatcacttgaattattaagtgatgaagatactactgactaaattgaaaataagttatgtttgtgtgtatgtgtgttttttttagtgcgaggaattgtggcttcagaaagtgcacatacctcgcttgtctcaaatcccgggattaacgaagttggccgcttactccttatctttcatggatggaaagcgagtaaactattctcttctccctaatcctcactcttgtacggaaaaaactctgctactcctgattgagagaaaagaagaaaaaaagaactcttgactcaatagttggtaaagttgttaacactaaaaaaacctattcaatcatttgttactgttgacattttgggatgtttttgtttttgttttgaagtgttaacaacgattgtaactaagtcaattttaagagttttgagtttcttttgattgggatgagtagaagagttgtttttctttttctactctatgaacttgttgttgggattaaattgtgtttcgctgcagacccgcattaccaagtacgatttgagtgaccatgtttgggagttgcatttcaacaaggtaagcaaatgcaaatacaaacttgtgtgtaaatagttttgtacttagcctattttgatttgttttttctttttcatctcaggcagcaccagaatactggcgtaatctcgatacttattggaaaggcggtagacctcttcttcgacgatacttccatctagatgggagccaaacagcagatcccgatgacccaacatggggaggacatgaaagttgttattgtactgttactagtttcattggtgaggaacagattagagaacactatgtaagaataaacagatggcctaaaatgaatgtgtatagaaagcaagattggagttggaacatgtccaatcacctctattgctactcaagcattcctgaccctcataaacaaggtggaactggaccattcttttcggttgtttaaattacgataccaagatgatcttttttcttttccttgtgccaaactttgcatgatctaccctggtttgattagaaacaccattggtacagtagtgaactgtgggaaatgcagttttggctcatagttgtaacgaaaaaagcaacgagaaatcgaaggagttagagcaagactataatcgcgagccaaagtcacgagtagaagtagaattttctgtttcttgtaattatgattatagatcagaatcagatgataaattttgtcggtttataaacttgagtttcaatgagtgctccactttgatagtgtggggtttttctcactttatcatgaagtctttttcattcttgatttgatattattaaataccatgatcaacatataacatatggaatcttttataaacataacaaaagatatgatcaagctttaatcattacttacaagtaccttttttttttctgccataaaccgttgtggatttagaatgatgaatcaaacatgacaaaggacttgaaataagataagcactgttttacattttaaaacatgtgaaaaaaaggtatttgtctgcattttattcttaaaagacatatagccacagcaatggcaacactgaaacatgcttg

SEQ ID NO: 219817 - DNA, 2266 bp, Cannabis indica
tgtcactagcatgtgatgacacgtcagagtgcaaaaattgagataacacaagacattaaagcaagattcatgtgaaggatgagtatttaacatgacttcatttttttttatacaaattcaaaccagaatagaaattagattgaataatccatctcgaatgcttcaagttctcctcccaatccaactccacatctaaattttgttaaaaggatacacaaaaagctattaaagatcatatggagtagaaagttttcagtcaatagtaatataactaatattctcttagtctacatataagaaataaatttaagaagatctaacttttgaaagttcaacttgtaaatatgcttatgcttttaaaaattctatcaccactaaagatggaatggataaatgttaaaacttatcttgtaacaatgacaacttttaaatattgaacttatgaataaattttagaaattttaatgttttgtagagacttgtaaataacttgaaagttttggaaaattatctccgtacaaatactagcaaattcacgtgagagcacgtatagtctcactagtcttatcttaaaaataaaattaacttaggaacaaagaacataaagtaattactaaattacaaagtattcattgcttaatattcaaatattattttcttccaaattttacaagtaacaattagttcaggactccatttgtaagccacacgaataattttatcacctcttatttggtaccttgagttttatattaatacaagttagatattatttattttataaaatgcttatcttgttactcatattttaaaattatatatagtattttgaactaaaatttgattaataaagtgtttgattagattttaatgatcaagtgtaaatttagatactacatatgtataattttaaaatacaatatactaaacgagcattattgaaatttgaaacaaaaatcaaatctgctttaaaaaacaggtttgagtacaaaactagtattttgaaattgtaaccattttggtatcctaaagttacacttgatcgataaatttttataattgactaaacatatttaataaaataattaaattaaattaaaaactcataattaattgtttttatattggattggaatttggaaatactctaaatataaatatattttaaacctttctctacccttctacaaccaaaagagtttgacagaatgttgtctatgtaatcaaaagattattcttaaccattgtaaatcttttatgtcatgtcattctaacaacctatatatttttttttttgatgattattctaacaacctatttaaatagtaaaggcaagattctttgtactagctagctatagctctctgagctaatatatccccctgccaagattcttcgtatgaaccatataacttagtcaagtttatatcttaatctgatgcattcaatatctggtagtgaaattcttatgaatacattgcttgttttaaaataaaataatgacatactaacgaacaagtactaagcagatgtcacagaataattcataccgttgaattgagtcaacactatttcttgatgtacacagtttcctctgtgatatattacaggtggcaagcctctattgggtagtcgtgaacttagggcgtaaaaaagatagtggccatctggcagaagccacattgtttgttgtaggactcgttaagtagggataacaagattagctgtttaagatgattactcacttttacagctaactttataatatctttgtcagagtttgagaagtgaaattattgaaatagctgggtttttttttttttaattactgaagttcatgtcatgtctttcaaaacgaataatttcatttcaaagttcctcatggggtccttaaagagcaccaccatctgacatacaatccaagttgcaagctcattttagtctgctttttttccaaccagctaggtgggcagttttgggtaggggaaaaatttggacccatttgggctcttagtaacaaaatataattagtgcccataatccaaaactaagaccacttaaattaaatttgtttaaaaaatcaataaataagtaatgaaatatctctgattgggtctattagagtgatccaaatccatatgtttgtgggccattattatcagtccattaaaaaaagaaaaaaaaaaaaaaacaaaggtgaggctgaggcatacacagtatgtgagggttgttccattaactctgatgcagatttgcaaaaaggctt

SEQ ID NO: 219818 - DNA, 2860 bp, Cannabis indica
gtaaaaaagtttgacaaaaggaccaatttacaacactgtaaatattagttcgggaaatatttttaacgattgaaaaattcaagggctcaataatttataagtcatagtttagagatgaaaaatcttaaatagcctagttttaaaaatccatatatactacagaaaagcatatccagaattttgttttagagcggacataataaatattttttaaactacatcaataattttctataaatttagtgtgggcattcaaattgagggaatagttttactatttgaccaatgttataatatgtttactaaatgagaatgggaatcaattgtatggaattgattctcattcatttgtttttaaaaattagtcgggcccatacaaataaggagaaaacaaaggaaataaggttctccctccattttcataaggaatacattttcctttcttttacttaccttaccttaacttaccttatattaattatatttttattaattaaaaataaaaaagacaaatatgctcttcaaaaatatataaataaaaaataatgatatgttctaacaatggtaatttagttaaattaagtcattctgattcctgattatgtaaacaaaataaaatgattttgattttctttccggtcagtttagcaaacaacaaaataaaatattatttccgattattttatattttaacctgattcattttttccattgatcattctgattccaattacagtttagtaaacgtgctagagaggcacatgttggcttcatcccatcctaatacacctaatctatatattacttattatagctaaatatactataaatttcacatttcttagacaatattacattggaaaggtatacttaattatgacatccatgtacatcatttagtgcgagattattaatttatatacacaatagttttcacgcaaaattaaacctgtaaaatatatattcatattgtaggcattagaatggagccaaacatatgtatcaaatgtagcaggagaaatcgcaatggtagtggccttaattatgtgggtggcaagcttcaacagagtaaggagaaagatgtttgaagtgtttttctacactcaccaactctacacaatttatatcattttctacgtacttcacgttggagcagcttacttttgcatgatactccctgggatattcctttttctcattgatcgatacttgagattcttacaatctagggacagagttagattactctcctctcgcattttgccaggtggtaacttcgaaatgacttttgccaaaaccccaggttaatacaatcttttattaacattatatacataataacttattaattaaccctttgtttttattaagtagttaatattattttattgattatttcaggattgcaatataatccaacgagtattttgtttataaatgtgccatccatttcaaagttgcaatggcacccctttacaatatcttccaatagtaatatagagatagataagcttagtattatggtccgaaccgaaggaagttggtctcaaaagctttacaaacaactttcttcttctgtgaatcatttggatgtttctgttgaaggaccatacggaccatcctcattttcctttttgaggttctttttcacactaatatgttgcatatacatcatgtatttatattgtcctataattaaattaattaatgaattgatgttgtgatgttgattcaggcatgaggctctaattatggtgagtggtggaagtgggatcactccttttatctccataatccgagaaattatgtttcaaagcacaatacccaattctcatgttcctcgagttgttcttgtttgtgccttcaaaacctcagctgatctggccatgttagacctcttacttcccatctcaggctcacacgccgaacagatttctcaaatagaactccaaatagaagcctatgtgacccaagagaacgagcagcccaccatagaagcccaaaagactatacaaactacatactttaagtccaacccaatggacaggcccatatcttcaacttttggcccaaacagttggctttggttgggtgcaataatctcctcctcttttgtcctgttcctcctagtgttgggtttggtaactcgttactatatttaccctgtggataactctggagggttttaccactactcttacagatgtctttgggacatgtttttagtgtgtgcctgcatttgcttggcctctagtgtggcttttgtttggtctaagagttgtaatgttgggttaatagacactaagcaaattcaaaatgtggaaatgggaacaccaacatcgtctcctgcagcatggtcttacgttggtggggattacagagaagtagaaagccttcccaatcaatcattggcacaagctatcaaggtccattttggtgccagacctgatctcaagagtatgtcttatttttttatatatcttaaatatattattttttttaattgctacaaggatatggtgtcctcacacacaacattgacattaattagtacaattatgtgtcataacagtaacaatatgttatatatatatgtcacgtggtatcagcgtaccactaatacttagatttttagcactatttagtctgaaatgacttaaagataagttaattatacttactatttaatatatattatagtagattaattttttttagttttagtttttagccaatatgttatataacatataaatctaaatatattacttattaatattttaatgcatgcagaaatcttgttcgaatcgaaagcatctgatgttggagttctgttgtgggccaagaagatgagacatga

SEQ ID NO: 219819 - DNA, 3792 bp, Cannabis indica
ttatgccatataaaaataaactcatttaaattttcctaagaaaattcccctaacattaagtcatactcagtggtgcaaggaggactatataactatggttgggacattctaattaaaagatgacaattacatatcatctatcatttcacttattataagagtcgttttgtaaagataatttggggaagagctccttattttcttaaaaaaaagaaaaatacacaacccctaaacaaaacttttaatagcaaaacctaatttttctactgtttcagtacaactgttaatatttgactgttgaacacactactaacacaccattagaatactgtcaaaatttgatgatgtgcaaaaataagttaattttgacccaaacaaagtatttccatttttatttttttaaaaaaaataagtaaatgaacttaaaatatacatcaattcaaaagaaaaatatattctgtaaaaaagcgcaatattaagtttataaaactgaaaaaagaattccaatcctttaaaaaaaaaaaaaaaaactgaaaaaaaagattaaaaattcccaattcttaaaagcaagctacaaaatggtcaaaagaatagcaaaccaataaaatgtttaggggtgtttggcttaacttaaaattaatttttgattttaaaattagaaaattggttttaaaaacctataggagtgtttggccaaaatttttaaaagttttctaaacctaagtttaaaaataaaaataacaatataaaataatcaaaaaacatcatgttgttttctatttcaaaaataatttttattttgttttgcctaatataatttttttacattttttcttcacatacccgagtccaaggtcgtcggtaggagccatggtttgtgtcaactgtcatgggtcgagtttggggttcaggttctggtctaggatgcaagatctaggactggtgtcaagggtccaaagtcgggtgtggttaggtctagatctagatttggatccaaggtccaaggtctggggtcaagtgtggggttgaattcatgtcgatgtgtggaatattaaagtgtttttttttttttgtcaaaaaaacctaaaaaaccagctcttgaaaacattaaccaaacacatcatatattttaaaaactacataaaaattatttcttgttctcattttttatcctttgttttgatttacagagccacaacttttttactcttaaacaacagaagcttggaatggaatttttttctgctccatatcattctagaaacctccaactacctaggtattatttttctaaaacagagtacttaaatttcattaactaccattcttccaagattatagataagtattccataatctgttggatggatttcctaccagaccagctcaagctcctccgactcaacatcaccatgatgccggcaccactcatctttagattttatttggattagttcctatataacaaaacttgtttactattgccagaactgtagaacatcaaacattattataatcaaacatgtgaacgaaacaaataaaaattattacttgatacataagtccacataacgaaaaactgaaccataaattaaaatctgtaaaggactgacgggtatgggattcacccgcgcacaatacaattattgttacacaattcacttttctttctttgtttttcagcctataggaatgtcactaaaaataattacttgccagtgagaaaatactagcctggactttcaaaaaagaaaacaattactaatctgacttaattgaaagggtaaaatatgttcaagtgcaagagcagtcccaccaacattatgtatcaaagcaccaagctgtgtttgcaagatattcctgcctttgatcataggagatttattacatgaagcaaatcatccaatttgacatgcctcactcttttcaatggagattatagacactttaaaacaacaagcaattgagttcttgaaaaaagatcaattgagaactcaacccttgaccccccaaaacgaaaaaccttcgaataaaacgtttcaaaccaacttctaacaaacctcaaccctagtataaacgttctccttccttgcatgaagaacaaagtaaaatgaatacatctatactattactcttctttcaaccactgctgaatagatcaaaattctggaaattgttgaaataataataataataacaataataataatttgagggaaccaaaatgacaataaaacagaacagaaaaatgttcacaaatattttgtgttcaagaggttgttagatcctggaacatgaaaataccgattagaaaggcttggttgttgcaaaatcggtattggcagtggcactgagtagggttgctctccactggctattaaaggtggagcaactcttagctgcactgcttgggctgctgctgtagttcctgcattggattttaaaaaatgaatcttctactttctgagttaaaaatatttaaaataaacgtcttgacttaatgtattggaatattaaaaaaaattcggactttttgctaagtagaagatcatatattatcaagaaatttaaactcctcgagagcaacagattaataagtagataaaagacaatagtagctatactataataataccttggtgctttggaaactgaacctgatggggagacgacaatggacgaacaaatgacgatgaaagagctgttacaccctgaaccatctcctacaatatgtaagtggaagatgattaagcaaatgaatttatattaaataaaaaaattaccctgacaaccaagcaaataattcatgcatttaaaaaacttagtccagctatcccatcgcctggatgcagtgtatcttacttgagaaactggatgcacataaacaagctgcccgaatcgtccaaccataacctggatttcgaagaaatttagtaacccactcatgagagctaagaatagaataaaacaaccatataacagaatctagacagagatatattttggcaataaaatatagacactagaacctttttgggaatcaaacatgaataccaaaaaccaatacacttactgattgagaatttggatgcataatgcctggtacagcctgaataggatattggttagaatatctaagtggttgcatcctgcttcccatatgcccaacaatctgtagccagaaagaaaataataatattaaccctaaaaaaactcagctaaacatttctttaacatcaaagaaatagttaaattcaagtaacttttctaaataaggttgttccaaacatggaagattagtctaaaggacatgctagaccaagtaccaatataaataacacttgcaggaattcaataacatctaatgatacttacaggttgtggaaactgagaagccgcaacaacatttccagttggaaaattaccgtaaggaagaatcttaactggtacagatgaatgagatccaaaatggcctaatccaacttctgactgagcaggaacaggtattgcagatgagtggttaggcatataacctacgccagcaactgtttgtgtggcaggagttgttgatgtggcatttgtaaaagatggcgagaatgtttttgctcctgggttgagtttaaattcctatagtgaaagtaaaaaacataaatagaacccaattgcagagcatgtagaaaaaacaagaaaatgtgccaaaaaaaaaagctgagactaatgcatcatctcgttattagttgttgctactactagccagcagtgttatacgaataactaaatcaatatggtccc

SEQ ID NO: 219820 - DNA, 1855 bp, Cannabis indica
actttattcataacatgttgagaggggtggcccaatctttggtgccacaatgttacaaggaaactatttttattacaagtattatttctggtatgagagaaaatagtagaattgtcactggtttgacattgatatgctgaggaagtgggattgacagctaataagtgcttgaattctttaggagcaatagatgtggacagcttgtagaggccatctttaattgttccctgaagaagagggatcttggattgattgttcttaacacaacaacaatcagatttaaagtcaatactaacatcattataatgagtgaattttgagatgctaataagattcttttgaatagaaggaacatgcaatatgtttttgagatagagacgtttactagctgctatagaactagaaccaatatttttaatgaaaagagaggagccaattacctacaaccagtttttatttacctttgttgggagcttgttgttgcagattggaagagtctgaagttacatgtttggatgctccactgtcaaagtaccaggcagtatcatcttgggatgattgagaggcaacaagagcttgtggattggagttagaggaggggacgttagtattggagtcatctgatccattgaaactaatgtcaaaccttctatagcatttttgaacagtttgtgcagggcgaccaaataactgatagatgactcgattttgagaataggaacccctgcctccattgttgcctcggccaccacttgaatttctgcctctacctctgtaaccatttgaagccccacgagtgcaattgttgttgggatttggaggcttcttggactaagcaaagttagcagaggcacctgagaagtcaacaatttatgaagcagtattggcttcaattcacatctcctggttctgtagtaacaacttgacttcttgaaaagtcaggtgatctctcgaagtgagattgacaaccacgacctcataatcagtgccaagaccagcaacaacataaagaatcaagtgttcttcagtgatttgatttctaacagctcgaaggccatctacaaggttcttcattttcagaaggttttcatcaatggggagagaacctttctttgtgttctgaagttgattcatgagatgaatcatgggagctcgagatgccgtgctaaaaagaagctcaagtgtatgccaaatgtcatgagccgattcacaattcataacatgacccaacatagattcagaaatagacgataaaagccaagacatgagtaattgatcaaggcgatgccaaagaacgaattcagggttagtaaccagagctttcgatttaggtggttgacgaattctttgctgaggaggatcttgattcagcaaaatgccttcaagattatgagctcaaattgttggaagaacttgggaacgccagaagaagtaattatttcgatcaaggcatagaggcggtagaaacatggtggttggtactccatagttgttagttggctcaccatctctaaaggaggtctccatggaagaaccaaaggtcgtctaataccaagttgagaaacagtaagagaaagatagatttctgaaatttgaattattatttaactgaatgaatttacaagagtgaaaagggagcatatatatacacctataacagaccaacagaaaaggaaagaaagaaaagaaaactaactaattttctgaccaactaactgttggaatatattttaccaggatctagatttactaacaagtatgtttttaatatcctaaacatgaacttctaaaacgatataaaataaacacataaaatgtatgagaaaccttacagtggttgcagcagaattaaatg

SEQ ID NO: 219821 - DNA, 2045 bp, Cannabis indica
agaaaaatgagatcgtattcacagctccaactggggaagagatcagtagtaagaaacagttggaaaagtacctgaaagcacaccctggtggtccagcatcatctgagtttgattggggcactggtgagaccccaaggagatctgcaagaatttgcgagaaggtcaaagcagctccccaaagagaaagtgagcccccgaagaaacgaagcaagaaaacatcagcttcaaagcagtatgacaaagaaaaagaaactgtccctgaaggaaatttggaaatgaaaggtgaagaaacacaaggtgagcaaaaaactgaaaaggatgatactgaaaccaagaaggatgttctaaaggaaaatcatgagactaaagcagaagatgcagataccacaatggaagcagctcctgctgatggagaacacgcagataccacaatggaagcagctgctgctgatggagaacctaagtctgaaaaagaatctcatatacctaatgatcctgagaaaattactgaaacaggccaggatatttcaaaagaaacatctactgcaaaggatgtttcaggttatgtcatatctcatagtgatactttgcacgagcaaccaccgctcgaggagaaaaaggttgagccagtggtgcaggctaatgcagctaaaacaagtgccgatgagaaaatgtttgaaatagaggaaatggagaaagagaaacataacggaagcataatggagtctgaaagagaaaaagaatgggaaggagtggcaagagggaacgaggataatactggttcaggtactgaagaagttagcaaaaagcctgatgatgtgaccgtaaatggcaccgatagcaatgggaatgcgaaagagattatgctctgagtacactgtagattagttatatgctattcctgaccctttttaattcccgtctgtactctgtaatgttagctctctgattgttcactgggacataaatatacaatcatatgtagttaggcttataatataaccatcttttgttttgatggtgagacaagtagcttgcaagtttgtaacattgtggtatcaaataaagtcatgtactatcatgacacggtctatattaaagcaaggtagtaataataatttatttactttgacaccaccaacaattatccccctcattcaggtatttgaccatttcaattgaattatttattgatataatagtccttgcttttttcatatcaataaaagacgaatatgaagctgtctgtagatcgtcgactagtcttagcacgggctcctggtaaagcaatacaaagaaatcaaagtgccataatatttggcaagaactacaacttggtgcatttggattataatatgactagtgctttaaaaatgtgttggactttttgatttggcatatgagcaccatctcgcacgtaactacaaataaataaattaaccttgatgataattgtattaataaaatatttatttatcaattatatataaatataaataatattaaatatttaaattttaataactataaatatcttcttatttgaacttttatacatataaaatttagtagttagttcattcattgtaatacaaatataaaacacaaattcgaaccgtgacaaacttaccctacaaagttattagcacaaacaaaactcatatttctataaacggttcaaattacagatcgaaccgataggcacgtattcagataatgtttggaacttcttataaaatgcttttgtatatatacttcagagatatatatgtgaagtagaatattagttacacagagacttataacgtaggtataatttgagcccgaataaagcagaaaagttgctctaaacattatcaactttcccctgctatttttgttcttatccaactggtaaagtatcagttaagatatcatttcacctcttatggtgacagattcccattattccatatatgtactctgattgctgagcatacacaaaaaccaaaagcaattataaatttacagatggtctatacagcacataaagaatataaatatat

SEQ ID NO: 219822 - DNA, 6131 bp, Cannabis indica
aaaaaaaaattaaaataatatgttttttttacaagcaatgaccaaaatcattaaaaattaaataatatcgtacagactaaaattaaaataatattaatataactaaataacaattttttcaaaaggataaaataaaaatactatcataggtgagagcaaaagtaatgctctcacctaattaaggagaaccttataaatatatacatcataagttttaatatttttttttttaaataactaattaattaaattcatttttatatttaatcaatatattaaaattataaattattttaattttgattaaaaaaataataataatctgattctgaacttcttttaaaagttttaaaacagatatataaattaaaaagatatattttattacgtaaaaaaaatctatattttaaattcagaaaagttaatattttgatattttgatatttatacaatgatatttatttaaaaatatatatctattgattttaaattttaaattttaaatatatcaaatagtttcaaatataaaattatatatatatatacataatccaatacctaaacccctacgaacctaatattatttgtcagtgaaattttatctagtatacactaaacatactcttctctttcgatactcaatcatggctactaatttcattgttctcattattcttcttctttttctcccctcttccatggctatttctacacagcaaatatgtaaccaaactgaatatccctcctattgtcaaaacatattcaattcttcatcatcggcagaggataatgatatttattattatggacgacttgcagtacaaacatccttagtgagatcacaaaggtttgtaaactcagttcagaattatttacaatattcacacaatatcgacaacaacgataacaactcaggagatggccccacacaaaccctagctttaaagggttgcaaagatttcgcttcttctaatgtatatatgcttgataatatcatagcaatgatcaacaacactaaccaagtcctttcattctcacaagccaacaccttacaagacaagctcactgcccttttgcctaatctctacacttgcttagatttattggaaaccactcctacatctgagaacattagaaacgacttatcgcagatgatagacgacgatgttaaggttcatatgatctctctcactctttgtaccgaaggttgggtgtccaaggataagaaaaacattaataataataataataataatggtcaacaatctcctcctctgctaagtaaattcaagttagcatcagataaggcgaataagaaagcgattttggagtcgattttgaaaggggtaaaagtgaatgtggatcatcaccatcatagtgaagacgagaatcagcaaggttttgtcattataaacgactttgttgttgtgagcaaagatggtagttgggactttacaagtatcaacgacgctatcaacgcagcacctagtcgtagttataatgatggttactttttaatctatgtcaccgccggtgtttattcagagtacgtcaatgtaggcgccgaaaagactaatttgtttttactcggtgaaggtattcacaagactgttatcactggaaaccgaaataatgctgatggattttctatttcaagttcagcaactctctgtaagtaatataaataatgtgtttttttatttatttatttatttatgtgtttatatattataatgtataatttggttccttgtatttaaggattattattaattatgctgttaaattcatgcattgcatcatgtaatataatattactacgtatgattctagttgaaattaatatatataagagtatactagctattcatattggaaaaactaatagacatattttttaagttgttattattaagtgataggataaatttcttaaattttaatgttataataccatatttctgtaatttaaactatatttttctttttgataagtgtacaaaattaacaattatgttatacttactgtttaattataaatattaaggtaagtcgctataatacaccctctaaaaagagtgtagattatagtttgattttttcaaaatatcttaaacaacctttcaaataatttatattaatacataaatattcgttaatatattattatagataagttttcatatattaattgaagtataattaaactaacttgttatggtggtatatatatggtgtgatagctgtgtcaggtgatggttttatgggtgcaaatctatcagtagtaaacgcagctggactacacaaagaacaagcagtggctttacgaaacactgccgaccactccacattttatagctgcagcttcgaagggtatcaagacacactttatattcattcacaccgtcaattttacagagactgtgatatttacggaacagtagatttcatatttggtaatgctacagctataattcaaaattccaatatctatgtccgaaagcctcttttaggtcaatctgcagtgatcacagcccacggtcgaacccacccaactcaacaaagtggaatctcaattcacaatagcaacattctacccacaacagacttgacaacctctaatgctagactcgaaagacgtagaagaaccaaggcttttctggggaggccgtggagggattgtgcacgtgttgtgtatatgcaatcttacatggatggagttattgactcagctgggtggcacagatgggatcaaactgattttggtttgaatgatgcatatatgggagaatataataattggggtcctggatcgcatactgaaaaacgacccaagtggtcagcttttcatattctcaacaccactgatgctcaggattttactgtgtctaattttatagatggtgattcgtggttgccacagacgggtgtaccttacactggtggattgatttagcttaaatttattatgcatataatgatatatgcatagattaacattttattagcatacatgtttagttaatgtatttttagttgggtggaatcgtaagctacccctacttttattttatttttaaactattttaattcttttagtataaattggaaaataaaaaaaaaaattaattagtgcaactagtatttgaaatttatttttgatataaagttatagcacaccaaattgggatttaccatacacatgcattggaaggcatgcacatgcacgtgcatatataattaacttttcttaattactagattttttataacctgtttcaattataggcatatatataattatataattatatataccaattccattaaaacggttctaagaaaaataagaagatatgaacagtataccctagtaagaaatcaagttggagatatatggagatctgcttctcatatatatatttatcggtgaaggtagtgagtaggtaaaagggagaaaagagaagggtatgtaatgtaatgtgtaaggtaaaagggagaaagttgtagagatctggacaacggaaatgctaaaaaattaaatctgttacaagaaggtgtggctttttaattaattaagctgacgttgttaattttaggctaattagtaattttctccccaaattttgacatgtatcaaatcatgccccctaaacttttttggccgttaaaaattcccctgaactattgagattgttagatttaaggactttttgtctaattttaggggatacagaggatagtaaatcatggtttcacttgactttatttgctacaatagatttttgatgctttcaaaactttcttacacttcaaagttgaagctaaattataaattgggaaatctattaaagttttgcaaaaagactggggtgagaaatttagatcattcacaaagttcttaatattgagcaaggaattcaccacagacattcctgtcccaccacacatcggcagaatggcttggctaagaggaagcatatgcacattgttgaaaatggctttacccttttagctcaagcttcattacctctcaagttttaggatgaggcatttcgaacaaaacattgttatccctagcaaacttagaaacactaattaatcaagttctttgttattttaggacatggagaagattatttaagacaagatgttgagatgagtgtttaggaagaataaaagattgaccaatatgtttaagcatcacctacatacatttggtcttgatcaacataatcaaaacagttagcaagattttgggcttgtggagtgcaatgatttgttgctcctgaatttggataccagttggcatcactggttcctcctgaagtggtgagattagcttgatttggttgagcctgctgtggtgcgtgtactgctggttggccccaaattttgacctgtgaaagacttgtcaaaacgataaaagtaatcatggacagtgaatccaaacctcaggcaaagctgacattggaccctattattcactggcatagctaatctaccacctctatttgggttaaagttttctcaatataatttgactcattttttagctcaaattatacacaatctattcgagatggtaataaaatgctaagggaagtgctaattaaataccataaatgatggcatactattattggtgtattttattatttggtcttattacaaattttgatttagtgaataatattttacagaaacttctgtagggttttcttataatgatctcaaactctacttttttatttatttttttaaaaaaacatttaatgtgttgttatgaatgattaaactaaagatctcttaagagtttttaaaagttttactactacactaaagcactagttttaagttttgataataataaaactatatataaggaccccaaaatttaattttgtcccatataccttaggatgggcggtgagtttagtgaaaggatgtggaagtagttaggtttgtcatcccaaaattttctccaaacataaaacatttcgtgtgtgtgtgtgaagagagaaagcaggtggaatggattgcataacaaacacctcacctatcacttattcacactttttacatttaactcactctggtcatgaacttatgataatattcaatattttatatcacacttaatttcctacgtattaagtacctacttcaatttaatctctatatatacctacttgttataagtaattagcaaaaggtgattaaggcttggtataggcttttcctttcaactagttcttatataaactagtgatctctttttcactctttcattacgcttcttcctttctttaattcaccctagttcatatttttcaagacacattatacatacattgtagccaccaattttattcttacagagattgacatttaaggaacaatagattacatatatagtaatgctgcagctgtaattcaaaattgcaatatctttctctaaaaaatttttctagatcaattcaccatcatcacaaatcatggtcgaactcaaccaagtcaacaaagtggaatctccattgcaacattttacccgcacaacctctaatgctagactctgaagacgtggaagaaccaagacattttttagaaaggtcgtggaagcattactcatgaattgtttttatgcaatcctactcattttggtttgaatgatgcgtatgggagagtataataattgtcgtatagcatcgcatactaacaaacgactcaacttaatagacgagattcatggtgattcttggttgtccaattttactgtccataatatttaagatgctcactcccatctgcggcaaccacgaatcaccatctataaaattggacgctataaaatcctgagcctctgtagtgttgagtagatggaaagctgactatttgggtcgtttttcagtatgcgatttgggaccccaattattatactctcccatatacgcatcaatcattcaaaataaaataagttttgtgtcaagtctgtaaaatgttgctattgtgaataatgtagattctgctttggttgacttggttgggttcgacaatgatacagtgaatagacttagaagatactttggacatagatattgtcaattttgaattacagctgtagctataac

SEQ ID NO: 219823 - DNA, 2864 bp, Cannabis indica
atgaatacaataacaatagtaaatatgaataaaactagtagtctcgtcctcaaaatcccaatctcaagccaaaataaagtcaaaattttgactaaaaaataaacccgcaatccactacttcaccaccaattttgcctcactccactctctcccgcaaatctcgcatttttcttcttcttcttctactctttttctttttctttctacttaggatccttatttttccgtcgatcatgtcctaaatattatttatgtataaaaacagaaaataataataaaattaaagaaaaaaaatgtcagtcgttctcctcctctcattctcactcttctatctctactcttcaatctccaccgcccaatctccgtcgcagtcttatccctacggtggttattctctctcaaatctcaatctctatctttcaccaataattgaactaactttttaaactgtaactaactgtaaaaggttttttttttttttgaattcaggaatttcgtaccacatagattgcggtggctcaactgaattgacggaccggttcaatacggcatggcaagcggaccgtttttacacgggtggttcgactgcaatcgtgtctgaaccgctccgcttcaaacacccgcaggagaagactctccgttactttcctccgtcatctgggaagaagaactgttacgttatccctaaccttcctaacggacgttattacgttcgtacattcacagtttacgacaattacgatggaaaatctcactctccttccttcgatgcctccgtcgagggtaccgttgtcttcagctggcgctcgccgtggcaggaagacctcgctcgctctggcgcttactctgatctattcgcctttgtttctgacggccaagctgatgtgtgtttttacagcattgccactgatccaccggtaattggctcactcgaggtcgttcaagttgatccttcgtcgtacgattctggcgaaattggccagggttatattcttgttaactatggccggttgtcttgtggttctggccagtggggtcccgggttcagcaacgataccgacctgtttggacggtcgtggcagtccgattccgatttccgagtatcggagtcggaaaagtccattaagaccgtagttacgaagaacgctattgccgggaccgagaaaagccctaattacttcccaatgagattgtaccaaacggcggtggcggtcggcgacaaggaagagttggagtacgagctggaggtcgacgcgaagctggattacttgttgtggtttcattttgctgagatcgactccaccgtgaagaaagctggggagagagttttcgatattttgatcaacgaaaagaatgtgaagcgaattgatatattcaaagaagttgggagcttccatgcgtatagttggaactatacagtgaagaatttgagcagtacgaccctgagtgtgaagcttgtcacggtggcgggggcggttttgttaagtgggctagagaattacgctctggttccggctgatcttgcaactgttccagaacaaggtatgtaaaaaatttctactctcccaaacaccctcaattgtttttctatttttaaagaaataatatactgaaacagaatggggaaaggggaaaggggaaattacggttattccataattggaaaggaggttgattatgacttacgtctttcattatttgatttgtggaaaagtttcttagacaattttaactagtattgttttttagaatgaataactagtattgtaagtaatcctattactttctttagctcaacaattttagcacttgcttttatctttagaaagcaaagaaaagaatgaaagagaaaatttatatttcattaatccaaagaatgaattattaacagactaggaaccaatctgttactaaaaccagttacagctggtaactaactgctactagtcaactcctaaaactaactaatctattttctagctaattaatactccccctcaagatgaagaatagatgttctttaatctcatcttgtctttgagcacttcaaactgagctggaaacaatgctttagctagtatgtctgcctatttgttcttttggttgaaacatgaacagtcttgatgatgcactcttgtattttctccctcacaaggcgacaatcaatctctatgtgttttgtcctttcatagtagactgggtttgctgctatgttctaggcagccttgttatcgcaatgcaggatggcaggacttttatgctcgatccttaactcttttagaatggtaagtagccaaacaacctcacagtgttggccatggttttgtactatgcttctgcttctgatgaccttgatatggtgtgttgcttttgcttttccatgagattatagacttcttaaggaaaatacaaaagccatttgtggacctcttcgtgtccaggcaagcgacccaatttgaatatgtgaatgcttcaagcttcacttcagaggtagaagagaggaatataacctatctaggagaagacttgacatactgcaggaccctttgagatgctatcatgtaacttgttttgggagtggctaagaagtgacagtttgttgactgagaaagatgaattcggccgagttaaggtctagtattgaagcttttcaataatctttcttagaagtgtagggttggccaaaccaccttattgtcttgattgagcttaaagttagcttccatgggtgtactagtaggtttacatcccaggtagccaaggtctgcaagtagttgaagtgcatacggtgtttgtgatacaaagatcccctttttagatctagcaatcttcaatccaagaaaattcttaaaactgccaaggtc

SEQ ID NO: 219824 - DNA, 3072 bp, Cannabis indica
acgcattgaagtgtcacttaaacctttagtgacacgtgtggagtgtcactaaaacccaattttctagtagtgccatcttaggattgtgatcatttgatatctaagatcaactaggtgatattcggtaagtttatcatatcttatccaagttcaatattggtccctttcgatgtatactccatacatccaacccaagcttactttaaccaatgccctagaaaggacataacacttatccaagaagcaggtaaactacattgtagattgtaatatcagttaactcctacgtactgataaatcatagaaatttattgaatcaaataatcttgattactttttactttgttgacatcacaataatcaagaatatcaatgtgataaggatttagatgaatttataaatcaaacaaatgatcatgaaataaatatgtgaattaagtaacacattaaataagtaataaaataagtctttttcttgatatattgataaagaaatattcaagattacattgaaatagagttttatttagggcacaaaactcaatagtttacacgacttcatatgccaacgcaaatgagttgcgctagtaagaataagttttgccattgcaattgtgcgttagtaaaattttgacctttttaccaacatagttcacgagatgcgctggtaaaagtgacttttgccagtttagtagcgaactgttgtgataaaagtaacatttattgtaatattttatgaaataaagtggcaaaaatctatctcttttgccaattaaaggattttgaccataacttagatttttaggtccattatattttgtaaagcccatttaatctagtcctattccaatacaaagtctatacaaggaaagagatggagctttgttgttaagctaatttttaactgactctagcctaaatctgacagaaatctctctctctctctctattttcctaaaagaattcaaaaattctagagtgtttttatctctttcaatttgttccattattgagttgagtatcaacccgcactatttaaggtggtcctcagacctttgggaacatgatgaaatttttttgctttttcaggttaaggaaggagatccaagttcagtacttggtgatactgtaatacaaaaaggattcaaggattagagtatcgaataacatgagtctttatattctgctgccattaatgtaagaaatctaaaactttaaggtatttatttattgttttaggtaattcatattttagaatgttaatttatatacggtagaatcaacatatatgttagtaaaataagtttttagaaaaataagttccaacaattagattttcaggtaagtaatgtaacagactatatatgtaactcaatttgtatttgtgttgagctcaaaagacaatttactcgcacacaaatatatctaataacgaaattattttcttctttcttgactacaacaaatgctacttttagtgacaatttttagtcacaatataatttttttgtgactaaatatgacttttagtcacaacaaaatgttactcgtgactaaaatatagtctttagttacaagttgtcactaattagttttagttacaacaagtattatgactaaaaatacatttagtcacaataaattgtaatttttgtgactaatcctttagccacagactttttagtcacaatatatataggaatgataatttataattagtcataatttttttacttttagtcaccaattttgttgtgactaaagtaagattttttttttttttgtagtagttttttttttttcttaaagtactaatgattaaataagatcaaattgtatgtaaactttattgactggtcatgctttacaaattaaagtataaccacggcaagaatgtacaatgaacatgtttttaatataggttataagaaataaaaatggaactaaactaataaataatgatatatacattcatatatagtatgcgtaaggccaccgggtaccaccttgcgatttccaacccatatatatagtttgattgatcatgaacaccaaacaaccttcgttgataataatattataatattattgtactatatatatacatccattagaagaaacatgatttctttaactgtttatataagcagttctctgcctattggaattttcactttactaatattgatatatataaatataatatataatatacatatatttatatgaagatgaaagtgtaggcccagttaatggacattggacacgtttgtacgttggctaattattttttgcccgacacctttgtttgatccgtctcttgtagccctaataaataaataaatgtaaaaaataaaagaagaaaaagaaaaatattcaacaaatgcttgtcaattatatatataattattattattataaatatacccgacgactccaaagactttctctacctctccttcttcttcttcttctttctttctctttctttctctctctttttcttttgttgaataatatttggggtccgaggaatttattatcactatctatgtcactttcaaagttgagaagagtattaacatgttattattatgatggtgatgatgatgattctcccttctttgaagcctctccacccccagaaagatatacagtgcgtagctttcatccatggcctaatttgtcattacattaagaaatatatatatacacactatatatatgtatgtatatgtgtatgtgtatgactaaagaggtgagcttttgagggatatgaaaacctctaggcaagtctaatgcttggctttttgatgtattaattatttcaaccacaaaatattatctccttttttttgtttgttattcttggtcttcactttggatggcttggaaaaatggagaggagttgtcaaagctagaataagtttttcttattgggggtgttcctttctgtttttcatgatgagataaggttctgaatttctctctattgttctctctctcctcttttttattttttttcctgtttactataatatgtcttttgagcattatattgttttctgcttt

SEQ ID NO: 219825 - DNA, 2523 bp, Cannabis indica
cacaaaataaaaaacaaaaagtaaataaatatttggattgaagcttgaacgaaaggcaatagagataaaaattttataattgcgtaagaactcgtatactaattttccctcaaattatcattggcagctagctagggaagctgggtaggtgtggttcaggtggatgggcaggcttttggcagtgcactgccacgtattcactcaatggtgtccaactcatcttccacgtggcaccattactggtcgttcgtttaactttcaaaaccaatcacgatcacgaatgagctaataatttatttattttattttgagtacaatattaattttatgtctttataatttcctttagatatttttactgaatctatgctcttaaaataagagattcttactggttcacctgtatagctaggttcacgtacaagcatgtacggtcaaaagtacagtttacgattaactgtgatgttttttactaagaaaaaaatattaaatatttggcacaaaacagaaactctaatcaatcattgcccaatctggggcaaataattcaatcaggattctgagaatttttctaccactatatattatatatacatattgatattcgtgcggctaaaattctaatagtgcaaccccgtccattttgagtaccaaaaatctgttgaataatgattggattttgtcaagaaaaatgcatttggtttatctttataactgttgaattatgattagactcatccaacccttgttagttattggaattaaaaaaacaaatcaaacctagctcaaaatacattcaaccttaaacaaattaaataaagtttatagtagataacaatataaaaagcactctagctcttttttaagagataacaaaatcattctatatatatgtataagaaaaatctttatagtaggataggagcaagccacttttggtccaaccggtaagagtgcgcgtcttcactattacattaggtctgtcgctaataatccccctaaattgttattggacattaacaataaaagtttgataattggtcgctatttgtagttattagtcttaaacttagtttgttatttgattgttaactctgttaagttagttggtctagttttatataacagatttctgttatggttgttaagtcaaagtcagccctttccctttatataaatactatttcattcatttaataaaacaacttttacattgctttcactaatatggtatcagctgcttaaaaatctcttctttctcattcatcgtcttcaacctctgttctaccattgatattcaacatggctcgaactcgagctactggttcaaggagttctggccaaaatcctccgcctaattcctcttctactattccagatgctccacaacatgacgatccgatcattcctccatcccatgtgattactggagaaaattccactaaccagaatcgaccccctcttcgtcctgcccatgaagatagttctagcccttattatctcagttcaggggatcatcctggcctgatactggtcactcctcccctttctgatcagaatttccaagcatggagacgagattttgaactatctgctggtgcaagaaacaagaccgtgtttctcaaagggactctacctcgacctccgattgaagatcctctccacaaccattggctccgctgcaatcaaatggtaatgtcatggatccttcattctatcactccagaaatcaagagtagtattatgtttcttgaaactttggctgagaagtggactgaactccatgctcgatttcatcaaggtaatggtcccagaatttttgagcttcgagaaacacttatcactcttcgtcaaagtgatgactcggttagttcttattttacaaaacttaaatgcatgtgggatgaaattcaggaattaagaccaaggattccctgttcttgtgctgcttctattgacaattagctttcttgaatcaagaacaggtcttacaatttctcacaggtttaaatgaatcttatttccctgttcgagcccaaattcttcttattgatccttttccatctttgtctaaagtcttctccatggttatccatgaagaaagacaaagaaaacttaaaaatccccatctcccactgcttgcttctgttcaagatttaagccaacagcctgctgcactggctcaaaatccctcagcctgtgcagtctcaaccaatccccgatccaataaaaagatgcgactactgttctaattgtcacaaaccgggcatttaaaagaaaaatgctatttcttgattggtttcccccctggttatggtgacaagaaaaagaatgagcagccttctttccataatgcttcatcttctgttgatcaatacagtgttcttcacaatcttaccaagcaagaagacattcaagcaataatatccctcctaacacaaaagttacagccgactcatcctcccacagatgcatttgcatccaatatttctagtaaccattctaatcacctatggattgttg

SEQ ID NO: 219826 - DNA, 1299 bp, Cannabis indica
gatttgtataactatatttctacctcacctaactctttatctgatcacccctttcactcatcaatttattattttgatttcatttcaatttctgtcattttatatttatactaatctttatagatacaataaagttcgtttattattgtgaccgcagtgtaacaaattaggcgacattaatttttggcgcgctgttaccaaagaagtttctacgctacaagaggctaatatagtaatttatttttaattttatttcattactttcttcttctctttgttcgtttattctaattaaaaaaaattttggtactttttttttctcagatatagtgtatttctttttctttctttcctacgaatatatatatttttttttcgttaaaaaaacaagtaatttaatagtttctttctctttagttatatttattacattatttattatattacggtgttagtttattctttttatcattttttttttacatttttgcttttaagattagatcctttagctaaaaaaaagtgtaaataaaatgttttcatagaacacgtcaagacaattgtgtaatagtgaaagtggtaaaaactaaaattattttgtctaagaaagattgactttaaaggcttgtggtagagtattctctacaatttctagcaactttggagaattctagtaaaatgtgggacgaagtggtaccttggaaaccttcccaatcggcctgggaatatctcatattaaattattatatagttgaactttatattaattaaaaaaaaaatatgaatgaagaagatcatcgccgatttgaatatgtgtatccaatatatcttgcttcattaaacaataaaacttctagtactactgaaggtactagtaattttattgaaccaaaattcagtgacagaagctttccaatactattcttttaacaagagtgagagttgtaataagtaaaaggcttggtatgagtctcatcgatcgcgtccttgtgcacatacatcatttggtgcacatccctatgacgaagaggaagaataatcatacaactcttactatcaaaatagtcatgttaattatagttggaagcctgagtacgactataatccattatataagtggaattaagggaagaaaaaatatatcattacgaatagactacatggtagtaagaattttttagatttcattctcatattaacttaacccaaattttaatattaacttaacttttttctcattctcataatatactttccaatctctattatatttttagctctctatataattatttttag

SEQ ID NO: 219827 - DNA, 3107 bp, Cannabis indica
ttttttaacagttttcattcggaaaagctaattttgtagtactgcaaacgttacacacaatatgcatttgattgaacattcttacataacctttcactgactctttatttgaacttataaaaggaaatacattttaaactataacatcttcctctagttgacttttctgcaattaactctgacttggcctttgtttcccgtaagaggacttatgtttcccattttgatcatacccatagcgaaggccttgaaaaatgcctcgttgttgtttgcgtatcttttaaccagagaatcaacagaagaagttccattgaagagagcttgatctgaatgtagaagacccttctttttcagcaagttcttgaagtaaaggttatcaaaatgagttggagtttggtgatcaagttcagcaaggttgtcaccgttattcccatttgctggacactttctctgcaatgacttggcgaaagaggcttcgatggtgtttgtgtcgttgtagatgcgtgccctgaatgatgtgcatttagccataccaaaggtgtgagaacctgcaactcatcaaatataattactttctcattatcactatcttgaagcagccaatgttaaaggatgtatctcttggggtttgaaattaaggagagttggtaataagttggactaatagtacctgagagagctaccaagttctttaaggaaagcccttgtgaagagaaacttgatataagacgacttatgttagagattggtgagggaatagatgtgtttgcaaggctcctactggcagtggttgagtctcttcttcccaacataactctccaggaaggacctcctagctgcaaatacgattataatttctaaccatatgtaaaaaaatggccaagtactaatggcatggacacatgctttttgttttgaaaagaagaagagctagagtttattacatgaacaacagaatcacgagcagcaatggctagtacatcagcacatgacactactcccgggcaggctttctcaagcttggccttaatgtggtcgaccacttcgtaccctctgaccgagttgttgttgggagctgctgttttttctcccacaaagttggccgtatcatctagcaaaatagatccatcacagccctgaaaaaacggaagctcaaagccctatatattaagtactagtagtcgatcatgttttgatatgacaattaatgttggttatgagctgaactcacattgacaaaacagtcatggaaatgaagtcggagtaaggaagcaccgattcgtgtttcgctttctatagctgcagctacttcgcccttgacaatggacaatgcttgaggacatgtttgggagtagtgatgtggagttagcttgttgccattagcaccaagaagaaatgcagcggcaacaattaagatcattatcagatcaagggagttgaaagaacccatgtcataaccacagttgcacacttgacaactacaatatataagaatatttcttaatatatatacgtataaatcaatgaatttaatatacatataaattaggcttgatttgttatcaaatcaattatttattaaaatgttcaatatcagtggtcatctttaattatttattaatcactattaattgtggcagatgtaatatctcacccatataaatatatagatactaagtttgctactcaaattcatttttttttacgtagtgattaaaattatttatgagtaaacatccacaaacaacacaaactatcttaaatcttaatagttaattgtctaacggaaaagtatgttttgcacatttatttttctataagcaccaaaagcagagttagtgagagcttgaaaaatttacactacttacactcattattaatatggtccgaggcgcgatccaagaatattttctagcagggcataagtaaaatgtattttaataacatctattttcaaaaaaatgctttgggatagctgttatatgttaccccaatgcaatgagaccatggtttgactctctccaccttcataattttaattaattttaagtaaaaaattgaaagaagtaggattcgaaaaactgtagtctttttatgaagggaaaacttttggtgaatattcgcacataaaaatatatatccccaaaggagtcaactgcccccttgccccaacataggtccgccactaattaaatagggaggtgcataatatcgatcctctatttcttatatgtgttcaatccatttagttattccgcatatattagaattgttcatatatctataaattaatttgttataacacaatatagttgagatatacaattataaagtttgtatatgagaagaagattacaattgaatccgataatatagttacttaccaacataatacgttttaaatgatagtctaaaatggtttgcatgtttgtttgcttgcttgctttgtttttaattatgtaatgttaatgattggttaatatatatatataaattgacaatcttgatgtgacataggatgataaagttacattttagtgaacatttccacttttacttttcatattttcattaggtacaatgattctccattataagttcaaaaatttcaagtctagcttttttgatgtcacagtattgttttatgtcctcaagtgatcataattcaataattcagtatggatgtgaaataaaataccattttcctttgcttctttttggcaccactattatacttgttcacgttggacaaatagttcttttccaagtaaacatatatagctccacgtgactatgtaattgtaattgtaattgtcgtacttcatttgcagaagtggcctcctctagctcttgctcgaagtttcatttttttggagttgttaggtctctttcgttagttaccactttacatcactagttgtaacgcccgtacttttataaaaatattaattttatttacaagcgttaaacgcggaaaaacataatgtcgcatttttatttaatacttgaaaatgttcacaactggccagttttcgtacaaaagacataataaataataactaaaattattgcgacataaacttaatagcgtaaataaataaatagag

SEQ ID NO: 219828 - DNA, 1490 bp, Cannabis indica
aataaaaataaaaataaataatagaacaggaaaaaggaaaaactagatgcacaaacaagcttgaaagtacctgagaaatacagccaccaagacccatgccttcgaaaaattgatggaaagttagagctgccacaagaggtttaattgtattgggactatatgaggcacctaatgatatacctataattattgaatgaaccacaatcccaagctccaaaacctgcacaacatttaaaaagaaatgaaaaatttaacgtatattgttttactttattttatttttttcagaaaaaagaaattgttatgatcatgtaaagatattcttctgagatttgtgttacttgttaataggaaaaaataattagatgacaaggtcatattattcttagtctaaatatttaattttaataaagttgcgaaagaatcctattctgaaacaaaggtcaatattacaagtcaagaatgaaagaactgataataatattttctaagcctataaaaaattgtaaatatactaaacctgtgaatctaataataaagcatcataaatattttcgtcacacataactgagtcgttttctcttcgtacgaatgaataagaaaaagttccatacttgaaaacgaaactacattaatatctaatttcactaatgggttctatcaataaatattatgcttagattagatgttctactatccagatgactcttgaacaatttgctccataaattcgcattttattatgtaattttaaataatgtaaatagtaaaacattaagaagagaaagaagaaaaaaagaaaaacagagaaatacaggggaaatattacgagacaagtgaaagaagcagaagaaaatgttacctgagatattacccggtgtcgaacaagatcagcggtggataagtcgtcggagacaaaggcggaaccatgggcatggccatgagtagcatgggtgtgaacgtgaacatggccctcatgggccacttcatgaacatgagcgtcctccttcactggaagcgccttgttaaaatgcgctctttcgtaataatttgttgcgaaagtgtccaccatcatcgtccccattgctgaaaccatggccacgaatcctgcaaaggggaaattaccccacggatttttctcgaggcaaggactggtcaggctatcgaatgcatcaggtagaatgtggatgaaaccagttgctagaatcactcctgctgcgaaagctttgatcatgaaaaagatatcattttcaggacgtagagttggtattttcttgcccaagattgggatacaaacgcctaaagcgcttgctatgagaattgaagttattgctactaatttgaattgtaaagctttggctttatcacgagtattgtctaaactagttccattgcaagtggaatccccagaaactagaagaggaagaacaagaagaagaatacaaccaaagagtgtcattatcttcatgtttagaaagatagagagagag

SEQ ID NO: 219829 - DNA, 3554 bp, Cannabis indica
  modified_base (2025)..(2025): a, c, t, g, unknown or other
tatattatatatactctctaattggttctttattctattcattttcaatcaataaataattctttttcattctgcaattaatttcgtaccagtttttagaaattaatacatatattttacaaaacataatattacgcatttttgtatattacaatataaaaaagaaaaaacagagaaagatccaaaattaaatcacaatactgactgaacatatatatttgaaatgagtgagtcaccttcatcattctattctcataaccacaagaatatatatagtaaaacaaagtagtaattaattaggagaacaaacttgaatggtagcctcagtcatttcagactgagttactccagcatcacacatcttcataaaagcttctctacgtcttagtccatggaatgtcatatccccacaatatttggtataaatatctgtctgtacacacacatatatatattattaacattaataaattaattatttccctacttaattactgatcttgcaaaatattaattaatgatgcttaattaccagtaattcgtagcaattcttgacaggttcaggactatctataaagggatcaaattcaacaaaattattattattgacattatgggatgagcttattatttctttgtccttaagcacaatacttccaattcgagctaaattattatcttcacgctcgtttgcagcaacggcttcgtctagttcttttttagattccatataaagtttctcatattgcttaacctgtcaattatttaataagttatatatattgtttgaataattaaaaaaaaaagaataattaagaaattaattaatgtatgtgttgtgtgtgtatattaatattaccttgtggcgtaagaaagttaattcatagtcacatatcggccaatttttgaattgggaatcatcatcttctgaagatgtctacatttatacaacaaataatattattaaacttaaaattttttataaacgacaaaaagaactcttttttttgaaaaataagcgtaaagttatattgaataaagctagacctcatggtcattacataaaatgttttccggaacagaattgatcgggatcgatccatacacttggtgggtaaaagcccacttagcgacattgtgtgccgcatagttacatgtcctactaatattagaaaaattacaacatattaaagaaggagaagacttagaacaaaaggagacatagttctcaagggcccaatgggacgccttcccattgagagcattgattactaatctcgagtcattctccacaattacataattatacttcaaatctaaggcaaccgacaccgctaagcaacaggccgccgcttctccacaaagagcatccgagaaatccaatcgggacgtgtgaatagaaaccacccttcctagatgatttctggccacaacagcagtgcacatactctccatacccacgcgaacatcacaatttagctttatccagtccagaggtggaggcgtccagcaattcttcacaggcggcgaatgactaggcaagagagaagtatgtgcctctgcaaaagaagaacaaatatggtcaatacattttagaacattaggagaatagttattatgtaccacgtcgttgcgcatcctccaaatattgtccaccacaatcgaggcataaagaaaaacatcctctactcggatgcctcgcccattaaggctccaaatgaacttcacccaatcccaaacccgaatgccattatcacaaacagggaagatcccccacggagaagaacgccacaagtgcatcgctacatcacaggtaaggaacagatgctccatagtttcctcacccataccacacatcggacaactggaatcatcaagtctgaaatcttcttttaatcactgcccgaatagggagggcttgagaaagaatgcaccaccaagaaccttgtgacgctccatgatgttactattccaaagtttatttccaggtcaaacagactttttagcttagagatatcccacccncccgttaggcaaaagtagagcagcgacacagttattatccatagcaacacttccattggtttcggacgaaacctttcaaatgagggatccacgggtccctccatatgcagttgctcttccatcagccactctcttgcacggcccctttccggatgatatcactagctttaacaacatttttccagaaccaggaatcagagtctttgtacttgcattggagaaagtccttaccccgaaggtatttggctttgaggatcttgcaacataaggactggctccctgtcagtaaattccaacccacttagccaaaaagcaaggttcatttccttggttttccgaaatcccagtccccctaaagattttgggagacacagcttatcccaagccttgagataaagaccatggttccctttctcaaagccccaccagaaatcacggaccaaaccatcaatcctatccacaatccgattagacaatttggtggtttgcatggcgtagatgggcatggccagacccactgatttgattagggtagcccttccagctttcgataaagttttagccttccacccttgaagtttagatgtgaggttatcaaggatgaaattaaaatcagcatccttttgcctagttctaaaaagaggcaaacccaaatactttataaccccctcaggagtgccaattcccaaagcttccttaattcctctcctcataccattcggggtatttttactaaagaaaattgaagtcttaagtttgttgaccttctgcccagaccacgaacaaaacttatccagacaatcccaaaaggatttagcttcatttatgttagcccggcccaccaaaatgaggtcatcagcaaagaaaatatgggataagaccgggccccccctacttaacttaatcccgtggataacccccttcccaaccgcctcttctaaaagtctagatagcacttccgctgcacagatgaagaggtaggggataacgggtcaccctggcggataccgcacgagggcacgattttaccaaccggtcctcctggattaatctctttgcaccaacacagtttattatcttgaatattccttcctggaacaaaagcagcttgagttgggcagatgagcgaggggagaataggcttgattctatttgcaatgattttggagatgaccttatatatcacattgcagagagaaatgggtctaaaatgatttggtctcgtcgggttttgcaccttaggtatcagcacaacgttcgtggaattcacacccttgtgcatcctacccgattcaaagaaatcgccgacagcatcacagaagtcattccctactgactcccagtagtgtttgaaaaataaaacagacatcccatcaggcccaggggctttatgattgctcatagcaaagagagtacttcttatttcttcccgggaggggggcttgaccattccaacctggtcctcatgagaaatcttttccctaaataggtagccacagttcagtggcctagaaacgttagaagcagag

SEQ ID NO: 219830 - DNA, 2338 bp, Cannabis indica
gatatcttacaaaattttgagaaattcgaaataatttacaatatagaaaataatgttcaaacagtctattttactacgcgtaacaaataaaatagtcatgcgtacaacatactacttgaacataatttttagcgtgttaaacttttccgaatttcttaaaattttgcaggatgtcttaaataactataatttacatgaccatgaagaaaaaattttgactaaaaaattatttcggatactaaaacagatagagatatatcgatgtatcccttttaaggggtacattatagaatttctctaaactatatataataatataataaataaattattgacaaaattcatatatataaatgtaaattttcataataaaaaaaggagaattttcattgtgaagtatagtaagtttctaaattaaattaaagtatttaaatcaataaattaatatatatagtatcttcttaatgaaaaacagtgaaacaacaactccattatttcaaatactaaataataattagagggagtagtaacaacatcaaaactatgttctaacactcaatcacaaaattggagcatgtaacacggggacaacaaaaacttgggaatatatatctcctaaatttcactacctagaagagacacaatgaccacctcacaaaaacggcaaaggcaaattggtataacaccaattacccaataaaaatcacattagtagccaaaacttttttattatttttattaacaatactagctaaaactaattaattacacatttttgtcaataaaaatataataataataatagttacgtatgcttaagcatatttttttaaaaaaagaaaaagggcgtaccagtaagcatatataattttatgtatgcataaattatttactttaatttaagacagtctacaaaatatctgtgattaaacatcactataaatcatctttcattgaattttcataatattattgtaagatctatatttggatgattattacaaaagataattacaaaaagttatataaatataattttgaattttaatttgatctatcttatatagtagtgccacttcattattattaaaaacataaaataatgttgcccaaaaaaacataaaataattattataataaattatccagcagatcattatatattgaaaaaggtagatcttatcacattgtttaattatatggtatttttatttttcttttaatattgttgcctctcaataattttaactttcactaattatttcttaaagattttataatattattgatttcttttcgctcaccaaacacttattttatagaatttaataaattttgtaatgaaataataccaaattttttaatataaattcacaccaaacacaatttatttataataatatttattaatacacacaaaatagcactagtaatttttatattaatttattatcgcgtattgatatatcatatatattgagtatttttatattgggtacatatatataaagattataagtagtaaaagtaatcgtggatgaataataattttattcataaaatacagtcttccatcatgaaattattgatgtggttacaacaaagtatataatttaacgaaaaacataaataataatgaaagagagaaacatataagtgatatatatgagtttatttcctctatttaaatataatatcttaattattaatttagagtatatataagtgatatatatatatactggcgcatgcagtgggtactacatgattggtgcgacgaagagtgcgtgaaaattctaagaaactgcgcaaggcaataccagaaaagaatggaaaggtaataatcgtggagattgtattgaaagattcatcacaaaataaggaaaacgacgacgtttttgacgaaactcgtatgatattcgatatggtgatgatggcccatacttgtagagggaaggagagaaccgagtttgagtggaagaaactgttagaggaagctggctttcctcgttataaaatcactaaaattcctgctataccctctattattgaagcctatcctttttaattaataaatatttcaattacaaaaattatatcaaaacggtatcatcagttatgcctgcttgtgttgcaatatttatattttgttctccatttatgtaaggtttcaagcaagtgttaaataaattggagtgttttcaattaattatgtcaaggattaattcttcaactacagttaaacacactactgggctttaacaattgtttaaaatatttgtttgacaggatagatggattaaatagtgtggattgaagctatcattttttttttacg

SEQ ID NO: 219831 - DNA, 2116 bp, Cannabis indica
ttttttttttcgttttttgtgagtttgggtattgaagtagtgagttggagttttattaatttccaaatttggaagagaatctaagcaatatatgtaatatgttatggtggagtgttaccaagttttgataaagagtggctatcacatcttcaaaaaaaaggtctattattatttggtgttaatattttaaattattagaaaagtaatctttgtcattctatttctatatggagaatttgttaaactaacaatataaaagtatagaatttgaaaaatagcttattatattttaggagcaaccattgtagttatttcataatttcttaatttatttcttttttttaaaaaaataataattaggtccctcctaataaaaaaattcacaaaacccatttttacaaaacattcttcccatcattttcccaaaaattcacaaaaccattgtagaactaatataaagacttatctcaaaaaaactaataaaaagactctgaaaatgcaaatgtggtgtctaattttttgagtaataatatgtaaattaaaaatatgcaccaaaatattacactaattattaaaataactagttggagtttagataaatatgatttttattatatgtaaaaaagatttaatgcaaattctagaattcttttaggtatgttacatatatatatttgtattaattccaatatgttaattctcaacatattttactacaatacattacagtctgaacggtttatgtagtgtgagcagtttgataaactcccctgaaagaaatatcatcgaacattgtaaaagttcctttgtcggtttgccatctctctaaagcttgaggaaggctcatgttacgctcatgtcggcttaccatcttctcatcgccttcttggcaagaaggtttccattgctcgacgagagaacctaagatgttgacaacatgtcccatgtcgggccttaggtatggatttcgagcagtacaatgccttgctaactcaacaactttgtatatgctctccaccattgtctcctcatcgggatcgagagcttcatcaatagccatcagaatgttctccttgttctttaggacactgctgaaccatgtcaccaaatgagacctctcatcagaaactgtatcatctacagcctttttaccagttatgatttccattaaaacaacaccaaatgcataaacatctacttttgttgtcactctaccagtttctgtagaaaatcaacatgaataatgtgtaattagttcaagttcaagctcaataatgatcatttaaaaatcaaaatttcattatttttgaccatttgattgtacataacaataactagcactgaaagtagattattctcatcctatatatttcggtattcgaataactttttattctaattttttgatttataattgtgtatgttatagttatttagattaaatttttaatttttttcaaataatttataatgccaaaaataaatattttattgcatgtgactattttttaaagtaatttatggagtaaataactgaggttaatttctagttacagacaaatacttaattttaattttttatgataataatacttgttataattctgaaacttttgtaagtacctactcgttgagtgtcaaatcaatattcacgtgccattttctcatttgtatattaaaatgaattttcaaataaaatagaaataagtaatgacctggaccaatcagtgactgtcatgtgaccattgagacacttaacagtcaggtatttacagaagttacgaaagttctagaaatataacttaagtattattactgtcaaaaattaaacttagatatttatttgtaacttggaattaaacttaaatatttacgctgtaaattactttttttcttatacaggtgatagattactatttgaatttaattttcgacactataaactaattgaaattttctaaaaatttaaagatgtttgaaattaccaatcatgaaaaaaaaactaaaaattcttatgaatatcgaaatagatagtctaccgaaaactccaggtgactatacattttttcgtaaatatacagtgagaatttcttaccagcatactcaggtgcaaggt

SEQ ID NO: 219832 - DNA, 2610 bp, Cannabis indica
aaaaaataatttgtttaaattctaaattatttatgtttatatattgtctctaattttaattaaaaacttatgatttattcttaaaaatatatattattttttaatgagaattctaaatatatgttaattttctaataaatggattatatacgcgtttaaaaaaattataatattatttattaagaggagtatcctcatttattaatgagtaattttgaactaaaaatatgtgtatttgaaagaaatttgaagaattaatatgaatatgtttagtaatgggaaattataaatgtacatagaagcactctataatgttaaattaaaatatctagatattatatataaaataatttcatatttgagcttcacttttggtcctactgataaatgatttatgtaacactagtaaacaacttcaagatcaattgaatatttatgttgttgatcatgaagtgatgaaatgaagattttaaaaaataattaataatataatgatcaatatcgggtgatgatgatggtataagcttattaatgttgaattttgtccaatttatttattaatagatatttttattttctctaaaaaaaaatgaaggcagaatcaaaaaaggagcaagacgaagtagaagcatgtgaaaaggcgaaagaagcggctgaagctattaaaagtggagcaaaagaagtgagggaaacttgtgaattcattagagacactgttgaaaccactactcaatcggtaaaataataatatgttgatgagtgttatcgctaatctcttattttaacttttaagtcaatctttaaacctgaaaaacacaaatcaatttttttttttatttatccttttgatattcattatagttacaatattaataatcatgtaaacttttaaaaagattagaatagtttacagtagcgacaacaaagttactgatattttggtttaccatgtttattcaaaaatattcaaatatgttttcagtactgtaaattattcaaaaaatatttaaaaatttacagagttaatattgtaactataacgaactctgttaccaaaaaaatattcttatgtgttttcaaatatggatgttaacatagagattgtaataaaataaaaggttctaattgctaattactccccaattatgttagatgaattgttatgattttttcacaaaatattattgttatgaaaggtgtttgaaatgttattttaccaaacactctttaagcatattcattttaaagtttggagtggaaatatgaaaaggatagagtatttctacagtgcaccccctaaaagagatttactaatgcacttcttatctgttttagcatctaacataattttttagttatttaagatatcctgtaaaattttgagagactagaaaaaattttacacgtcgaaaataggattcaaacagtctgttacacgcaagactcttttattttatacgtgtgtgaaatagactctttgaaccatatttttggcgtgttaaatttttttaaatttcttataataattttgcatgatgtcctatattactacaacttaaacgactaaagaaaatgaaaaaattagactaaaaaattctttcaaatatcgaaatacataagaggtgcatgagtgaactttttttagatgtacattatagaatttttgaaaaggatattatttagttaacttattattaattattgattaattgtaaactacacaggttagcaaagtaattgaaaaagtagaaaccatgaaagacaaagcccaaggctcactctctggagttgtcaatgtggcccagaaagctaccgatgttgtcaaggaatttaccggagatgatgattaaatcacaaaagtgaaactaaaatttttatttttgaaaaataaaaatgttatacaactacttatttttttaattttaaaaacaaaaataaaagtgtgttatgtaaatttaattttaatttgttgattgtatttaagtcgtgtccaatagtccaggtttaggtctgaggttggggttcgagttcgagatcggggttcgaggtttgggcctgggttcaagtctgaggtccagggtcggagtcgtggtctgaatctaggtccgtgttagggtttgggactaagatccaggtccaagttaaggtctggggtctagctaggtctcgggttcgggtttcgagttcgggtccgggtccagggccgagacctaggttcaggtctagggtccaaatcttggtcttgaggtcaaggttgaggtcagagtccaaataacatacccaaaatttttaaaaatgtgactctcaattaaaaaattgaaaaaataaaaataatttatagaacatgtttttttgataatattttcactttcttttttttttgaaagaaatattttcacttttttaattacaaaagtaaaaataattaattaaaaaagtgttaccaagcacacccaaaaattttaaaattttgattctcaattaaaaaattaaacagtgaaaataattttataaatgtttttgaaaaatatttatttattactttgaagagataaagttctagctagtctagttaattagcaattggagagtattatttgaactctaaaa

SEQ ID NO: 219833 - DNA, 3136 bp, Cannabis indica
attaatataggaaatgttatttgaacaatgttttatgctgttttgtattgttattttatatccaagacatatgttgttcaacttactctacagtattttggataataagtatatatatcttttagaagtactcaattggaaaaaatgttcttgtatgttcttcaatggctatatactatatcctagagagctagatatgtggaccccaagcaatacttctcaataatttctctcaagtacaatcttgctagaactagaagattaggctcttaaattttctaacgaaaagtccaaatatactttttgtcttatgtatctgctgtttcatgatgcggatgactatcgccgcgtccacaatcattttcatgcatctcaacacgtactccgctccactgatcctgttcatcccatttttttcccactcgttgacaactcgcatacaactccatttttttcactattacacagattctacattcactcatataacgacaaaaattcaaaatacgacaaacatatacacgcacacccctattttgtctctgtatactacgccacgtgaagtgtttggtgatgcggtgactggttttcgcttcggctagacacgttaatcttgagcatgccatgcaagacactggtcaccttgcatgttaaaccatagccaaatgtactttagcattagcaatattcttgaaccttcgtacttgtataaatatacacactcatcaatccaattcctcatcagcaccgaagagaaaaacaaaaatataaacatttcaatcatgatggtgaatatgaaagctttgttactctcgtctctgttacttgctactatcacctctttagcttttgcatacgaaagcgaagggagaggacaagatagggagctgaaacgtgagctggagcaatgtcagcagcattgtcaaactgaacacagaggacaaaggcagcagcaacagtgccaaagaggttgtgagactcgttatgaggaacgacaacaacaacaacaagaggaacggcgacaacagagagagcgtcgtggtgagagggacgaggaagagtttaatccacaagagcctcaacaacaactccagagatgtcgacagacttgttctcaaaggtaccaaggtgctggccaggagaaacagctttgtgatagaaggtgccaacaggtctatgaacaacaacgaaaacaacaaggagatgatgaggagttcaatccacaagaacctgagaaacgtcttcagaggtgtcaacaaacctgttctcagagccatcaaggtgttcaagagcagcagcgttgccaaagaatgtgccaagagaggtacgaacaagagcaaagagggggtcgtcgtggagggagggacgatgatgaagaagagcttaatccagaagagcccagagaaagactccagaggtgtcgacaaacctgttcccagagccaccaaggtggtgaagagcagcagcgttgccagagaatgtgccaaaagagatacgaacaagagcaaagagagagccgtcgtgatgaggtgaatgaccatcatcgcgaggaccctcagcgacgattacagaggtgccgagaggattgtggtgccaagtcaagagaccaaagacaggttcaacaatgtcaactacgttgccagcaacaatacgaagaggagaggcagagacagcaagagagggacgacgtttatgatgttgagatgaatagagagcgtgagcagagagagagtagaaacaacccttatcacttccagtcacagaggcttcaatctcgttttagaactgatgaaggtcaggtcaaggttctagagaagttttcacagaggtctgagcttcttagaggacttgagaactacaggttggctgttctagaggctcaacccagcacttttgttgctccacaccattgtgatgctgattctgtcttggttgttactaagggtaagcctctactctaatgttcatttttgaaatcatgattatacaaaattacaaaggaaattttgtgatttaataacttggcttgatcatatatccaggtaagggaactatcaatgtagtgaggcaaaacaacaaagagtcccacagcattgaacgagctgatgtaattgttgtacctgctggctctactgtttacatgaccaaccaagacaacaaagagagtttacaaatagtaaagctcatcacttccatcaacatccctggccagtttgaggtaactaaaatatttttctacttattatcaaataaactttcatcaataacaatctattaaattaacataacatattaaacttggcttacttttgtgttcaggaattatttccaggtggctcaggcgaaaatcctcaatcatatttcagcgcattcagtaacaacattcttaggccatcactgagtgtatgtttctcttttatcatatcctttaatttgttatttggttaagtgattttaattttaactcttgattattaaaatttgggttttgatttgtctatccatacttttaggccactgaagaacagatagagaagctcactggagaacagaggcagggacagagacaaggccaaagggaggggttcatcaaaagagcatcacaagaacaactcaaggccttgagccaacatgctacttcaccgagaagaagaggccatgagtctagtggccctgtcatcagtctccaaaatcaatctcctcgatacagcaacacccatggaaaattctacgaggttactcctgagcagaacaagcaactaaaggatatggatgtgttggtcagctggtgtgagctcaatcaagtaatgaaacctttatccatcaacatgaaatagtcatctttaatgggacattttaagtctatgttaataatagtattggatgaaattgtcttttttgtagggaactataatggtgcctcattacaactccaagacaacagttcttgtcatggttgtagaaggaactggacgcatggaaatggcttgtcctcacctctcaaggcaaagtcaaaggagaggagaacaagaagaagaatctcagagtggaaaaatcgagagggtcactgctcagctctcacctggggatgttttcatcatcccagcaggtcatcctgttgccgtggtgcccaaca

SEQ ID NO: 219834 - DNA, 4918 bp, Cannabis indica
ggtgtgactttgaattattggtgtgagatttgtgcctgattattgtgtgaatcaaaagaaagatgccaaagaaccaagcaagtgggctcagaagaaagaaactaacctaacctggaatgacatcaagcaattcgtaaactgaccgcagctaaaacaaagttacaaccagttcattcggcataaagaattctatattgagcgagggttgatggtttagcccactaaatttggaaacttgccaagttggttagtggaacatatcaaggcaagaaattgggaagactttgttgtagctccggaacagctttgattgaagttgttaaggaattttatgcaaaatttttagatcatcagtggccaacaatatttactgttcaatgagtggatgtcccatttagtgctgaggttataaacgaatacttccatctcagaattgtagaatgtgagtactctaagtgtagtgagaatgtcactgacaagctcatccatgacattctgcccaaattagccaaactagaggttgattgggagattgatgaaaagggcaccttttggtttagaagaactgatctccaacatgacctcaaatgcttgtatagctttgtccaagcaagtgtcctcccaacctcacatgactccactgtgagtagggagagaatgtggatgttgtattgttttatgaaggggatgaataatattgattttggcagagtgttggctaaagaaatttttgactgtgcacactgggaaaaaggcaagttattccttcctgcactagtcatggaaatatgtaaggatgccagtgtcacaatgcaaactaatgaaagcacagttccaaagaaattgatcattattttgggcatgctcgtgtctcgaaacgcaccccatagtcgattccacttctaatgatcagttgttgaattgattgaccaagcaagaaactttacagcttcaattatctcagcggtaagcgcaaatgagtgagcgtatgcatgctcactgggcctatgaaagggaaagagacatgtgaatgaggtgtgcactgtagatcaacctgcccaaacaagtttttggatttctagaattttcggatcaaattcttgagccgtggttaccggttaatgaagtggacgagactcttgtggtgaagagtttgattcttgaaggagtttttcttttctctttagtttaattttactattattgtggttgtttgtgtttgtattattgattgtgtgtttttagtatcttttgctgttaaatattgttgcatttttattttatgtgttgtgttttgttaagttgtaactgagaggattagttgcttgtttagctaggttagcgtagcgctcgatgacaaaaaaaaaaatctatttttccctctatcccctgtgtgccttggtttggtgtgttgaaaatgctagttttaagtgttattttgtctaaatgctagcttaggagtaatgttttcaatagttgtgtgcttgtgttatcccactataccttgagtttctagaatagctaacaccttaagagagtttaagcatctagagttggttagtgtaattcttgaggcaaaatcctagctagctttacaacttagaaatgatctaggccatttttgaacgatttaacctttcaaactaacccaagaatatttaattgtcaacagtcacccctaattgagcgaaaaagcctagttttttttcttctacaccaatcaaagttaatagacccacacacacacataaatttcatccttcacaacctaagcctaatcggtgaaatttatcaaggacaaatcaaatattatttgagataaggaagtgaggatacaagtttacaaagtgtggtgaaataatttacattagagatgatgatggggtgtgagtttggggtggtgaaagtttgattcacattacataaaagtccctcttttgctacatatagttatatttgagaaaaaaaattatatatacttatgtgaagctactgttgctgttcaaaagaaaaaaaaaaatataaaaaaatgatatatatacaataatagtagtaaataaaagagagagaaagagacagtttaaactaagtttggggtgtaccaccccttatccaagaaaacgtagtagcttttgctctccttatctagtttgctttggaactaaaaatagcaagagagtttgagctaaaattagttaattattgcgagttgagaatatatttttgggtgagtgcttaagaggaagagaaaagtccttgataaattgaggtggttaggttataagctaaagaaatattatctttcatcctacccgaacctaagcctcacattacaagcctagtaaagtccttttgagctaaggtgtaaagctagactacattagtggagaaggttgcaccgattcaacttatggaagcaaaccttttaaacttgagatcgagggtagttgttatatgaattcaaggtgttggtgggaagcatttgtatatactctagtgattgagttacttttgttaaatattgtggacataaataacatgcaaaacttgattgaaacacgcaggttcaaggcatattcactaccatcatttcacttccattccatataactctgagagcattttcttcactaactaagtttgaatgagtgatatcctctctgtttctagtgttttgttatcgctatcatgtttgtctttgttgttttgttctttctatttttcattactcgaggatgagcaatattttaagtttggggtgtgattactctatggtatagagttatttttatcacattaaacttcaattgtgataaagagagtagtgaaagagtgtgctatttgttacttttgttagtttttatctttctttttaatttagcaagttaattttgggtgtctattaaatttttagtcttaattataattatttaattagttgtctattttgttgttagaaagaaccctctaaatcagcccaatgaaaggatgcaaggcaggagctttacacttgaaatctgagaggaaatgctgccagaatgctatagcgttctgggcagtgacatgtcagagttacaaagggagttttcatccatccacatcagcaatcatatggcatccaatcaattttattccaactggctgttgtgaaaataaaaataaaaaagagaccaagaatagtgggccaacgtggagagaaatgggcttctaattaggttattgaaaaaagcaccctatagacctaactttgaggagtaccagccactacatatatatcaatacacacaaaagggtctaccattattggagagaagttgtagaaaagaaagagcatgatgatgaagaagaagaaaaagaaggaaacacaaggaattgaaggaggaagataaggacaagaagatccaacctacaacaccatcaatctaggctttgttctcatttctttctttcttctttattttgtattttcttattttgcatagctattctagcactcatggatattaattttctattttggtttatgtttgctactttagttatgagctaaacttttgagacttgaatggttaaaaatctcttctgtcatgtattttaaatttgaatgcattacttaagctaaattatcattattcattcaagtgagcttcatgtttatttactattattgtttaaaaatcaatggcaagttattaagctagatttaatactggaaaggttaaatctagtagttggtacttgaatgatgcaatgtaaattcttaggtttaggtttttcttagtaaaggaaatagggatatttcataacttgcataacttgagaattgatgttttacaacttgatttgatatagaaatatattgaactaagtggtatagctgaatttgtgagttttgaaaaaatctcataaacataagaaaaattctgttaactctgtgcaactttgctaaagtaatgctgaaaaattggtctgatttaacaaggggggatttagctattcaagtctattattcctttgattacttttccttgcaattaattttccagcatttgtagcaatatttcaatcttaattccagttcaatcaattttattctactttacaacatccaatcaatttattttcttaaaatccaaattgttaaataattggttttgcattaaattttacttgctatccctatggagacgatcttacttaccactttattatttgtgtgactatgtatactttcatatattaattttcacaataacagatgataacatgcgagcttttatttgtcagtttccccatatgcgctctgcagaggagggaaacatttatcttggacttccaagatccatgagccatgacaagtcaactgttttggggtattcgaaagagagggttcgcaaacattttaaaggttggaaagggaaactcctctcgagaattggaaaagaagttcttgttaaaacggtggctcaatctttaccaatctatgctatgagtgttttcctacatcctttggagattaatcagtatatcaagcgtatgatgaccaaatttcattggcaatcctctaatagttctcgtcaaaggattcattagatgtcctaggattgaattttttttatcaagaaagggaattcattaatcaatactaacaaattacatcaaatccggggaatacctctccaaacccaaccactcttgcaaattcttaacacatctacaatttttttggacaatttagaaaccttaacaaataaacccttgtcttaatgttctctttgaaaagtagatcaatacaataaggtgacatatatctaccttcaaacacacataagtttctattcaaccatgtgacagtcagtagtcccgtgatccgtaaggggaaatactgggtaagctgtgcaatcccacatcgcttggg

SEQ ID NO: 219835 - DNA, 1794 bp, Cannabis indica
gcagttgataaatctaacacagtggaaatgcattatttaaaattatttacttactgtatcttgttttacaaatgaaggatctttctctgttgcattttgattttttttaaaatccactgttgtatttaaattattttttttatcttttcaaattatgcatgaaaatattatatttgtaaaataaggcaaaatatcggggcgttacaagaaaccatcaaatttactcaaaccgtaattttttaaaaaaaaaagattaacaaataattaatatataaaataatccctaataacaagtttattaaagatatataacttgcttatttaccttggtggcttcattttaagtttacatccttcaaaatttaataaatactaaacatataatatatcaatatagaaacatccatccattaacataatttcaattaaatctattttttagttttacactaaaatatatcaattaattgttcttttaattaatggaaccagctcataatttgtctttgttttaaatgatcaatcaactctataaatagttgaaaatggtaaaatgttaaggaattcaaagttgtctttgttttctattcttttaataaaattgcaatgcagctaattaattgggaatctttcccattttatttgtatatttatatatttttgcaattacctccttcaatgtaatggtaattgatatagagcataagtttcaaacaagtattcttaataaagattttttgtgttttgtataactgtgtcaagagactatgtttgaatttttatgtttaagtctatgtatactcttctttattcaacctcatttaattaaaggattctaaagttacaaactggttctttaaagcttataataattttaataattgaaatactgttaaattgaatatttcacacttgatataaggtttttatttgttaggatatggtttgatacatattcctttaatttgtattcatatatatttgtggtattatctagtttatatattatttaatattctctttttatatactcacttaagtattaagtataattatatattgtgtgcgaaatatactgaatacacaatggtatttatttgttgatttgaacaatatgtccaaatgtgatcttcttctgatccattagagattcttagcattaaatatatggtgataaaacaaaacagttacaacaaagtaacagtttggtcgtttggaattggtctccctctttattctattgaatctgattatccagctgtgatttttgttttcgctaaaaaatcatctctttattatgattttggttcttttttagatgatatttctagtcttctatctaatttttttttaggcgtccttaattcatgttcgtcggttgaccaataaaattgtttatgaattagctgtgcacgtatttaaggtgggtgataaattagtttagatgaaagatttttcttcttttcttttcagtgtactcaaattttttttaataaaattttgttcattaattattcaaaataaataaataaataaataaataatagcttggaatgcatagttacatttaactcatatattagtaatgatattatttgtgtaaaatatgcagatttgttttccaacatcatttaaaaatacatcatactgctaaagtagttggtattatattttattttaggtttttaaaataatatttttagaaatagaaaaacaatattttgttgttataaaaattattatttttataaatttttaaatataaaaaataaacacatatatgttttatttttg

SEQ ID NO: 219836 - DNA, 3712 bp, Cannabis indica
agataaccatatcagtcaccaaagtaggtaacaaaacagttggaatggaatccaaactgaaattacaatcagggaacgatacagaggctcgagcgaactcatgagctaccgtatttgctgatcgacgaataaaataaatagaaacattttttagttcaataagtaaagccttacaatcatttaccacttgaccaaaagtagaaatcataacaattgaacttcttaaggcttgaacaacagacaaacagtccgtttcaatcactacttgctgcaatctgctggtttttatccagctcagaacctcccgaattcctacagcttcagccaattctggtgttgcttggacattgaataatcttgtatggccactgataagaactcccctagtgtccctggcagcccacccaactccaaactgcctggatgtttcaaaaatcgctgcatcaacgtttacctttatagaattctccgttggaggctcccaatgctcggccccgtccccattgattaaaccagaggacagcatctctaaaccagatgaatgagcatttttccattgagaaaggtaaccttttgctgacgaaacaatagcatccacagtcttggatttgttttgccacacccgatcgtttcttgcattccagattgcccaagaaattgccacaaacagttcccgattctccctatctaacaactggaagttgctgatgcaccagtcgagaaagctgtggtgttgctgcaagaccgaaaggaaaccggctctgtcccagcagtcttgagcaattcgacaggtcactaaggcgtgggagatcgattcttcttcaacagaacaaacagggcaaagagaatgagggactgcacgtttaattcgcagttgcaccatcgtggggagacagtttgtgcatgccctccacactagatttttcattttaggaggcatttttaggttccagaatattttccagaaactattaatctgagattcttcaaaatttgccatacctttcagctcttggagacgtttatatccacttttaacagtgtatagacccgaaatttcaccaaaccagattaaatggtctgtaccggttgtaagattgattggaatttgagtgatcaaagctctatcccgaggttcaaataagtcattcagtatctcattatcccagccaagaccatccatagtcaataaattggcgactttaacattctgcagacccggatgagaagaaataacataagcatttgctttgtctggcagccacggatcactaagaacatcaatgctttttccatctccaacctcccatcgaacactaccagcaatcaagtgttgagcgtctagaatactcctccacacaaaactaggattagaaccaatttcagctgtaaggaatgaaccattcgagtaataccgagctttaaaaatacgagccaccaaggaatttggattggttagtaagcgccagccttgcttccccaacatggcaagattaaaatctctcaggttacggaaccccattcctcctttggttttgtgttgacaaagtctttcccaggacatccaatgaataccggagttactactagctgaagtcctccaccagtactttgacataagactttccatatctctaactacttccataggtaataggaatacgttcatggcgtagctaggaagagattgggcaacagacttaatcaaaatctcctttcccgctttagaaataaactttgcaccccaaccttgcaatcttttcctcaccttttctttcaaataactcaaagccgatactttgtttcgacccatagaacttggtagtcccagatacatactaccttccagagcaggcgccatccccaactcgccacagagatggtttctcaaagtttcctgagtattagcactaaagaaaattgacgactttgagaaattaaccttttgacccgatgccaattcaaacttgtgcaacgcttccttgatccgaaaagcttcagcttcagtggccttacagtacaaatagctatcatctgcgaaaagcatgtgagagatccttggcgctccattagctactttacacccgtgcaaccatcccctttgttcatagcgtctaagcaaagctgaaagaccctccgcacaaaggatgaaaagataaggggagagtgggtccccttgccgaattccccgtgaagggatgataggtccgacttcatggttcccatgcacaatcgtatatcgagctgaagatacacaattcaaaatcagccgaacccaaagctctgcaaaacccattctcctaagaattgcttcaagaaaagaccactcgattctgtcgtatgccttactcatgtcaatcttgagagccatatacccttcctttccttttctctttcttttgaggtagtgcaacacctcgaaagagaccaacacattatccgaaattagtcgtccggggatgaaagcgctttgattttcagagacaatggaatcaatgaacggcttcatcctattaaccatcactttagtaataatcttatacatgacattacacaaagcgataggccggagatcagtcatagcttccggattcctcttctttgggattagcacaacattagcttcaccaaaaccatcctcaaacaccccattagtaaagaaagaccgaaccgcattcaccacatcgtgtctcacaatagcccagcaacgctgataaaaagccggggtcattccatctggaccaggacttttgtctgggtgcatctggaaaagagccttctttacttcctcttcttggatgggctgacataactcgttattcatcatggccgaaacacaagtaggaacacaatccaccacttctctacaatccgtattagaagaagtaaataatccttggaaataatctttcataatctctcctagattcgaatcccaggtggcccagtttccttgagcatcttttagttgctcaatttggttgttcttctttcgactactagccgccttgtgaaaataactactattttggtcaccgtcacgtaaccaaaattgtttggccctctgcttccaataactctccctttgatcaagagctttaaaaagcttttttttcacttcagtataagcttgcaacgaactggcatccctctttccttggagcagtttcatctgttttttgtagtccttaattcggtgattaagagaacccgtaacctccttgccccactccttaagtttctctgcacaaaggtttagtttacctcccaaactataatcatgaccactttcccaacaatcttttacaatttcagcacataacggctctttcagccaagtgttttcgaatcgaaaacgatgatgaggcgcaaagacagtaggaaggaccggttcaagataaatagccgcatgatcggagctagagtaatctaaattagaaagagtagcacttggaaatacctgaaaccaagtcgaatttgcaaccgctctgtccagacggatctcaatccagttagtagagcctctactcttttcccaagtgaatgggtgaccttgaagttcaatatcagccaagttacattgttgcaaagccgaattgaaacccgagattagtctttcgggataaggccgaccccccttttctcctcttgccgaactatattgttcatgtccccaataagacaccatgggagtgccgaacgactagccaga

SEQ ID NO: 219837 - DNA, 4781 bp, Cannabis indica
ctccaaatattataaaaagctctattttcaaacaatttcttattacaatttatctttacaaaaaagaaaaaaaaaccataattctcttgagagctttaagcttgattaaaagaacaacaatggcagcaagtatctcttgagttgagaccaagttttcggtagttcaagcattaggtagttagtgataatggtttcttcatttggtgtaattattaatgattacaagtttgttttttagttactaaaggtttctatttttatttgttaaaagatcattaaatggggtggtttatagttttgttagagtatctattttttatctaggtggtgagttaagtttaaggcctgttcggtaacctttttgtttctattttttaaatttacttaacaaaatcttgtaatttgtttacgttttttgattaattaatcaaaaaattgattatataattgttagcaaacaataccttaatttgtgaatgtctcaattaattttgttaatttgtttggtaaacaatattgatgtttaataaaaatttgattttcattaaaaaaagtttagtttatcctaaaataaaatttagtggttatattaatattggatgcatagcaaaattgtttaaacaaaatttgcctagggttattttttttttttttggaacaatttgagtagagttagttgataaagaaagttttaagaaaatgaaagttcaaaaattaccatagagtgaaattatataataaataaatagtaaatattattttaaattttatattttgtaaaaattattaattagatattttattttatcaaatgacaaaatataacttaattagatagttgagaatccggacaatttgatttattttgattggcgcctcgtcagtgccaaccaagcagttatgattatcccacatcggaattaagttatcctttctacggatatatatattcccattcccatatatacgcactcattttttattaataaaaataaataaataaataaaaatagattagaaagcttacgatgagaacgatgtggtcgaagatcgtctgataacaacacttgaagaagaagaagaagaagaagaagaacaaggaagacacctcatcgccgtcgccggcttctcgctctttttctttatccggcgactataacactcatttcctcaaattcctactggtcagtttttattttttgttcttttgcttaagattcgtatttgattctttccgtgaaccctaaatcgtctttatttttccagatcggtaattaccgaacttgttttcggctcctactgtttcggttttttttttgctattgagttacgatatcggatgtcgaatctttgtttgttgctttgcaatttttatgaatttgttattttttgttgtttttgaaaaggtagattcagtttcttgtctggctaaatttcatattttgttgatgtgtgtgaaattatgtctttcttctaaatgaaagttgaaggcttgcagatttgtagtaatggaccggttaggttttaagattgagcgagcaaattgcaggattggattttttggtaactttcaatggaaaaagaagcgttttttaatgaaacaaaattggatatcttagtgagcttgtttgaccgaaaattaattattttttaaaattattctggttggtgaattagaacagtcctgctgttaagcagatgaagtcagaaaccaaattacggagaagaacttaataagaacatgtaatgaatgaggaaccaatactttgtactagttaataatggaggtagctagaataagaatcaacgaactgtttccttttactattcattctgatataagttttgggaatcttttctcataattagtgaaactgtgaaagggatgatctttatttttttaagcatttcattctcatttttctgacagttttcctgcacgatttgattgattacagattagtgaagatgcccacgattttatctattttctttttggccttctttttcatatgcatgttttctctaagttagttacacaatgttggattttagaattgctcgagctcatttgtttcctgttttcagatgtttctatgtaaaaccgtgggatttgggatgctgcttccattttattttaaacccagataaataatattttttagatgaatatatatgcttgagtattttttagtagatttctaacatttattggttatacagactcagattcattcactgactaagattccagaaagttaaattccaaatctgtttgtgttgttgaatgcattcaaatatataatttttttaatttaatgataattattattataatttcaggtaatgaaaatggatggatcaactggcagagcaggtggcaatgtggatatgtttttaccaaattacaagctggggaaaacacttggtattggttcttttgggaaggtcaaaattgcagagcatgcgttgactggtcacaaagttgctattaagattcttaatcgtcggaagattaagaatatggaaatggaagaaaaaggtttgtattatttctccgatgatggccagtagtctatatgataatttatgtctcggttaattgtttgtccttgtgatgtccgttttatttgacattcatattctagcatggtcataatgtcttcttattttaaattactggattaggaggagcattcttttttattgttaaatgttaaaaataattctttttatgaagatcatggttttcttcgacaatcatattttggtatggtcagttggtcactgctaataagtactcatttttattcattctgttaggagtgatctgtttggagttttaaatgttaagagttttttaatgatgaccaagagttttcttcaaacaaagaaagtctgccgtagagagttaaagtaaattagttatgtatgctttctatatggttattgctgcttgattgctgataagcagtctgtgcttagtttggtagtgggttactgccttcgtttttattttttcctttaaattctgtgcagtgagaagagaaattaaaatattgagactgtttatgcatcctcatattatacgactatatgaggtcatagaaacccattcagacatttttgtggtaatggagtatgttaagtctggagaactctttgactatattgtggagaaaggtcggttgcaggaggacgaagcccgtaacttttttcagcaggtaccttttagttttcctcacttgacttcacattatctcctttcttctcgcaaacaattacatggccaatcttttgcctgaggcagataatttctggcgtggagtattgccacagaaatatggtggttcatagagatcttaagccagaaaatttgcttttggattccaaatgcaatgtgaagattgctgattttggtctgagtaatataatgcgtgatggccattttctgaagacaagttgtggaagcccaaactatgctgctccagaagtatgtagtttttggcattttctgattgtaatagatatatttttgtagttttgcctttaattaatctccaaggtaacattttttgtcatttgatcaggttatctctggaaaattgtatgctgggcctgaagtagatgtctggagttgtggggttatattgtatgctcttctttgtggcacacttccctttgacgatgaaaacattcccaacttatttaagaaaatcaaggtattgttattcagctcggatctacagctggtagtagattctgttattcattgctgatacctagttaggaatacataaaattataatgataactatgcttttgtttttctgaccgggtaatattcactatatttaatgtcttctttctttttttcccctcttttcttaccaggccagtccaggacacttatcacttttctttttctttcctgtctattgtcttgcttctgtctatatttcacagtatttgaatgtgcacttactcaactcacataaatatatatttgttttctagggtgggatatacactctgccgagtcatttatcacctggggcaagggacttgatcccacggttgctcattgttgatccaatgaagcgaatgtccattcctgaaattcgccagcatccatggttccaggctcatcttcctcgttatttagctgtgccccctccagacacaatgcaacaggcgaaaaaggtttgttgccatatcaattgcagtttttcttctctatatgccatatggaggtagctgtgcatgtgtggttgtcaattttatagcaagtgaaagttaggaattatcttatttgtgtctgatgcatgttttgttccaaatgaaagttagctatgttttattcctcctctagcccatccttttactgtttaatgtatagagaaccatgtcgatttcttgtatgccgcttttattttattttcatataacatcggcctttattaacataatcagttcaattttttgccttgcttacacagattgatgaagaaattcttcaggaggtgattaagatgggatttgacaggaaccatctgattgaatctcttcgcaaccgagtacaaaatgaggtttgaaccttgaaaccactctctcttagttgtttgcaacgtttgtctcattgtgtgaagcatatcacaggccactgttgcttactatctgctattggataatcgattccgcgtttccagtggttatctgggagccgagtttcaggaaacaatggtatgtttcatttagcattattttttttattattattt

SEQ ID NO: 219838 - DNA, 3204 bp, Cannabis indica
atattaagtgagtgcactattaattttttaaataatgtcgaaaaaattaaaaaaatctaacataatatcttaatttatttcaaaaataagaattttttaagttttccctaataactaaataatgattcaataaagaccattccaatatggtcataagatcaagctttgaatgttataatataatttaatgatataattagtactaatatgtattttttcttctataaaattaaccatttttaatatgttttgagatgacacccattataaaaaaagacaaaattattcaaaaataaaataaaaaaaaataatttacacatcaaaaatattaattagtatgtttgtaaaaattattggacttttcttttattggtcactcttgagttatttactataagattaatacatcattttgtatagtgtttattatttaatttccactttaggattaagtctacatcattattaatatatataagactttatatatgaatttaattatatttaaaggtaataataaagagcatatacaaataaaactgtgggctgattattcatcaattttttaatctaaaaaaaactagtacaaatatgtttttttttttttaaataatcacattattatattgtagttacatatgatttttggtacattttctaaataatcacattattatttttatatcattttgaaaattttatttaacacaacagaaaatccaattaataatttttacaaatcacaagatctaaaataatattatttaccctatatatttcacttttgaaacctattaattaattttcaacatcctaaataatttccaattttgtttaagtataataaatatcatcagtagtataaattattacactccaacaacttgagttatgacatataattagacaaaattaaaaggttcctaaatacagctgagtccatatagtacctcttattattaacatatatatgatcacatgttttgtgattatttggtgatatttatgtaacatatttatatctaggcccctatatatagctatatatatatatatgatatttatatatgtatgatcatcatcatcatcatcatcattcatcattaaaatctctattgactattatatttactcatatatcgatcatcaaatcatcattttatacgtgtgttttatcttatgtaaatatatataaatggcaattattaaaacaaactaaacaattttgtatatatgtataactccactccacatgtttatctatctaaatatgttttaatttaaaaccaacttaatttccagctattaaattacatacacaatttttctttgtatctataattgaaaaaaaaaaaaaatcatatagtaggagcaaggaatcaagactaaagtggctaaaataacaaaataaaaatatagggtggggaaaaactagtatatatactaattaataaaaattaaagaaatatattaatgtaattttttttaatctttaattaaaattttagggtgggcaagaccattcttgaatttctaacttcgtttctaatattaatgatgtaatatatatttttttggagaaaattcgaagataaaaattattgaatttaatattattattttaattttttttattacaattttataaaaggtggaaacaattttctagtaacacaaaaagccacccattgaaatgaattggatgcattaattttcagcttgttcttttagcagagtttatttaactatataaatctcacataactaatataaataaatgaacttaaatcactgattaatatattgctgaattttttgcataaagttgaccataaaaaaattgaccccatttataataaatgtttttattaaatatttaatggaatatataacttggcttagatttggcaattggcattattaggccttaatccaaaacaaatcaacaacttacatcaactatgataattttgatcaccaaactctctcatatgaagagagagaactagtttagcaaaattttaaataataaaatttattgagcaattacaaaataaaaacttaaaaatattcaaattaccacaaactaaataattttttttctttaaaattaagtcatatacggtcaatcacaactctttcttgttcaacaaattggaaacaatttgagaatccgtttcgatttcaatattgacatagtcaaaacgagaacataactggagacccaccaaaattgccatagtctcggccacagaagaagaaagaacacccaacactgtagaagtagaagaaataacacaaatgctattgtgatcacgaatgactgctccaaaacccatacgacattcactaatacacatgtatataatataaatatactaatgcacatgtatatttgtatgtatattataaaaaaaaaaaagtattaatattaattataaaaaaattagttttgaaacttcttggaagctgcatatatacgtagtagttttagtccaatagtctcaaagtgaataataatcatgaatattattatcttttctctattcattacctaacaaaatacaagaaaataaagatgaaaatgccatatgtttgaatagttttaactatatataatatatatgtaatgcacttgaatattttggtgtctaattaagtacattttttctgaaatattgtacagccatatatgtataatatataaaattgtccaaaaaaaaaatcacctttcatatcatataatttgtacccaaaaagaaataatataagtacacacagagaatatttacaagattaaaaatctaaagttacaatggaaaagtctatgttacaatatttacatattaaatataaaagaaacttccaaaaagacttcttggaatgtttggtaaactaaggtttttaattaatagtaatcactttgaaatttgaataataggtttttttatctaacaattcaaattctttttcgaaattgatttaaatgtacacttattaatatttgcgcaaatgaacatatttgaacaaattattatttaataaaataaaataaaaaaatcatattctttccatagttgtttaaggactcatatacgtaaaaatataattataataatttcaatttcagaacgataccttgattagattagattattaatatttcaaaaatatctttattttcacagttatatctaatattat

SEQ ID NO: 219839 - DNA, 2765 bp, Cannabis indica
taacttagtcagatcttttgaaaataccaaaagaaaagacatcaaactcacttaattacagtatttccatttgttaccttcatcaacagttgtcgttggcttgaccaccaataaattctcctttcgagtcataaaatcaccaacagtatacaccttactcattgactaaatccaaaaaaaaaactaatcaaaaaaagaaaacgacgaaaacaattaaaggtgaagaaggcgaggacataccggggaagaattgacggcatgagcaccgaaggaaacagccatcggggggagaaaaggacgatgtgaggcattgaaacgacgtcgtgtgactgtgaggagattagtcttgaaaggtgaaggtaacaatggttgagattgagaatgagagtgaagaagaagcggagtgtggttagtgagaaagtagatggcgttggagttggaagccataacctccataatatcaatggtcttattattattattattattttaatagatcaaagacgaaatcagtgtctgtgatctgagactctgtttatattattaaaataaagagagagaaagagaatatatattaagaatgaatctgtggaagaatatattgaattaataattaattaataaataatatataaatagaaacagagggaagaatgtgaaagtgttacttttatttttttttaattgatgagttggctaattgggtaacttgggttacttgaactccgcaactgtaggaagtgaggagagagaaagagagagagaaacgcaattggtttggttgtttgtttgttggtggtgtggtggactggactttttcaatattcctcacgcgccgcttcaaacttcttgctttacaattttatattgctttttctttctttatgcaaattccatgtaattccctaatttaatttcttcttaaaatgaattccaaattctagaaggaatttatttttgttataaattttggctcgtactaatggttgtgtacattggtcgatttagtcggttttttgaaagaaaatgattcgtgcatagataaaagttagacatcacagttattacacaaaatgtttactgagataaaggatacaaataagcagtcatactgattgtggttaaaggcccactttgccatattatggacaacaaaattacatgatcgacccacaaaataaggagaaagactattacaaaataaagagtaattctcaacttcccatcgagtctccttcccattgaaagaatttatcactgcccttgagtcgctctccacaataatgaacatgcatcctttttctttagccttgtctagggccaaacaacacgcagtcacctctccacaaagggcatcagaaaagtccaactttgtcttgcttacccaagccacctagccttcatggtttctagctactaccacaatactcatgcttttcaaacccgcttttacatcacatttcagtttaatacaatcatgagggggaggacgacaggcttccaccaaaattggagtaggagtaggaaggagggaagctctataatctgcaaaagagtgatgaatatagtcgatacagcgctttacattatctagattattattgtgtatcttatcattgcggaccctccaaatagtatcaacaacaatcgaagcatacaaaaagacctcatccgcatttactcctttagaatttagatttcagataaatttgacactgtcccacgtgcggatacatgtacctgaaacagggaaaataccccacagcaaggatcgccacagatggaaagccaaatcacacttgaggaacaaatattctatagattcttcctcaacccaacaaatagggtaactcacatcatcaatataaaactttttgtgaataacagattgaattgggagggcattaatgctccaccaaaggaccttatggcgttccataattttactattccagagcttattccaaaacgacggagcaacttcacactgaggggccctatgcaaagcttgcaaaagatagaccgatttgcaagagaaacgcccactactctctttagtccagacccatttatcctctccatgaccagcaggtcttccgcttttcaagatggtagagatggtatctttttcaaacaggcagttcaactttgggtgtcccaatccccatcttctactaatagttcaactactttagtaaaaccaaaagttgaggatccattagattttgggagaaaatccttcccatgggccacccaaggatcctctcaaatactagtatcttcaccgtctgacaccacttcacaggctcttttccttaagatcacatttttccagaaccaagaatctaaatccttgtatcggcactttaggattcccttccctttcaaatacttggcttctaaaatcctacaacaaagagactgacttcctattaataaattctaaccccatttagccaagaaggctaggttcatctctctagttttccaaaagcccagacctccacgagatttgggcagatacaatttattccaagctttcaggtgcaacccatgattgcctttctcaaaaccccaccagaagtcacgaaccatttcatcaattcttgagcccaatctatttgatagctttgtagtttgcatggcataaatggacagggagagacccattgatttgataagggtggccctccctacctttgagagagatttcgctttccacctttgcaatttagaagtgaggttatcataaaattgaaatcatc

SEQ ID NO: 219840 - DNA, 2297 bp, Cannabis indica
tttgagcgatttgagcggcttgatgaacacccctagttttacctctatgttcagctttatgttgaaggttttggccatcagatgttacatgattcgttgctccactatcaatgttctagggattgtcatgaggaccatcagctgaagttgaggaatagaaggcttgtttccctgtgatggagcttgctgggcaaaaagagtgttggtgttggactggtttgagacagattgagcttgaaaatttatgttaaataggtggtagcacttagatacaacatgtgcaaccctattacatagttgacaaactagacaatttcctcctcttccacctcgaccatggccacaaccaccagatgagtatcctataccctgagcactatttgaacacgatgtaccaccactgattgttgcagatctgctaaacaggtagcaaagttagcattggcgaagaaaagtcaccagtagtgggtgtattgagctgctcaagacgcatctcttgactctgcaatagaaatattggacttcctacagggtgatgggatccggtcgagaggtaagtattatcacaacagggtcataatcatgccccaaaccatgacatacatcaaggagccaacaacactagcatatggaactcttaacatttttgacttctcagtctcatctttaggcatctgagtaacactcaatttgaagtgttgtgcaagtagagtactaactgccttagagttactcatttcaaagatatctagaacctttctgatgtagctcgtctgaatcaagtgcagtagtttcttccgtccttcccttattatatctattcctaagatcttactaactggacctaaatccttcatttcaaactctatctttagttggagttttaagtacttgatctcttgtacagtcttgctagcaatcagaatttcatctacgtacaacaataaatacagtgtatctccatttctctctcgaaaatatatactgggatcaaacttacttctcttcagacctatcttggtcacataataattaaatctcccattccactgtctcggagattatttcaaaccatatagagactttcacaacaagcacatccaatgttcctttccagcctcctcaaatatttttggctgtttcattagaattctttcatctagatctctatacaggaaggaattcttgacatctaactgttctagttcgaggtgttggcatgctacaagtgctaacagatttctaattgatttgtgcttaacaaccaaagaaaatacatcattataattgactctttctgtttgagaaaatctttttgtaacataccttgctttataccaagcctcttgtacactcggaatgccttctttctataagtacacccatttacatctgatgactttaacgtctttcggcattggtatcaagtcccaagtttagatcttcttcaaagaatacatttcttctgacatagctctattctatttctttcaatttttgcttctcattacttgtgcatagctagtaggctcttcctccacaatctaattaataacataaaatacgaatgctattagatcagcatgtccatatcaatacggagcctttacttctctccatgttctgtctctagctattttataattttctagattattgcttccagactcatcttctgaatcattaattttgtgatctataggtgtttcagtctccattttttccagaggctccacctcaagctcaattccctgagcttcaatttcatttcggtcagatccagctttcagcaggtttgtcaataaatcccataataaattcataaaaggccacatccattatatattttcttattccaagctttagacaccactgtctataacctttgactccttctggataccctaagaaaatacactttaaagatcttgcctcaagtttgtcttgcttgatgtgtacatagctaacatatccaaataccttcaagtgttcataacttgttagttttcctgaccacccttcatctagaatcttgaaatcagttctattgacagacatttatttatataataagttgtagtggacacaactttcgccctaaacacattgggcaatccaacactcaatttcaaggatagttttgttgaatctctctacaagtccattttgatgaggagtcttcctcacagtcttgtgccttggtattctttccttcttacagaacacatcaaccttttctgaacattattccagaccattatctgttctaagtcgtttcacttttcttccagtttgat

SEQ ID NO: 219841 - DNA, 1798 bp, Cannabis indica
cctttcaactaacacaaaatttgttgtagctgcccaatgatgaattgttagacatgacataaactaactgacaacactaactaagaatacaatatttgaatgcgtcacagtaagataatttaactttccaactaatctgtgatacttcttagggtcttcaaatggttctccatcactcgttagatgcatagcaagattcattggagtactacaaggtttttctcccaatttttctgtctcagttaacaaattaagtatcattcgagataaaaaaatacattgtcttctccaattgacttcaattcccaagaaatacttaagtagccccaaatcctttgtgtgacattgggtatgaaggaatggtttaagggatgagatagttctagcatcatctctagtaataataattgtatgcaaagggaggcaggttgtttgtcccaaagtggtggcttgtagaaagagctactcaaagaaacccacgtcccttagtgggttggtcattcaagagtggccagaatgatggaattgctgtcttgatcatacttttggccaaatatggaacaagacatatagattttggtcaagacttgtctggtgttctagcaagataagattgagtagaagcaagaagcaaggctgttgcaacccctacctatacttgagaagtcatggcagtcaataagtatggattttattgtggaatttccaaaatttaaagggtttagatccattttagtagtggtggatagatgtttctcaacatatgtggttgtggagctaattatgaattttttttggaagtattttcaggttacctgaagacattataagctaccgtgattcaagattcataggaaggttttggaaaacactgttcaacattttggggttcagattcgaaatatttgacaaccaaccatcctcaaactaatggtcaaactgaaagaatgaatcagttactcgaggaatatttaagacattatgtaacatctagtcataggaactggtggcgttgcttaatgtagcataatatttctacaacattaaacaatcctctgccgcatgactgagtccaacaaaaatagtcttgggtagacagccactgacaccacacgaattcgcaaaataaaagtcctaatgggtttgtcctatagcatatcggtttgcacaaaaccgaactgagttattggaacttgctagggatagcctgagtaaagcttcaaggtggatgaagaaatatggtgataagcacatgcgagacttagagttttctgtggaagatagagtgttactgaaactcacgctccaaatttagaaaaaaaatcacaaacaaacacttgcataaaggaacgatccagaagtatgctggtccctgcaagattgtacagaagatgggtgaattgacttaaaattgaagcgacctaagaggtttaacttgcatctaactttccaatgttagtttcttaaagaagtttcatgaagacaagatcgaaggaagacgacaagcgatacaggctcctcctacctataaggaagcaattcaagaagaagttagctaaagtccttgatcatcgtacattgggagctagtaaaaagaatcaaagaacagagtactggttttagtgggaaggcaaatgtgtattatcctgagattaataaatagattagcaactttaattaaaataaattaattataattgagtaattatattattaatatattaattatatagaaattatttgagaattattgcatttaagatccatttatgtagttagaggtatttttagtaatttt

SEQ ID NO: 219842 - DNA, 3188 bp, Cannabis indica
atctacccaaaaatacacattcactatattatataaccggtttgagttatttcgtgttatttatttttattcattgtaacactgttatagaactggttctattctaattataaccagtttgtgttatttcaattacacccataccatatctaccccaaaaataaccattcactatgttatataaccagttttattttagttataaccggttagagttattttgtgttatttgttttattcattgtaaaactggtatagaaccaattctatcttaattataactggtttgagttattttgtgttatttgtttttattcattatgttacaaaactgattatatttcaattataacatgtttgagttattttatgttatttatttttattcattatgttatagaaccggttctatttttctttatatctgagacatctacttctggtgaattttttggcgacaatgatttttctgatgactttttcggtgacttttctggcgacaataactttttgggtgacttttctggcgaaacttattattgttttacaaatataggatttccatatttttgtaaaaatatggcataaaaaagtccatataaatgtaaaaaaaaaaaataaaaaaaaaaaaacccagtaaccccatggtattatttatttatgctataaaaaaataaactcttataatttttccatatatcgtgtaatttctacgtaaatatatctggaaattacataacttatggattttttttcaaggaacttataaaaatattataaaatgagagaaaatttataaaaataatgtgatacgaagttttttacatttttattgtaccaactttacaaaaatactgtgtttaaagttttaaaattattaaaatactgtatttcagtaaaataaaaaaaaattaaccaaaaaacaaccctagaacaacttaacaaacaactatacaacaacaaaaatataactataaaataacagaaaaatgacaaaatattgacctaattacaataagcaaaataatatcaactcctcaatgtgtttttgtattacgaatttttttttacttagttttgacaacttgatttatctgtttgtactaaaacattattttttttcatgtaatttgttgttacaactttattatttcaatttttttttccttttttccttttttttaggataatggaatatatatgagtactgcaatattaggcagagtactgccggcttcataatcccacccatcatgagaggaatcaaaccccattttctctctcttttgaagagatttttctgtaactgaagagtatggaagtccatgttatttcatgacctaccattgattcgtccttagtgatcccttcatcaaccttcttattcgtgtttgctcttttctcagtatttggaaaaacaacatctcagtatttgaagaaatagctatggctgatccaacactaagtgatctatttaaggactccgttcaagtaactacgaatgaactcacactcaatctcaaccccggggaagtcgatctaccggaggaacacagtcgggtgctactgggcaaacttattgtctcaccaggctgggggaaaaagcaattcttggctctttgaagaatgcttggagtactgtcaaagtatggagatgggaggaacgggaagatggactccttcagttcaccttccactccaccactgatgcagataatgtcttattaagaagatcgtggctggtgtgtgggtacctactggttctcatgccttggccctcatggttaactccatctgaagttaagtttgatcagactcccatctgggttcggttgaagagcatcccacccttctactagaacaagactaacctacaagatcttgcaggaaatgtctctaatgtctatgaactaccgaagaacattgaacgtaactttgagagaggctcctttggaatgggcacagtcagattcagagccacggttgatttatcaaagcctttgttttcaggcttctttcttcggagaccagggctgaaggacctatgggtacaatacaaatacgagagactacccaagatgtgttttaaatgtggcattctgactcatgacaaattttgcttcaagaatctgacggtaatcaaaaatggcgaaggagctttcttccccatgtatggagtctggatggatgaagaggcgaaggagagttcaccgttccagaaacccctgccaaaatggttcaacgattggatcattaacaagaaagccttgaaggatcaaaaatttaggaatcaactaaagaatcaacgtattatccagcaagcggaggcatccgaatgtcgagagttgagactgcaatatccgggaaagtgcaggctggcaaaggaagtggtggaggagaggtcggagtcaggggaggtggttttgaaccgttacccagtggtccttctaccagggataggggaagttaccccatttgagaatactgccacgagagtggtagaaaagtcctccctgatcctccctctattgaggatgtgtcgtctgcatcccaatgtatgtctaaaggggatagtacttccatgcacgtagatggagagaatggatgcatggctcacatagtggaaaacgacaatggtgacaagatagacattgcaaagggtacaaaagtctctgcaaatatcgcttatgtgggtactaagggtcctggggacacttcaaagacaaaacggctatctagtgggtccccctcaagaaaaatcagtgttagcaatgaacctaaggggtctatcgctaatggggaaaatagcatgggccttagttcggcccataaggagaaggctcctatccctgatggggccaagcttaaaggctatcctattgttagaagagagcaattaactaactctctcttgggaagtcaagcccaacccatcacttggccctctagagattgctagaatcgggccttccacatgttaacagggagtaacacaattgacaaataccatagggaacccactttgttcaatccaattttagacattgatgactttcggtgctatgaggcagagaaggggcccaaaaaacgcaagtctacatatggtttttttatgctacctgaagagaggccattgtcgacatcaactactgttaggctagaattagtctaagtttcgggtcgtattt

SEQ ID NO: 219843 - DNA, 1458 bp, Cannabis indica
cactcactctctcgtctctcttttctctctctttagggaagtcacacaacacctacactgtactagtcaagtcacccgtcgtcggagctcctgtcattcgtccaccctgcatgacagtggagttggttggaccaccttgaaacaataacttttagaaaccgacttcttgtaaaaattaatgagtatataatttctttagtaattcttgttgggtttaattgtatttagtttgatatgaatagatctacacatatccttctttttgtttggttgttttgtacctgaaatggacttgagtgattttgtattttgtagttttttttttcgtgttttaacatttttagcgatgctactatcaatatttatcgataagagagtgtgttaaaggttaggaatgatatttaacgataactagcaatgttgatagcgatatctagtgataagagagcgtgttgaatgttagggatgtcgtttaacaacaagtaccgatgtgtagcgatttatttatcgatatgtagtagtgttgttgtaatttacgatttttggtgatgcttatcgatattgtttgtgaaatttatcaatatattccgaaagagtgtgtgggaaaattgttgaaaatatttaacaagcaagtgtacatatctattgcaagtattactcataaaggtgaggttgaaaccacatgggttgtagttatatacgttaaaattaattttttacttatattcggctatatcgaaactaagagaaaattaaaactaaaaaaaataaaaacagaaaataagtaaattgatatgtgaattaacaatgattagaactaaagttattgattttaattgtatctatatattatggcctaatataattcaatttatgttactaatttttatacaatagcaggtttgcttagataatttatagtttactcagatatataaatcttaattacatgcaaattttttactttcttgataaattaaaacatgtaaaaggcattaaatacagaaactttataagctatccaaaccacataggtactctcgtcctatatcgaaatttgttcttatttcactatatcataattgacactcacttctcaaatctcgtatcaaaatcataaaatattaattgatggtcaaacaattaaaaaaaataagtacgaatgaaatagaacacatagaaaactgagaaataatcaaatcatattaaaaccataaatagatgtcaaacaatatccatcaataccctaataactatttagctactcttgtttatcttaacaattcgacatatattaacttagaacataagaagaaaacagggaagaagaaatcagtgaaaaaatccattgaaaagccttctcggtcacttttttttttccgacttgtactctctaattgcttgctgaaaagtatgaaatctattcctttttatagccaaaaaaaggataaaaaaaga

SEQ ID NO: 219844 - DNA, 2509 bp, Cannabis indica
cagcaaattccatctaaagagagttgagagagcgaggaagcccgattacccatggtagtcaatttcctttgcaaatcaaagcttatgtgggtttgaagctcaagattcaatggctggaggtatttcgatccttattcatagtgtatatatgtttgattaattccgcactttatacttaaacatatatatttcagtttatacatataaattgtctaacaacacatagttcagtaattaacctatcaattgtaatgttcaaaaaaaaaaaagataaaaaaactatcaattgtaaaaaattataaaaaaaataaaggagaaattcgagcctgaatatgaaaacagactgacatgttttagaaaaatgggatgacatgtaaatatcgagcctacgggtctgttggacttaccctttaaaaatgttagcacgacacgacacaactcatattttttgatagcacgatacgatacgaaacacgtaaaatatatgggttaggctaacacaacacacacgaatttacaacactagtgttaggcactacaagaggtgacatgatgtcatactattattggcacatttcaatatcaaattctacaaattttaatataataaatgatgtaagaaattacaaactaattataaaatgtcacatgtagtaatagaaaccttaaaatgtcaaatagcaatactcttaaagtttatattcaaattttatgttgtaattattaccctctcctttttttatttaagagtaataacatcatggagaaaaaaaaattgaacataaattatgtatctttttttgagcaagaaaataaattatgtaagttaaggttaatgagtagaaacctatggtaaagtgatacaaaatttaatgccatttgtataacatttatcataggcatacagaaattgattaaccaataacaaaaaatagacaacatcaatcatcatatatttttaattgttcttactagtatacgaaagggtttttttttttttaatgtatcaagccagaaaaaaaattaaaaaaaatgggtgtgcttagatgagaatcacacgaaaatagggaccaaaatgcaaaatgagagtttggtttggggtcaaagcttctcttcaccaaacggtggtggtgtggtggtggggtaacaattttctttgttttaaattttatgaatttgtaaaattaggcaaaagcaaaacataagaattatccagattttattcctattatttattattttgaaacagtaaataaattataaataataaatatttaatattaaaatatgatgttgagctgtacaaaaaacatgctagaatccgccacctaaaatgttgctgtatactatttgggttttctccacgcactatcatctctttaccatttattatcaatcattattattttaaattaaagaatgtaaatactattttgaactttgtgttttacaaaagttactaattatatcttatattttgttaaatgataaaatagattccgtattttctaaaatagtataaatatgactctgatctaatttttgttaaaataaaatttaataataattcgatctataagtgttatgacaaaactgtttatattttctgtatctgttcgtattaagaattgtcttcaagtggttatacttttttttaaaaaaaaagttatcgaaaattaaattcaaggtcttatttttaccattttaaaaaatatagggtctattttatcatttaataaaacagagggtccaatcgttgacttttacaaaacactgggtccaaaatagtatttacctattaaaaaacttttatatggttaattattttcaacctaagttgtcaatagattatatttacataaaatttacataaaaattacaaaaaatagcttttattacaattttactttgataatgttgtcccgatttatttccaatatacgtggcagctgttgtgtgtgacaagtggctgacatgggcatgtcacccgaagatgagttgaagatttaactaaaccaccttaagaaacagcaagtatggttcaagatgctagctctcggacatgagcaaaagacgcatcttctcctccgaaagttaaggcacggataggcttctctgcgctagaaaggctggagttgaatagtcacttcgcatttaatgcggcatggagaagacgtctaggaatgcccataagatgacatgtcagacatcataaacctgatttagggcaattacacgataatcaagggagctagtgatgactccatcatgaagaatcacattaatcaagaagggatgaaggctaatctcacctaacacctacgcagtctactacgtaggttgtgcatgtcttattttgtaccttctgggaacttgtgtatgcctatagctggcacttaaagacaaatactccttttcttcttcccagaaatcgctataaatacccctcgtaaaaagattaggggggatcgaaagaaaaaacacggaaacattctttgtaagaaatact

SEQ ID NO: 219845 - DNA, 4195 bp, Cannabis indica
atttgatactttaaggtgtctaatacagttgagattaaagatagaacagagagaaagagaaaggaagagaaagattgaaaatgaatcttgtttattcaatgaattaagagagttacagtacactatatttatagttcaatatcagtaaaggtagggaactgttataataacagaattaactaaaagtctaacaacctactaactaactcaactgtctgagttggactcttctgaactatactcaatatcccccctcaagctggaagggagttgatctagtgacagcttgtgacagaggaaattgaacttgggaagtgtgagagctttcgtgagtaagtcagcaggctgttcttctgtagggatgtaggatatttgaactttgtgtttgttgatcagttctctaacataatgtacatcaacttctatatgcttagttctggagtgaaacacagggtttgaagctaactgttgagcgccttgattatcacaccagatggttggtgtatgtgagagagatatgccgatttcattgagaacagaagtgatccagacaacctcagttgcagtggtagataaggcacgatattcagactccgtgcttgatctggccactgcagtttgtttctttgaaccccaagtgattaagttgttcccaatcatgacacaaaaccctgtagttgactttctatcatcaaggttacacgcccaatccgcatcggaataagcctcgatttgcatattggtagcaggagtaaatacaagtccaaggtgtgtagtgcctttgatgtacctaagtacccttttgcatgcattccagtgggtgattgtaggttgttgcatatattggcttagtctattcacggcaaatgagaggtcaggtcgggtgagggtgagatattgtagagagccaattatacttctgtacatttttggatcgtgaaatggttcactgccatcagtgaagagcttgttgccagggcacataggtgtactacatgcttttgaggcttccatattggccttctttagtatgtcgttagcatactttgtttgagtgagatgaagtttcgagtccgttcggtatgcttgaaagcccagaaaataatggacagaacccaatgtttttaacccgaaagtagtgttaagattggagatgatgtgttgtatagcagctgagtcttgtccggttattaggatatcatcgacatataccaaaatgagtagaagatggccatggttatgagagataaagagggaagtatctgaaactgagttggtaaaaccccatgacagaagggctgttttcaacttttcataccaagcccgtggggcttgttttaagccatagatggctttttgaagcttacaaacatgtgtaggatggtcaatgtcttcaaaccctttgggttgttgcatgtagactgtttccttgagttctccattgaggaatgcattattcacatcgacttgttgaatatcccagttgttggtgacagcaagagtgaacatgattcttagggtggaggccttcacaaccggactgaatgtatcaaaataatctatgccttctgtttgttgaaatcccttagccacaagtcttgcctttaacctctcgacagagccatcactattcagtttggtgcgaaacaaccatttgttttgtataacctgcataccttcaatataggggacaagaatccaagtcttgtttcgtataagagcataatattcagttgtcattgctgagttccattttggatcagcaagagctttctttaccgatcttggctcaagaaaattgtgattgaactttgtaattgtagcagctagaattttaggcttatgtataccagatttggagcgtgtttgcatagggtgattggatctatttgggacagaaatagcttgttgttgtgtttgtggtggtgctagactaggggtgggtgatatggttgctggtataggatctggtgtaaggcctggtataggggctggtgtagtgtgagtggttcctgtggacctggcagcagtagaattgatattggggttgcattcaggtgtggtgggattagattgaggaggtaagataggtatagggaagctggttgtttgtatggatgtggagggattatgttgtgtgacaggaaagagttggttataagggaaattgacctcatcaaaggtgacacttcttacaatgtacactcggccagtgggatgtaagcaccgatatcccttgtgatagggactataaccaagaaacacacacatagatgtcttgaactcaaacttgtgtttattatatggtcttagaaatgggaaacaagcacaaccaaaagtttttaagaaattataatcaggtttttgctgaaataatgtctcaaagggtgagatatatgagtttctttgcacaggcagccggtttataaggtaagtagcagaaacaaaggaatcccaccaatattttaagggcattttggcttgagcaagcatggttagcccaatttcagtgacatgtctatgttttcgctcagccctaccttgttgttggtgtgtgtggggacacggatgtcgaaagacaacacccatctgtgctaggataggtttcaaaggtcgatattcccctccccaatcggcttgtaggcttttgatttggaccccaattgcctttcaacataattgttgaagtattgaaagactgtgtgtgtgtcagatttgagtttaagtgggaatatccaagtatatttagtaaaatcatctatgaatatgatgtaatatttgaatccctcattagtgggatatggagagggtccccacaaatccgtgtggacaatatcaaagggtttagttgtttgatgttgtgaagataggaaagtaaattggtgcaatttgccatattggcatgcatgacaaaaacttggattagtagtgggaatgtgcaaagattgaagaactttattcaaaacaacttttgatgggtggcccaatcgttggtgccacagatttacaagagaaacatttctattgatattgctactcttattacatgaaaaagattgtaaattctgcctaatagcagtgggatgttgagatggaattgagtgttgtggttgtatgtgtgagggcttgtcttgtgaggagggtagttggtacaagcctgggtcttggtttggttgtccttgacaaaacaacaagaagagttaaattcaactgaaacatcattatctttggtgattttagagatacttatgaggttcttggtaatagatggaacatgcaaaatgtttttaagatgtaggggttttctagctgctaaagaacaagatccaatatttttaatgacaagtgaggagccattacctacaaccaacttttctttgcccttgtaggaggtctgttgttggagttgcgagttgtcggaggtaacatggttggatgcaccactatccaaataccaattggtgtcttctgtagtggatggtgaggcaacataagcatgtggtgtgttgttggaagaggcaggatgcagattgtcttctggtccattgtagctgagatcaaatcatttatagcacctttgaactgtgtgaccaactctgttgcacagttgacagattggtcgatttccgccttgatttcctctgcctccttgagtgcctcggcctctagtttgagtattgtttcctcttcctcgattgcctgagttcatggtgcgattcgattgattgttgttggtgtagggtgacttcttgaattgagccatattggccgaagcaccattgagatcaagtgagagtgtagcagcatgagcttcgattctgatttcttggttttgcagcaagaattggacttcttgcaatgtgagattgtcccgagaggtaagattaaccactactgcctcatactcaggacccaaaccagcaaggatgtacagtatcaattgatcatcattgagttgatttcctgctgctcttaacccatctgcaagattcttcatttttaagagatattcatcaattgacattgatcctttcttggtgttttgtaattgactcatcagatgtatgaggcgagcctttgaggtggtgccgaagagttgttctagagttctccataactcatgagcagaggtgcaattgaccacatgtccgagcattgtttcagaaatagatgacattagccatgacagtaaaaa

SEQ ID NO: 219846 - DNA, 1356 bp, Cannabis indica
aatttactacaaaattaaggtactgttactttccagctggtcctaccctaataatctccaccaatgataatttaatttactgtaacttctgtatgaaaagttatacaaattaatttacatatatgattcttgtgtacatatatgcatggtttgttggttggttggttgtgttttataacattgatgattgatttgttattatttatgtggtcaaagttacacatctgtctggatatatttaaaggaaggtccagtcaagccttacattaattttactacatagtcatcaatttcacatacttttttgctgcagctattgaaacaaaatgtataaatatatatatgatttaaaatatttacttacatttactcaattctcaaaaaaaaaataataataataataataataagttctatgaattttattggccataataagattgggcttttcaattcggttcgaaatagaatttggaaaaggcctaacaattagaaatcaaagcttttttctatgacaggaaaagaagtcctcatcaaaactgtacacaattcaatccatacctacttatactatgaatcttttcaaattttctgtgaattttatcaatgacattcataggatatatatatatatatatatatgcaaggttctggtgggctggttatgatatcaaaaagaatatgtattggtgtacttatgatcatctttggtagtatgagatttcataatcttcatctcttcaatcaagttatttttttgatgaattagagaattgtattattttaatcttcatttacatcctacaacaccttactaaggcctgaaagtctaatgtacacaaacaaacaagttttgctttaccgtaacaaaaacacaaaatttactctataagaacctataccaatttgtatcattatgggtgaaggccaatgatatataattctagtttttacactcttgaacacctctagttttgctttaccgtaacaaaaacacaaattgtttcacatgttgtaagcatcgacaacaaaatatagacacaaaaaataagtgacccaaggattcttcatgcacttcacatagcaaacaatcagaagagtcaataatctttatcttctttaacctctcattagtcttcatcatgttgtgaactgctaattatagtataagggctcgtttggaacgtcgtattaggtcgtattgtattgtattgtattatattgaattggattatatgtcatatttttatatagtactatgttaaactttaattaatactaaaatattatatgtttaggtgtctataaaagttaatatcacatataattttacataaaaatattgcataaaataca

SEQ ID NO: 219847 - DNA, 5222 bp, Cannabis indica
tcctgaagctcaaaatcaattcccccaacaatcatctcctccccctgaacattcgccttgaccgatccaattacacaatatggcgatctctggttcttgctgcggtcagagcctacgatcttgatggctacattcttggccatctccctcaacctcgtgaatttcttgcaggtaacactatcaaccctgcttttcaaaattggatgcgttttgatcatttcttgatgcattggctcatgaattctgtcactgaacatatgcttggtcatgtcatcaattgcaatacatcccatgagatttggaccacctttgctcagctgtttgcaaccagatctcgagcaagattactgcaattacgaaatctgcttcaaacaaccaagaagggatctctctcgattgaggaatttattctcaaaatgaagcaatttgcagatcagcttgctgcagcaggccaaccaatctctgacgatgatctggtcttatacatccttggtggtttaggatccgagtacgaagctgttgtcgtcaatttaacctcaagaatcgaccctctatctctgcaagaagtgcaatatgttgcaaagtcaagaaatgaggattcagcaacataccaccgactctttgcacaatgttcaagccaacatggctagtaccagaggttcatatcctcatcgtggtttcagaggggctaatagaggaggaaggttcaattccaccaacagaggaggccgtggcaccagacctgtttgtcagctgtgtggccgtgctggacacattgctgtcaaatgttaccaccggtttgatattacctacacaggcaacaacaacaacaattcctcctctaaccctcccaatactgagactccccaggcccttatctctgaatcaaacaccacttttgacaactccacagcttggtatttggattcgggtgccacacatcatatgaccaatgatactgatcaacttcctaatgctgctgattacaaaggaaaggctaaggtagtagtaggtaatggctcttccatccctattcgaaaaattggttctggttcagtaagcactcgttttcccaatcattctttagtattgcaagacattcttcatgtgccaaatgtcaccaaaaatcttcttagcatttcccaatttacaaaacataatcatgtcactcttgaatttgatgaattatcttgtctcataaaggacaagacaaccaaacaaattcttctgcagggccatctcagtgaaggattatacaagcttgaagttcaagacttggttcctccccagcccaaagctcttaatcacaccactacttccaatcctgtcattgacaagtctcaaattgccaatatttggcatcatagacttggtcatccatctcactctatactaagcaaagttttacataaagttgttccaaatgtaaagtgcaaagcacttgatttctgtaatgcttgtcaaactggaaaattacaccagttcagttttaaaagcacttccaataatactgttcaaccatttgatttgattctcactgatgtttggggaccctctttctatgcttctgctgatggtttcaaatattatataagttttcttgatgattttacaagattcacttggatctttcctatgaaatcaaaatcagaagcaacttctctcttctgtcaattcaactcttatgtggaaagacaatttcaaacaaaaatcaaatctgtccaaagtgatcttgggaaagaatttgatcctttgtacaaactttttaaaaatcttggcatcattcaaaggaattcttgccctcacactcaccaacagcaaggtaaagttgagagaaagcatcgccatgttgtggacactggcttaaccttgctgtcccaagccacaatgcctttatccttttggtgggaagcatttgcttctgcagcctatttaatcaataggcttcccacaccaacattaaattttgacacaccttatgaaaaattattcaagcactcacctgattataatttacttaaggtgtttgggtgctcttgctttccccttctcacaccatacgcatctcataaggtttcttttaggtcttctaaatgcatcttcataggctacagccccaactttcaaggttataggtgtctacatccttctggtagaatatatgtagctaggagtgtcacttttaatgaaaaagaatttccatataatgacctttttcccaatactttaccaactccatcagctactgttcccgtctgtccacaacagctttttcccatcccccacacggctccaactttatcaaatattccacccttacaacctgtctttacacagtccactatacctactactcctacactaccctcacctaatataacatctatttcgacacacaatgctgctcccagtcaccaaacatctacctctctaaacaattcaccacctactgagcctactaccattctacctactgacccttgtcctccacacaccacaaatcaacatcccatgatcacaagatctaaactaggcatctataaaccaagaagttttcttgcacatactcatactgaaacagaaccaacttctctaaaggaagctcttgccaaccccaagtggaatgctgcaatgggccatgaaatgacagccttaaagaagaagaaaacttggactcttgtaccaagaacagctgatatggtagtcatcaccaacaagtgggtgtacagaattaaatttaatgcagatggtagtgttgaaagactcaaagcaagacttgttgctaaaggctttcaacaaacagcaggcattgacttctttgagacctacagtcctgttatcaaaccttgtacaattcgcatcatgttcactttagctatctctaatggttgggacatacaacaagttgacataaacaatgcatttctaaatggtcaacttcaagaagatgtttacatggctcaaccacaagggtttgtggacaaagaattccccaatcatgtttgcaaacttcacaaagccatatatggcctcaagcaagctcctagagcatggtttgacaccttgaaaacaactttggttcaatggggatacaagtgcagtaaatcggataacagcctcttttactccaatactaatggcaagctacttctcattctaatatacgttgatgacattttaattactggtgttgacaaggctgctgtccacaatctcatctcccaactacatcaaagtttctctctcaaagcactcggttctgtcacctatttcctgggattcgaagttcatcgcactgcctctgctatttacttaacacaacaaaagtatacacgggacttgttggcaaggactcaacttctagactctaaaccacagcccacacctatgtgttccaactccaaactgtcagccaaatcaggcactccattggataatccaacacactatcgcagcataataggtgctctacaatacctcacaatgtcaagacctgacatctctttctgtgtaaataaacttagccaatatatgcaagctcccactactgaacactggggagcctgcaaaagagtcctcagatacttggctggctcaatcaactctggtttagtcttcaaaccagccaaccggttagacatcactgcctattctgatgctgattgggcagggtgctttgacgatagacgatctacaactggctactgcatttttcttgggggaaacttaattagttggtgttcaaagaaacaaactgtcgtagctcgctctagtaccgaatccgagtatcgagccattgctttagccacatcagaaattatgtggattcaatcggttctttctgaactcagcatcaacattcctcaagctcctatactgtggtgtgataatcttggagccgcatctctagcctccaacccggtttttcatgctcgtacaaagcacatcgaagttgatatgcattttgttcgagacagggttctggcacaccaacttgacattcgatatgtggaaactgaaaaccaacttgcagaccttctcacaaaacctctaccagcattgtcctttcagtactttcttggcaagttaacacttggtaataccagtgtcacttgagggggggtgttagcactgaaaataactactgcaattactctggtttttcctttactgttttattggttttaaccgtgtatcaagatagttaaagtttgttagagtgtctgttatttagttcctttattttcggttctttactgatgtaatcaattggatcttttatatataaataacagatagcttgccaactgagttcagttgagcttttcattcatccttcttcttcttccattttctctccatctatttccctttgctcaatcttggtactgaattcagtactcttacagaaacattaagtaaactatgtatcgaatattattaatattgaacttatacattttgtcactataatatatatatatatataaatatatatatatatattgcagctcaacaacaaaaggccacattcacggtcaaaaattgatgagatgcgagaagaatgggccaaagagatgctacccaaaatcatcaaacttagatcactaggcatttttctttgaatggatcagcttttccattttattgaatatatgaagactatatagcttcagtctgtttttcttttttcttttagaaaaaaatagtaaacgttttccttttgttattataggtgtcaacatatagccaatattgttattttagttgtgtaaatatttgcaattactgtttttctattaatatttagctaaaattattttttatttattcaaaaattttaatttaaatcatttttatatatacttgttatacacaaaatttggcttcatttcaaaaagggacacgtgtcttgcagtggaatataaaccatttgatataataaaattatatcgttcaatgcaaaaaagaatatctcgttaataaaggattaatcgaaaatattcataacttgctaactacatagtcttaagcgagataaagataaaagactattaaaacttatattgacgagacacacacctatctcggactacatagccaaagaagataattcatttattcaaaggagtgaatacagtcatacaaaagcaacatcagattatgatagcgagatagccacctcgcgattctaactaaagaaacttgacgaggcgaaccat

SEQ ID NO: 219848 - DNA, 4578 bp, Cannabis indica
tcatattgttcacttatgagaatatgctcatctttagacactagactgaacatataagacttgaaatatctataagaacatctttagaatttttctaagcgtccgtatgagaggagaaatgacttttaagacaaaggtccttgaattttgatcaaatttattgtgtgttattcttctttttctctagttttcttgtaatcttcatgtaattcttttatttgaattttgagtattttaattgtaatcctcctattttatctttagaacattttccaacataccctacactaaaatatgcttaagtctcttcacatttggcttccctatccctacaactagtaatcatgctacaaatgaacaagcaagtataggtatagcaaaaaatagtggacttcataaaggagtgagctttagttaattggttccccttccccccactgagagagccaggcccactaagcccactgcttttctatccattttagaataatgctcattacacggttcaatgacctctctcatcttctacccaagttcatgaactactgaatattttgaaggttccaacctgtacttgttaatgataacatgtgactagtttgttatatgttttcctagacgttgtcatttgacagagcctgagtttttcaaataatgttgtgcccagccagcccagccccactcaccactagtcttttcagctttagcattttagtagaagaacaacattgctattgccaaatcatgctaaagatattctgatgctcatatgatatttactaagatattttgatactagttcaagcttaacttcacgtgaagacaagttgatcttcctttcctcgaccttaaaattgaattgactttaatttatatatttagatcaagatttgagctggcttgagtcctaaacacaacagctggtgcttgtttatcatgttagtgaaaattctattgctcttccctttgttaccagtgactccaataatcttaaggaagcaactcttgaatccagagtaagaaaactagaatatctcaggttacacatgttaatatttagatgcaattgactataaatgtttgaaacaatgtcccgtgagcagagactcaccagagaaacagttgctaatacaatgtaagtttgacatattcctattcccaagcacaagtgatcaatacaaaaagggaccaagtttgccaccaatgataaaatttttttttacctaaaaaaaaaaaccgacttaggagagttaaacacgtttaataagagagtttatggacagaatattttaagagacgcaaactcaaaaaggcttgtgcatagaggttgatcaatcagccactttcccaccccagggaataaaactatcctgtgatccaaaatcctgcaaacaccaatcaagaaatgcattaccttcatgagaagttaaatagaaagaagcaaatgaattattaaacttggaaaagaagacaacgtacaagctggcttaggcggaactcaggaggtgtatcaaggtaaatgtttgctggatcaaggacaagattctggcattcctctatatccttcttgagatggtctggtcctaagcgagcataatcagcaagcttgggtttgtccttctgttgtttatcaatctcatgtgcatcgccatacctgtttggagactggctttgaagaagatcatcacacagagatagtccttccacaagttgttgggaatccagcaaattttgggactcactatcccaccattttgagtcttcgggattacactgtaaaatgttgtcagtattctcctcaatttcctcattgttattaacttcttcagcttgatgttcttcctcaggttgataatgatggccagtcctttcacattcaattagaatgccatccattaagtgttcattgttattaactttctcagcttgattttcttcctcaggttgatcacgatggccagtcatttcacattcaattagaatgtcatcatcctccaagtatccaatatcagcatacttcaaagtaacaaagcagaagggaagaaaaaacatagtattagtatcccgtgtaccagcagccatgtttgaatggaacgaaagaaagaattgacagtgcctatttgatatctaataaatccatgtgagtgttaagtcttaagaagtacctttatacaattttactagttactggagtgtagcagaaaatatgctttcaaatgtattagcttaaaatctaagacatttatgagtaagacatggaatggaaagcatgtttcatacttcttaataaaatacaaaagtgtaggatagaaagagatcaacctttgcaaagggatctgtacaagtaacagtggtatctggtcctggctcaatatcagattgtagccgttcaccgcgaggggggtcaggagtcactgatttgggagtgactggatctactttgggaataatgacatcattagtttcagaaatttcttggtcaattttatcacatggcttcacctggtgctgctgataaaatattttagaaattacatactctccatccttctcatcctcccctgttcctaggtgatactgatgcatgacccaattagttttctcagccttaccacctctggctacactcatgtagagaaccataatcttcttacaccctcgttgaaccccatctaaattcactggtttggtacggccagtcttatgccagcggacatcacaatccccatcgcttatctttcgacgctttcgagtcccagtattgtacgccttaatggctctatgaaaaaaatgggctacacttccatctttcttaaccccttaagaaatttttaagttcaaaaaattaacttgaagactagaagtaaggataaaacatgcaaccaaggttaaataaattatttcaaacctggtagtttctgaggatggacataacagattccatcttctttatcaactgttgggataaactcggtaataaagggatggggtttcagattatcttcgccagctttagcaagcaagtgccatataatctcttgatcagatggatcgaatttcacacctctgggtaatcctggccactcttgagcaacctggatgtagatattataatagacgcaggcatttaatcattaaaatccaagaaggaagtattcatggcaatccgataatttgaaggaccaaaaaagaacaagatcaatttaagttaatcaaatcatgtagcagtgaaaagtttcccaatccaaagcatgaaagaaagaaccaaacttattcagcagtaaccaaacatttaaaatctaaattgacttcaaatttttgctaaaaaagttacaatcaatatgtgcagatgtttatcattttgaacatagggatacagataagcagatgaacaagaacacaggccatgtcacagaatttgaaatatggaacaaaatgtgtgaattccaaaagcagtgatgtgtaaaagaaaccctgcaaaagaattttctgtagtttgtaattattgctcatacaacatgtatgctcttatcgtctgagccaacttgatttagcatcattcaaatcattattagaacattagcaatataacatatccaactaatgtttcaaacaatacaaacaattaagtagaaaaaagaaattgcaatcactataattgacggcactgtaaagtcatatgtatagttattatttaatatgttttttttattcattacttaccattgtacaatctgtactcatagaggataaagaaaatgtacaaatcttacttcagtgttgtcaatcacatattggcaattaggacaggctctggtcgggttgcttttccatttgattatttcaagatcatggttgctcgatgcactcttaatctttgtagcgattctgttactatctactaaccatgatggtctgcacaaattacacaaacaaaattgcagttggaataaaaaaagtatcaaagtccatctttaaaaatgaagaaaacttttatagtttaattacagaaaatggtgaacgaacctatgtaatgtgataataagcagacaattaaagtacatgacttatagttcaatctatagaaaattcctaaaactgtcatagacacagaagacagagcaatcattatcaccacaaatggagtgatccattagagaccttgcaaacacaaaactgtcttatcttagtgcaatcttctagtgaaaggaagaatgcaattgtatgatcaagacattaaggagagccaaataaacatgcaattacattaaaagaaaaggtgatttttcaatataaaatagtagcttcattgattaggcatgagcctttcaagtagccatttgaatgtagtgttacacatgatcatgtgattttaattgtcatatccaactgaaaaatagcattaagaatctgaatatcttaagacaaagttgataccttaccccccctacccccctaactcctgtcgtttaagtcagaaaagacacaaaagtcataaatatttctttgcattgctcatagtgcaaatcagtaaacccaaacagtaatgctaggattagtgaaataaaaaaacagtta

SEQ ID NO: 219849 - DNA, 3526 bp, Cannabis indica
tttggaataaggcatataagagtctcattgaataaaccacagccgaatgtattagaaccttcaggcaagctgctgtaactcttggccaaccatatcccaatacttttggaaaaaaaggcctggaagaccatctttaccaggtgctttaagaggatgaatttggaatagcgccgatttgacttcttcagctgtgaaaggttccattaaaattctgttttcagccaggctaatgcgattaggaacacagcgggatagaatattcttagtgttaagaccacggtttgatgaagaataaagatgtcgaaagtattgaattgctatagccgagatatcctcttcctttgtgcaccattgtagtttctcattaaacagaccattattagtattttttttccgctgatgcgaagctttgaaatgaaaatacttggtgtttcgatccccatgctttaactaaagaacccgactcctttgcttccaatagatttcccgcttttcttcaacacaattcagatcatgttcaagactttggagagtaatccaattatcttgaccaaagatttggaaagcacctcaagttttgcctttagttcttttgtacgagcattgagatcttttttttgttgaatgttccagaccgagagtttctttccacaactggtgatacgatgagatagggaatgaagaggattgttcaaaactttacagtcccaaacagctttgataatcctttggcactcctcatttttggcccaagcttgctcaaaatgaaaccgataaccccacttatgattcgtagctttgtccctattccccatttgagcagatagaatcaaaggccggtggtctgaattccaccaatttaaaagggaaactttagttactttaaatttcttcaaccaatctgcattacagagaactctatctagcttttcgaaaaccagattctttgatcttttattacaccatgtgaaatctccgccttcagtctctacttcacgcagcaaacaacttgagattgtggatcgaaaaattacgcatcaaatattctggtttaggacctcctcccttcttttcagattgtttagtaatttcattaaaatctcctccgcaaacccaagctccattaaacataggctgtaatctcttcataagtttccaactttctgttcgtcctcccggatccgggctcccgtaaaaaccagtaaacctccacataaacccccatatcattatcgacaatagcatcaatatgcgagaccgtaaaagattaaatccgaacattgaatttatcagtccaaagaagcgccaaaccaccgcttttgcctttagcatccacagtaaagcaactagcaaaccccaacttcacgcgaacaaactccatagcagcactagacaaccgagttttagacaagaaaatcatctcgggatgataatctttgacatgggaatttagggaattcaatgtccaagggttccccaacccttggacattccaaaataaggccttcattgcgatcggcaacccagaaaatctgggtgcgccgcttccattgttgaatcaaggattaaatctgacaaggcagaaattccccctgaaattgtaccctcttcagttacatcctgagttccccgcagtagttatagttgaaaaacctttatttttgactcttttcggagtaatattccttctctttttcttgttatcttcctgtgtatggacatttaaaccaattgcataattaatagggacatcaaccaaattcaaatcgttagttataagactttccatcacatgatccgaagtcttggattcttgaacaacattagcagcttgcgaatcattaaaaaggtctttggacatgtcctcctgccaggagatgtgtcttttattcgagcctgacccaactgtctaaccttctgatcaatcctaccaatagaaccaaaatctcccatggaactctcctccataacccattgcaaattgccattaatatcaatcttccctttccctttctctttttgaatggccgaaataggattggaaggttgtttagccgtggtgtcaccaggagctttctccataatcatcgactcagatggccttgtcccttccttttcaagaaccttcggactgaaaagattatcagagtcagacatagcagttccattacctatattccaggacttggatttagacagaacaaaggggttatctaaagcaataaaattaaattttgaagaagagggatagatagactaatcattaactttgagccaaatcccaaaactaggaactctattcccagaatcatcttcggccgtttgaattggtccagaacaaccccgagcttcatgtcccaatcgaccacaattaaagcacataaatggtaatcgatcgtacctgtagggaagccatatctttctaccatcactaggaaaaacggaatcccggacaaagaggtttattgatatcacaccagaccttgaaagtaaagaatcccttagccacaattctaggaatgtctgccttttgaacctcaattaaatcccctgccaaattagccagacgctccatgtttctttgtgtaatggatcgagtaggaagatgaagaatacgtctactaatcggaaatctggttaacacactctcccaatcagtcggcaattgattcattctctccaagattaaagtgccattgttgagaaaccaaggattcttggttaagattctgttcagatcttgagttgatttgaaagagaatactaagaacatagattccttagtagtgaatttaatctcaactccccgattcttttctgagattccccaaactcgaccgagaattgtcctcatgagagaacgactcataggtcgatttgatattagacggccaatcgcacagagcttttcaaccacttcccttccttcttcattcacttcccattcgtcatcatctagaaccgaaaggttatgagctcttgagagcaagtcatccatggtgatttcaggcgtgttaggcatcccttcaggcaggctcttctcgcaagagagcatttccaatggtaatgaatcttttgacataacacttttaataaccttattataataacaagttgtagaaggtatatttaaaagttttctactttaagaatcaaaatcaaaattaagaaagtatactattttttaaataatgaacttatcattcaaataataattagaatttgaagataatagaaaaaaatacatcaaatcaagctttttatgcacaactaatccataatatgttatagaataggatactttagaaaaaattggtaaataaacttgtaaaatcatacaataatcgtacatcggtgtaaaacatacagaaagtcaaattcaatgccaaattacaatcaatcttaaagtgaaactataaaccaagcaaaagtagctactctagactcgcatctataaaatctgcttgaatgattgtaagagtccctacaaaaatattatagtgaaaataagagtccaacaaactaa

SEQ ID NO: 219850 - DNA, 2803 bp, Cannabis indica
atttcaagttttttactaactattgaaatatgtttagtacaatttgttctctaccttttttcctttttaataatgacatcagaaatgaaaagcctagaacttctaaatagctaaatagttgtactgttaactagatggaagatgcattggagaaagagaaatagacgcactgctaattcagtctagtgacacattaaaagttcttcctggtgctaaagttcctgctgatggtgttgttgtttggggttcaagttacataaatgagagcatggtcactggtgaatctgtacctgttttgaaggatgtgagctcatctgttattggaggtacaataaatcaacatggcgtccttcacataaaagctaccaaagtcggttcagatacagttttgaaccagattatcagtttagttgaaacagctcaaatgtcgaaagctcccattcagaaattcgctgattttgtaagtacttctacatttctcgctatgttttctagatgcggtgaaattttaattccatttgaaatgcatttacctgtacttatagcgatgttatttttgggtatatgtgtatatatttatttattttatatttatattctacaatttgcctcccactggacccttcaacctctgggagacatgaaaccttagcaaattatgttcccatgaggaatagaaccccagaccacgtgggagcaagtcatgaaccatatcaattgataaagatgttttaaaaggcattgtgaaataaattattattattattttcagcaattatcctctttgctttaacttataaggattattatgtatgttgatttatcatcatgtctcttcaatttatattaggaaagttatagtggaaactactagaattcttttccaatcagtttcatttgctgtgaacaaaactgaaaagtttgttgcacagtactccctttgttcaagtgtgcattttcatggacacaggggtagctatttctctcaactggaactatcttatggatatgattttatattatgaagaaaattaattaatttgatatttcttcggcaatgattttttgctcctgtaagaagcaagtccaaagtaaaatcaatcatcatgataaacatcagtgagtcactagaaataatatagttttgtcgccacctttatgttttcttcccttctttctggtttttattcatatatcagcatccatttgttccaatcatccagaaattgtgttttctatgttgagggaaaagaaattaaaataactagatggtttctaatattctgtgcttttgtgaaatgcagattgcaagcatttttgttcccacagtaatcacattggcgctgttgacgttactgtgctggtaagatcaatcaaaatcatctgtttcaaattcatcacactttagctactggatttaggtcatgtcgaagatcttctgtccttatttaccgaagtactttgattttaacgcaggtattttgctggtactcttggggcttatccagaaagttggctcccagaaaacggaaattactttgtttttgcccttatgttttccatatcagttgtggtgattgcatgtccatgtgctcttgggttagcaacaccaactgctgtcatggttgcaactggagttggggctaacaatggtgttctgataaaaggaggggatgctttagaaagagctcaaaagataacgtatgtgatatttgataaaacaggtacccttacccaggggaaggcctcagttacaactgcaaaagtttttacaggaatggatcgtggagagtttcttaaattggtggcttctgcagaggtgatttcttatttcttgattaaatcagcagtttctcttccttttctttttgcagatcaaattaagttcacatttcaatctctataattacttatttacaaggaagctgtgcaatctagtctcttgtccaattttttttgtctattctcaaaaagggaaaaaaaaaaaaaaaaataagaacatgtgtttgtttaatttctgcactttagtatagtttctttccattcttacaggctagtagtgaacatccattggcaaaggcaatagtggcatatgctcgtcattttcatttctttgatgattctacaacggatgattatcaaagccataaccgagactctgcaatctctggttggctttatgatgccacagagttttgtgctcttccgggaagaggtgttcaatgctttatcaatggaaaattgattttggtgagtgatttgactagtattctgctgctttctgctgagcttgaattctcatacataaactttgtgcttctttggggatttttattggtgacttttggttgaacaggtgggtaaccgaaagctgatgactgaaagtggaatccttatccctgaagatgtggaaaaatttgttgtagatctagaagaaagtgcgaaaacaggcatacttgttgcatatgatagtaatttaattggtgttttgggggtcgctgacccactgaaaagggaagctgctgttgtagttgaaggcctgatcagaatgggcgttcggccaatcatggttactggggacaactggaggacagcacaggctgttgctaaggaggtttgtgtccatatttcttactaatgaaacccactttcgaattttaattatcatactaaattattaggtctaccaccggcagtgaagctattctagatacagtcttattatcaagtatagtaataatgaaaatgatgtggacatagcttttctgtcagtgagcactctcccataactatttatgtctct

SEQ ID NO: 219851 - DNA, 2359 bp, Cannabis indica
tccacgcgctaacactacgtttggtgagaaggaaatgtggaaggatggaaagtgtgggaggagagccaaaatcattgtttggcaagaaaaaaaatgggagggaaagggaagattgagggaagggctacctccaaatcctcaaaaatcaatattccaaatagtgaaattctatactaagacaaatcattttatctaaaatttatgtatatcctttcataaaaaaaatatatattataataatagacaatttagcaatttataatagcatttgaattttcaccccaaaaataataagcttaattttacatttaaattttaaatacattcttatctcaccaatcatacactactattaaagttcaattattctatgaacataaactaaaaaaatacttatacactatatttatatcattctattcaaaattctctaacaccaaaaaactatcaaaaaaaaagaaagtaacaatccattccatccatcaaccctctcccttctctttaaactctctatccttccaacattctttaattcttgccaaacatagtgtaaatgctaaaatattgctatgcttgcgcctgcaatgaaagagaagacacacgcagtaatcaatgggctgggccttataagcccatatagtaatattattgtcccgtttaatatatatatcattaaaataaatcaacgtactagtggaagggatgaatttcttaggtcgatcaaaccaattgtccaagtaacaataagcttattggaagaaaatgaaggaaatcaaagttggattttggtaaggaaaaaaaatatagagaataccactaaaataaaaaaatcatgttccatataaaaaaatttgttcaatcaattgttttcccatacaatacaattctttctatactaaatatgaaaacttgattttatttttttattattatttattattttattttcttttgcaattttttttcctcaacattttcctttacctctttctttcccaccaaaccaaaatccaacttaaatatgaccccccaaaaaacgtaatcctcacaaatatgaccaaaaagttgaagaaaaccatggctgttctgccagccacaagaagcagaggaggaagcaaatctttcaagttgaaatatcaccacggcctgagcaaaaggataattttattaagttgattcaacacaaaaattaaactgaattggaattctttaaaccatgagaaaccagaaagatacctgtgtcatttagccaccttgtcatccttgtggatcttctttggtaaattgttgcagaggggggagacaagcggctaaggttctgctgagacaaaccaaacccaataatttgagatttaatccccaataccatgcagccataagtagaaaattagtgccaatctacaaagacttcaaaaaacagagatatgaaggacatgaaaagggaaggtatgacatttccaggacaaataatggctattagaatttagactttatcaagtaataggataatattatactggctatatggctcaaaagcaagtaccagtccatctatatctgtatgtgtcagttttagttccttacaccccgcttcgaagctttataggtattcttcattagtgattatatttccatatctcttctccttttcttattgctttttcatactaagattcctcaactcaatgcaactccagttcataatggaattactaaagaaaactatcttaggagttaggatcctctctccactttcaaccttgcaccgctttatattttctattcctcacttgcgcagcaaatagtttttttctttttcttttttctcaatatcaatcctcttgccaaatccttaactacactccttgagtcacaaaactccagcaattgctcagtaaatatcagtatagaattgaacccaacctcaaggaagcaaactatgaacctcaccgccttgacttaaccctctcgtgactacaacattccttattttcgatatactatcaatatcaatgaccctacccactgataaatcaatgaaaaatcattttttaacttcatacactcttgaacgggttgaattagtgatttcaaaataatacaaccaatactcatacaaaacttatctcctatagtagctataaatatatgcataaggaagtagcaccagaggatacaaataaacaaacaaaaaacgaagaagcaaaatgtataaagtataaaacatacctcatgagtcatgatatgaggttcaaagatcactctgctgttttcgtctagaggagagtttctaacaccgactgctaaagatgtaacctataaaagaaaaaaaaaattgaaaatcaaaaggcagtgattt

SEQ ID NO: 219852 - DNA, 1915 bp, Cannabis indica
ttttatttgtataaaattattttcattgtaatattgtaaattaattttcattaatattgttttctttgataaaaattgttttctaaatataaagaagagatactatatgtagtgtccttccttatccacaaatatgttgttaaaatttaaggaagaagaataataaagaatgatcatatgtacatgatcttatcttttgaacctaaacagtgataattaattaaaaacaaatgacttaaaacagaaagtttatacgtttcatacaatttacgaaacatgattacatgaaaatgagtttagctgtaaaacatgaaaatgacaacaattcaaacatgatatttttataaaaaaaaataaataaatcttaatggcttaagccaataatatagggcctcccaaacaacactatattattgttggtaccacgttgatactcttattaccctttaacaattctcaattgaaaaatattaaaggtggaagcactataagaagtgtcatattgttattggtgtatgaatctcatatattttaagatactaaatacttatactttataattctcttaagtaacggtcttgtttgccaacaatagtacttcataccttttgtctcatagaaagatagagtttttagtagtcaaatcttctcaattgccgttttacttgtattaactctgtaagtttaattttggcggtaaaaccttttaaactattgaactagtagtaaatttaaagtattatccagttaagtgtcactatggaatacttatataatgactcttgtacacatgacacgtttatattggtacacctaatattattatttaaaagttattttcaaaatttattttgaaattaaataaaattataaaaataaaaataaaatattttaaaaaataaataaaaaatattataaaatttgaaataatttttatatttttaaaataataatattagttgtaatataaaaatgacacatatataaaaagtgtaacacataaacaaatctatattagcagttaactatgaaaaatagataacattttaaatttgctatttgtttaggatttgaagaattttactgtcaaaatttgagcttaaaaaattaagtgcaaataaaatgatagttaagaggatttaaccgtaaaaaactctataaaatatatagtacttgttattaatatacaaatctcatccacatatataatggcggacttagaatttaaagtgagaggagcgttaattttttttttcccgtaaagcaggggcaaaagtaaatttaaaaaataaagtattgttagtgaaatttgatcttttgacatttaacatatacgtaatttagtttaattattacactaaacctactattttgtctataaatattattttttattataaatatatattgtgactaactaaaatatatatacattctggtgggaccgttaatgtggatccgcccatatatacacgcaaatggttttggtttagcttatggatttaacactatatttcaacaaatttatatttattttaatgaatatatatacacacaaagagtgacatttatatattaatttatatacgtacgtacatttatgtacgtgtaacatatactatatatatatatacgtgcatgggttgatcacatatgacacataataacactatagaatagatacatgcgctactgatccatttatattaaccgacccagaatttttattttgtggggtctttttattattaaaaaatatttatacttatattataatcactctactgatttatttaatttgtggggttttctactatttatgtctcaattatcaattaataaaattacatttaatttttaaaaactaatattttgttagtggtaaactataacccctactataagtcaccgtctc

SEQ ID NO: 219853 - DNA, 4667 bp, Cannabis indica
ggtcatagtggtgggcttgctttgctttggaaaaatagtgaagaaggggaaattattgatttttctgatacacatatcaatattctcactcatgttcataatatgcctacttggagacttgttggaatttacggtgatgcaaataaaagtcagagagagaacacttggggacttattcgtcaacttactcatgatactcggtggccttgtttgttcattggagacctcaataatgtcactagtcagcgtgacaaacatggtggaagaccataccctgagagacttatacaaggcttctccaaagtcctagccgattgtaaccttgttgacatggagcttcatgggcatcctttcacatgggaaagaggtagaggcactacaaactggacagaggtaagacatgatagagctttagcttctctttcttggattaatcattttttaactgcaaagctatttaatctgcatgcctcctcatcggatcattgccctatttttatggaccctattatccgaaatgtcttcactggggtgaagcattttcggtttgaaaatgcttggttgcgtgagccctattgtcttcaacttgttcctgattgttggcatgaaaataccactctttctattcaatcgaaaatttctaaatgtggtgagattctagctgcttggggtaaggagataacaggtaattttaaacatcaaatttctacgtgcaaggctgatatccaaaggttgaaagggaagaatgatgttctttctgttgaagctcattgtaaagctgagaaggatctttttgaagtgcttactaaaagagaagttttttggaaacagtgttcaaagcaactctagctcaaagagggggataggaatagtaagtattttcattcttcggctagtgctcgtaaacgtcagaatatgattcataaattgcaagatgacaacgggggtggttagattgggagtcgggcttagatgatcacattgttcgtttttatacggatctctttaccacatctggtagtatttctaatggtgtttttgatgatatcctcccttctattactcatgagatgaatgttgaattactagcacctgtttctctagaagaagtgagaagagctctttttcagatgcattctgataagtctccaggccctgatggaatgactccaggcttttttcagaagtgttggggcttgttggttttgatgtggtcaaacttttccatgagttttttcatacagccactattcctgatgatttaaacagtacaaatctggttctcattccgaaaaagaaaaatcctgtaaatacgagtgatcttcgtcctattgccctttgcaatgttttgtataaaatcatttcaaaggtcatggctaataggctaaaggtgtacttggaggacattgtttctgagactcaaagtgcttttgtccctagtagattaataacggacaacattttggtgtcttttgaaataatgcactatctcaaaagaaaaaataaaggaaaagtggggcaaatggcgctgaagcttgacatgagtaaggcatacgatcgtgtcaaatggcctttcttagagtgtttgcttttgaaaatggggtttcaccctagatgggtgcagttgatcatggccttagtgatttcggttcgttattggattacttctggtggtcatttgttgggtcctattactccgtcctgtggaattcgacaaggtgacactttatctccgtatttgttcattatatgtgctgaggggctttcttctcttattcggagttatgaaaggaaaggttgggtcaagggttgtcaagtggctcggggtgcacctcatgtttctcatatgttttttgccgacgacagctatctctattgtagggctcttgtaaatgaagcagaaaaaatcatggctcttcttgaacaatttgaacaagcctcgggccaaaaggtgaatcgacaaaagtcctccatttttttccagcaaaaatacttctcatgagattcgggggaatatttgctcgctaatgggaatgacggaagcgggtgatgacggtttctacttgggattgccaaatataatgaaacacaataaaaacgttgttttgggttttctcaaggataaaatgagaaagagagtagagagctgggatagtaaatttttgtctcgggctgggaaagaggtactcatcaagtctgtagctcaatcacttcctaactatgctatgagtgtgttcttaattccaaaaggcatttgtgaagagttagagcaaatgatgtgtaaattttggtggagggcctcgtcaaaacaaaaatttggcatccactggatgagttgggacagaatgtgtgcggctaaagatcatggtggtatggggttttggcatttacatcattttaatgtcgctcttttgggaaaacaagcttgggggcttcatacttgaacaaactctcgtgttggcaagctgttcaaagcaaagtattttcctagaggctcttttgtgactgcagaattggggaataatcctagctatgtttagagaagtattcttgaagctaaggatttagtggtaaaaggcggaagattacttgttggctcgggtgagaatatatccattacaagcgatccatggctccctgacattggaaatccttttattacatctttccatccttccatttgtgacaaaaaggttaagtgtttattaactatggatggaactaaatgggaaattgagattattaatgacttgtttaatgatagggacaaggatttgatactctcaagtcccatttctccttccaatgttgtagatacctggtattggagcaaagaaaattctggttgttactcggtaaagtcggcctacgctctcttacaagagttgaaatctgcctcagtccaatctaccaactcgggtccctggcgtgagatttggagtttaaagattcctccaaaagtgaaggaaatgctttggagaacattatctaactgccttcccactcgagtgcaacttattcatcgtcgtgtacacattgatttggcttgtcctaggtgtaatcgagaagcagaaactagcgcccattgtattgttggctgcaactttgcggctgcctgctggaggtttgctggtttgtttatggacagcattggatctttgtcatttggggattggtttcagcatctgttggaacgctggagtagcaacgaaaaataattgggtgctatgctttgttgggctatttggcaagataggaaaaataaagtgtggaacggaaaatctggttcggtcaaaactgttgtggctttagcaagaaataatcttgaacagtggttgtttgctcaagagaaaaatttttcgcccctctcttactcgaatgaggatggagaggggggtgagcaatggtgcgctcctcatgatgatttttacaagattaatgttgacgctgtaacttttagtcacaaacacagatttggttttggatgggtacttcgagatgctaaaggccatgttattcaagctagatcgggttcatggcatggttgtgtggatcaccgaggctcttggagtaaaggaggttcttagttggataaagaactcaaacttctctaatattacggtggaaacagatagtcttgtcacggtccaagctcttcggagttcggtgattatgggctctccgtttggtagttgtattgaggagtgcaaaggtcttcgatcttctttgaacaatgttaattttcgttttgttaaacggtctgccaatcgtgttactcatgcgtttgctagagctttatggttatttgctgatcgtagttactcgggtagttctatccccagtaacattcttgatgtaatcgtgcaagaaatgctttaataaaattcatcttttattaaaaaaaaaaataacttagcttctacattttggaaagagcttttagtgtataggggattatgcccttaaataattgtagttaataataattttattaaaataaataaatgaattaaattattctatataggtaccttataaattatattattatttaacgatataaagtaaatattagtaaattctgaagttcatctatgtggtctaatctcatatagttatgaaaagattgagatagaacaaataaacttaaatatttgtaataaggtaaaattatggaatctttagaataatcattgctagtacgactcgctagtattatgaatatatgtgatttaaatttaggttactagtgtagtaggacattttagtagaggtactatgcatactaagagtatgtataactggaccagatatgattttggataatacacgttgaatatcgtttaaatgtattgtcaaacatatcaactgatgatcatatataaactgatcttaatcctaaggttactatgaactcctatatatattgttgacgataaaaactcgtcaactaacctaagactgaaaatcaaaatgtgactttgaagtttagagataagaggaagatgaaatgtaaactcaaacaagaatgggaactccaagtagagagaaaaattgctttgtattgcttcacaccatgtggtcataaaattgatttttcaatcccttctcacatctgagaaatgggtatttataagctctaacaacctgatatacacttgtggtcc

SEQ ID NO: 219854 - DNA, 1799 bp, Cannabis indica
ttaatataattttttgcttaatataatgctaatttatgatcatcccttaccattttgtatccactaaaatatttcaaacccaatttcattaattattgtaaattaatttgcaaagcctattatttttgttgcgtatttttacaacaaaagtattttttattctaatattaataaataaataaatttaataaaatgatcaaatgttttggtataaataagttccatcataaatttatttttatttaatcattaaattagctatgaatggctaaaatgtaatcaaataaatttctaaacccaatacaaacgacgtgtcgtttagggaacgaatatctttacccaatttaaacgacatgtcgttcggataattgcccaatcaaaacggcgtgtcgtttacatgatgaatttcgctaccctatccaaacgacgtgtcgtttacataatgaatttcaatacccaaaacaaacgacgcgtcgtttaaacaatggatttgtctacccaatcagaacgacgtgtcgtttgtacaaaactaagatatagccgccaacgccaccaacagtcgttgtatcagtttcttcttcttcttcttcttcttcttcttcaaaaatggcagccatgatctcacgcagagtaatgatcaagctcctaaagccttccccaactccaaacccaccttccttcttcccataccaaacccacaaacgcccacttttcgatccccgcaattacgccaaactttcttcaatcgattcactcttctacatacaaacccactcattctcttcccaaacccacgaaaccctccatcaatggcaactcattcgaaaacccattactctaatcacaaacccaacaagaagattcacctcaaattcaaccgaatcagaaaaacccaataacaacaacaaagacccaaatccatacccaagtcaaaacccccaattcaagcaccaagagatcgaaggcccgacagtggaaagagacctctctccattagcgaacgagagtcgagatgtgttggagaggcttatgaagacaatgtacggattgagcggagcagtggctcttctgggtgttgttcaacttggggttggagcttggatttcgtacattacgaggtcttctccgatcactgaggtttcgattcagagctttatggcttttgggtttccttttactgtggcttttttgttgagacaagctgtgaaacccatttacttctttaagaaaatggaggagcaaggaaggttgcagatcatgactttgagtcttcaagtggctaagaatttgaatgttctgtttcttcgtcttcgtggggtttctttcatgtgtgttgctggtttgtcttttggtgttatgttcactctctttttctcatcatcaaggtgataacttttgtttttgggttttttgttttatgcaagttttgagtaaagattggatttttattggatagaagaatctcaacaatggtgtaataatatgtttaatgtattgtgatttaaactcatatacatctattatattgaaagacatagaaatatctttggtttacatcttttaggaaaatgggatttaattgaatgtatgagttagtggttttgtttataataatgcaaatttagtgaagaaaaggagagaaatacccgttggttttcatcttttaggaaaatgggatttaattgaaatgttaagctaatctctcaacaatgctatggcttggctttgtttgtattgcaattttagctaaattggatttcattgaattggaaagtaaagctcacaaaagtgctataaaa

SEQ ID NO: 219855 - DNA, 1507 bp, Cannabis indica
aaagagttgaccgagttgactgagttgaccgggtcaacccgccaacccgctaaacccaaccaaccgaaacccgccaacccgtgacccgccaacccaccaacccgccaacccgtgccctattcgggtccggattcggtttcaatttttcgaacccgaaacccgccaacccaaaacccgataaacccgcccgatgttcagccctacacacggcgtgtttataatattcatagataaatggttcacttaatttggcggaatcaaactgtcacagtaatatattataagcacgcaaaagcgggaaactttgaatgaaagagaaggacagacaaatcagatagatagaccactcctcactcagtcccactcgcacccaagccattatatgtaaaagccacccaacccggttctctttctcattctctagggtttcaactctgtctgccaatacacccaaccttaaaggattaataaccatggacgatgttagggccacctctgcttgggtcgccactcactcttcgcatgtcgttgtcgactcttcaggtttattattattattttttttaatactagaaaagtgagattacactttcgacattttaatttgttcattattattattttacgttttaattctgtgtgtattgaatatacagggatagagaaagtggtgaagacaattgattcgattccgaaagtgaaatgggattttgaagggattcactattttgataatgggcctctcaccgttcagtacctcttggtattggacgctttgaatttctgcttttggcctggtatactctcttttctaaactttcttatctttgtcctttttttaatttttcttctttcctaaatgtattttaaaataaggatagtgttgtactgaattgttgcagataataatgggaccaaccaaaggaattctttgttttctttttagtttcttaattgtttttttttataaaaaaaaaaaattgctaccaaaaatatacattttagattcttattctctatgtggtaatttaaattgattttctctgtgttcagtaatagtactaaagctagatagtgttgcatgtagtaagttcttggtcttttgtagaatgattggaattttgtactttctccttgcaaattttaatttgtatcaatagacaacacaaatcgtccctttctagtgaactaaccttatattaaaataattcatccatgaattacaatctctttagtttcttccttttctattatgattgattttccttcttattctgattgaattttatagatgctgatttaaattatgataatttggcttcgggtctgaaggaagctctactgaatgacaagtcagcttttgatgcagatcgcttgcagagttacactggtacatagccttattatttgaattttgaagtccatctttttaataatcatacatgcatatggtctcacatacttgcactttgctgttatgatcaccaaaatgcatggatatgatgta

SEQ ID NO: 219856 - DNA, 5691 bp, Cannabis indica
cttcacaaaccaaaattcagctaatagttattgagtgcatgcccacacataacaagttggtcctcaatcatagtatctaatattgtgaagaatccaaacaactagaaggagaatcgggctcagatcttggtgatactctgctacagaaaggatacaagggttagagatctgagcgggaggagtcatttaattccgctgcaaccacattaaggtttctcataccatttatctgtttattttcatcgttttagaaattcatattaggatgttaaaaacatacttgttagtaaatctagatcctcgtaaaatatattccaacactaggatcataccaggcgtgcaagagactgggaacaccagttcagcagccgatcaatccaatcccaacactgaggtcccgtctaccactattgttcataggtcagttggagatgatatttaaatccagaacctccgagcagcccttgagttcatgtaaggtcataataacactttgcaccatgattaggaggatcttcgtgcagctataaaccgtgcattcgaagatcaaagacatcaatatatagaatggaaggataggaagatggaaacttttagggctcaacatgcagccattgatgatcgcacgaattagggcaccgtaatgataagaatggcctagcaagtcgccaatcaacaatcgactagtgcgtccagcattcctttgggcagtttagaagggtatgcagctaggaatactgcacaaactcataatgatcacccgtccaatacacgaccacaggtccaacctgcgaaccaaacgatagacggccagatccagctggaccatcccttgggtggagttacacacaacaattcaccctaactaaaatttttggccaacctgctagccaaacaagttagacgccaaggcaacctattatttcagtattcgataggttgggtatcgcacatgactttaggactgatctaaatcgaagaaggggcctggacgaacaatacattccaccaactgtccagccaggtatctgcatccaggatctagttcaaagagatcctaatatgacacaggccagtcaacaggccaaacaagatcatccatttgtgcaagcacaactggatcaacttaaaaacattgtacaaggcctgaccggcccaaaactcactgatctcaaacttgaccaagcatgcagatcacccttctccctggagaatgaagtccttaaattatccccaaaattcaaaatgccaaccaggaaaatgtatatagggaaagaagatcatttatcacatctgaagtattttgagatgcagatggatgtgcaaggggtaagaggtgatgtctgatgtagaatatttcctgccacactcgcggaggccgcccagcagtggtatttcaagttgcctccgcggaggtttaactcatggaatgccttctcttcggagttccatgcataattttcttcctcccgtcaacttcccacgcatctagattacatggttgaagtaaagcaaatgccaggggaaccccttaaagcttatgtaagcatgtttatgatcgaagctacaaaggttaaggggttgattgaagaaggaaggctggtcgcaatacttgggggcattgaggcactcaaagaactgtggaagggcatcaagaggctgactgtggggtcaatggttgaatttttggatcaagtagaaggattcattaagctcaagaagttgtttggcgtgtggatacgattgcataaaagaaaagctagaaacataccacctcggtaggaacatccgttcagaatccacactaccctggcagctcaaattcaaatgggaagtggtctaataatggtaacatgtagggtaatggaaagaaaggaaatcactagcaatgtcgaatagcaccccatggaaaatacctcaaaattcactaccttctaagtcctaatagacgacctagagacaatctatgtgacaactcagtctatggtcccgtacaagaaaccatctcccatgaagaaggatgtcagtaaaagagatacatccaagttctgccggtttcaagctgactacgaccacgacacaaaaaactgtaataatctaaaacgagaaattgaatttttgattggaaagaataacccacacttaaagaagtatgtcaaggtcgatcagaagcagagggtcgcccaaacaaacaacaactagaaccaattgatgcctccaccagtggtacaatcgaataagaatgcatccactagacaaagagcatacaagtttccaaacatatatgggtctttactgttgcaaggttatgtcgtttggtctgaagaatgcgggagctacctaccagagactggtaaacaaaatgtttatagaccagatcagatgaaatatggaggtatatgtggatgatatgctcgtcaaatctatgatggtcaggggcacatagaggatctggatgaatgcttcaaaatccttagaaaaaagaacatgaaactcattcccttcaagtgttcctttggggtcagctggggtaagtttcttggttttattgtcgatgctcagacaatagaggctaatctagagaaaatacaagccctcgtggatataaaattgccaacaaagataaaggaagtctaaagcttgactggtcggatagctgcactcagcagattcatttgaaaatcaatagcaaagtgtgttcctttcttcaacatcctccgaggtaataaatagtttgaatggacagagggaatggacagaggaatgctagaacgccttccaagaattaaaaagacaacttgcaaaggctctcatactctcgaaacacctagaccgagaagaattaggaatatacttggctgtcaatgactatgctataagcgtcgtgctgataagagaagaaaagaacgtccatcatctagtctactatatcagcaaaagactcgttgaagctgaaggacgataccctttaataaattagctcacttacttcctgatcatagaaataaggaagttaaggccctatttccaagcttaccctatttgggtatacactgactaacagttgcgctaagtattgcaaaatcttgatgcctttgggtgattacttaaatgggcaatagagttgggttagtacgaaataatctttcaaccccgtacaatagtgaagggacaagtcttggcatacgttgtggttcagtgcacaagcaaagaagaaatcaacataagggacaacctggggccagtataagaatccttgccaaaaaacaacgaagagcaacctacctagaagttgcacgtagacagattagtcacagagcagctttctagcgcaagaattgcccatgtcacacctgggcagcaacatctacatggagtaataaaattttggttcaaggcttccaaaaacaaagcagaatatgaagccctcaaagttggagttaacttgcttgggaggtccttgccgaatacatttagttctgtagtgattcgcagttcgtagtgaatcatgtttcaggagagtacgaggcccgaggagagaaaatgatggcttatctaagcaagatacaagacttgcttgcacaattcaagggttataccctcaggaagattccaagagaagaaaatacaactactgatgccttggcccgacttatgagcagtatagtaacagataagttcaacccaatcccaatccaattcttagaagaacctagcataaattgtgcgcaagaagttgaaatgatagacacaacacaaaacttgatgacacccatagcagcctacctcaacattggagaacttccaaatgataagaacgaagctcgaaagatgatgatgaaagtttcacgatacatcatagtagaaggtgtgatgtatagaagaggtttctccatgccattacttagatgtgtaacaaaagaagaagttgcatgactcctattcgaagtacatgatggattctgtggtatccacgcagtaggacaaagtctatcaaagaaaatactaaggcaaggacatttctggccaacagtgatggaagattcaaaggcctaagtaaagaattgtgaaatgtaccagagattttcaaagatcccctatgcatcgcccaaaaagctgatgcagatgcaaagtccttggccttttgccattcggggaatagatctgatcggacaatcgcccaaggcaagggcggggtacattatgtagtgattgcagtagattattttacaaagtggacagaagtcgagcctttagcaacgatcgcagctaaaaaagtactggaatttatggtgaaaaatataatatgtcggttcagacttccgcacaagatcgtttcggacaaaggcaaaaagtttgacagccagatgtttacagatttctgtgtgacacataatcaaatggtcaggtcgaggaaatcaacaagacactcaaagacaccatgaaaaaatgacttgaagaagctaaagggaactggccggaggaactaccagaagtatcgtggtcataccgaacaataaagaaaacaacaactgggcaaaaaccatatgctatggcctatggttatgaggccatgttgcccgtggaattagagcctttgtcccatagaagattaacttacaatcaaggagctaataatgctctcctagcagaatcacttgacgagattgaagaaaaatgagcctcagcaaacctaaagctagtagctcattagcaaaaggtagctcggtacttcaacaagcaagtgagggcaagaaattttttgtgagagatatggtcctcagaagagtgttcttgaacacaaaagatagcgcgactggtgtgctcgaacctgacttggcgggaccatataaggtggtcgaagtcacatactttggagcatataagctgggatgatatgacaaaaatatggagctcgttctagtaccaaggtattagaatggggaacatttgaggaaatacgtccagtaagtgtacaaggtctgatggccatttcaagaacacaatgctagaacatttacttttaagtacatggctttctagacgaatcccgcgcaaaggtttagataaaataactagtactcggatcgtatcaccatctttaaagtaaagttttaaaagtgcaattattttatgtttaatttagctaaagatcagttagatcatgtaatagcggccataatttaataaatgtaagttactacggtaacaaaattattccaactaataaatgaataaacatattaattatcattctaattgtatcaattattttatagcaaatgatgaacttaccattaaaatgtgtacaaagggtctgctggaacccaaaggccgaacagacaaaaattgaacttgtgaaatgcaagtgacccagagtcataagtctactcggtcactcgaaaggaaactatacccgtacaaagcattggtaaataacaagctcaaaaaaaaatatagcgatttgcacgtgcaattataaaaataaaggaaaatattcatttaaaaaagataacaaaagcatgatataaacctgcgattaaaggctgcccgatcagctagttgtcttaaaatgaagtattacaaagtctaaaggttgcttggtcggccatattgtatttaaaaaggcccatgggtcgaacaaataataataaaaaataaaaaagaataagaggttgtttggctttacag

SEQ ID NO: 219857 - DNA, 3655 bp, Cannabis indica
cagatagggagaaagtgggcagcagataatttcacactttgattattaatatttgatactatttcctttttaaattctcatgattataactaattaatttacaaagcctactaaatttaattaatgtacttggttttgatgagaaatattaaactgaatagttctatacttaccataatttattttgtacttgagttaaataactccccaaaaaacaactatagctaaatattaaataagatttctaaacatatatatataattagctttagttaacaaacaactgtatgttagaaagatagctataatgttacatcaagtgagttaaatcatttttttttattttagctcaaacactattcatgctttacatgtagagataattttttaaattttgaatttcttcaaatatttttattgatttttttttttatttttatttcaacattaattatttgtttattactttctctttcttatttttttattaatttaattaataaaaaaatatttaagatataatattataatattgtaaagaaaattataaaaaattagtgtatagtgtaatgtaaatatgcgagttaaaattaaaaaaaattaaattttaataaaatattttgaagaataaaataaaaaggctaatatgagtacttttaagttttgataaatttagaaaactcatagattttatgctctagtaacttggactaaatcaaatacaattccttttgatatttacaatatgccaaatgccaataaatcaacagtgtacaaaagcaaagttatagtaagaaaaatcatacaatgcaactttcgagtctcaatctagagaaatttcaaaaaaggaaatatcaatatatgccaaaaccaaatcaacacaacaaaagaatttcaccatgcattatccatgattggaattctaataccatcataatgcgcaattagctcctcctatacctatgaaataataattgttacataaataatgtttatgaaatagaagccaatgtatagaatttgggcaaatcaactcactcaacaaatctaaaccacctcttcaagattattgcaacaaaaataaacctaactaatgatatatgaaaattagacaaaatagatcaacacaatggaacaaagagaaactaaaatctacaacaatcgaaccaagccaaccaaacctaacaatctatttgtgtccctataatcaagcacactagaagatcattcctctcctacaagccccgagccttaccaagagcaggaaattaacccacacccggaaccacatcaatccttgcataatacagattttgtttgatggtaacatcacttctcttctcaattagggcactcgtgtttagcattgttgacacaagctagcctagtagacaaaggataaggaaaaaaattaggaaaaagaactctgaagttggttgggcaaaaggaggggtgttcattatactaaattcaatgtttgtatacgtaggtctatccaaatgtatgttgaattttaccaaccgatccgattcaattaatttcaatcatctgaaccaatccaatccaatagaatgtatgaattcagatcaattttatccattgaatgtatttcatgtatatctattggattggctcagatttattaaatttttttatatttcaatattttttggttgagatcggatccatctaggtccagtatttattcaattgaatcaaattggatctgttatccgtatttttagaagggagacacgtggcattctcaatttaaaatttgttatctaaggcctagtcaaaatccctaacaagataacaggcccagtccgaggcccaagatatttacattcaagactggatctctccgattctggaagggcttcccactcgaataagaaagagcagcagagaccctccggatgagcatctaggatacatccggaagggaattccaagaggcacccaaaaacctagtccaagatgatgtggcggctctctaataccgaatcagaggattttcctttgtgtcaaaccctaagagtgcactcaccaccaaaattttgtctgatgaccactattctaacactacagtacacaaagatggcgcatgcatgactttcctaatggatcaaatgttagttccctttaagtgctaattctagaacttgaatgttgtgtacatatttagatgggatctaaattatacgtccactagtgaattaatgatactaataatgaaccaacacatggaggactaatcactggaatttattatatcaatggacaatacagtaaaattcaataaatataattctataattactaagaattcaattatatatttttagtggagtaatcatggaactaataaacaaagatgagatttaataaataatctagtttattatagcttagaattataggtccatggtttccgatccaccaccttgaaacactgtcaatggtggggataaagagtagtattatgtcgtttgaaaaatctattttaaattggcaaaatagtaattatttatttttaaggtctggtcaaaggccaaacaagataataggcccagtctgtacaaaaagatggacctcacacctatttgaggtccaagatatttacatccaagactagatctctccaaatctggaaaggcatcccacttggatgagcatatgggatacatccgaaagggcattctaagaggcatcccaaaaacctagttcagaatgatgtggcaaccctctgataccaaatcacaggattgtcccttgtgtcagaccctaagagtgcgcgcactaccaaaattttatttgatggccactattctaacactacaatatacaaaggcagtgaatgcatgactttcctaatggatcaaatgttgattcattttaagtgttaattctagaattagaatgttgtacacaaatttagatgagatctaaattacgctttctttagtcgcttcctttagtgaataaacggtactaaaggataaagaagtaattaggaaggtaaaacggtaatttgaccaaaattaattatgaaccaacatctggagagctaattactggaattgattatatacagtggacactacagtaaagctcaataaatataattttataattactaagagttcaattctatatttttagtagagtaatcataatattaataaataaagattatttagttaatgagactcaataaataatctagtttattatagcttagaattataggtctatggttcctgaattgccaccttaaaacaatgtctattgtagggacaaatagtagtataatgttgttcaaaaaaaattaattaaaaaggaaaaacaaaatttgtcaagataaaatttattgagacaaattttgttaagacaaaaaatattatgcttgtcctaaaaaagacaaaatagatgtctcctgtgtcttttttaaattaattaatttaatcagataaatatttaaatttaaataatacaatatgatactacattattttaaactaaaatataatataaaatataatgtaatataatattatgcaatgtaatacaacatactaaataaactcgtaaaccacataactaatagaaaatgaaattttcaaaaaaaaaatagaaaatgaaattttacata

SEQ ID NO: 219858 - DNA, 4113 bp, Cannabis indica
accaaatcgaggttcaaaatagtcatttttaagttagattctgaattggtcggttagtttttggattgcacctatccagaccgaaaactgaattttagatttttatatagaaaaaaattaaccaaaccgaccgatgatgagccctagtttagctagttacctgaagcctccatttcaatgtgggagacgttcgtgaacttgttcttgactcatttttaagcaaccatgacatctaaaccatcgtatacaactttagcaaacataaaacaagatgcatgtgcgactttacaggattactttaagccttttaacgctagggtaaataaagtggagaaggcccccgaatctccgcgtgtctgcatgcttatcacaggtgtgctactaagaacagacttctagaaggaactacacgtgtgatgccctgaaatgttattcgagttctttgccatggcacaaccccacaagagaatagagaactcgcttgtagagctcgagaagagcaaggagaaacgatctccagtaccaagaacacgatctagaagcccacggcctagaagttccaagagatatagtccaaggcatagcccaagaagacgcaaccctacatggcatcgaagcccgaaccttgcagtcaccagccaggaaggagagttccccaaagcagaagggaggtctgcaatttgtcaattacacagaaatttgtgtctcttgcaatcacatatatgccattgaagaacacaagggtgtatttaggaaattgccaccaatcactggcaatcgtgacaagagggactcaaaaaaactgtaagtatcacaaagaaattggccacacaacacttgaatgttggttgttataggataaaattgaagaattaatctaacgaggacattttggccaatacaagaagaacagtggagaagccaatccctgagtggatggggcaactaatgtagaataagcaagtggttccagagctccttgcaatattttgaccatcattagtggatcccacatcagtggagattcaaagaaggtgcaggagcgatacgcgaaggaggtcaaggagaaaccactaaccactgtgaacaatctgagcaaaataccaacaaagttattcaagaaagagtgtgaaaatgtcactttcatggaaagtgatgagagatgggtacaccatccccacacaaatgcactagtcatagccgctgacattagaggtgacaatgtgcatcacatacttgtagataatgatagttatattaaccttttaaacttgcagggttttaagcaaatgggactacacaagaagggtttgaaaccaataactttgagcatttatagattcactgtggacacaatcgagttaaaaggtgagtctaaggaaggtgaatcaaacaatgttgaagtaaagtacaagtctccttcttattcaaataagaaaaggaaatggaacggtaaggacaatagcagtggcaagcccaagccgaaaggcaagaagaccaaagccagccctaagtttaaggacaagaaaggaaaaaggcaagtatttttattgtggcgtgatggaacactggaagaaaatctgtaacaagtatctctctgagcttaagaaaagtaaatttgatttatttgttcttgaagttgatttagtggaagatgatcaatccttgtgggttttttatttggaagccactaataatatttgttcttcaatataaatacttgatttgtcaaaaaaactggctaatagaaaggtgaccataagagtgggcaatgaagcgcaagtgtctgacaagtgtgttagaagagtacatttaagtttattaataatgagattattatttctaaatttggaacgccaatttgttctacaaaataaagtaactaattttatgtgctcaagccaagtgagcaattcatttaaataatgaattacttagagtagcattgcttcaacaaaataagaggcaaaaagtttctgatgataatgaaacgtatctatgacatatacgtttaggccatattggcctagatagaataaattggttaacaaaggatggtcttttaagagaactaaaagttagaattcttccagtatgcaaatcttgtctaaaagccaagatgacaaaaagactattttattcaaaaggcaataaagccaaagaacaacttgagcttactcacactgatgtgtaccgatctattaatattcaaactcgagatggttacaaatacttcgtcacttttattaatgattattctagatacggtcatatttacctaatagccaagaagtctaaaacattcagaaaattcaaagacttcaaagctatggctgaaaagcaattaggtaaatcattaaagacacttcaataagatcgtggtggcaagtatttggattccaaattcaaagactgtttgctagaagaagggatcttgtcccaacttacagcacttggaacacctcagcagaacggtgctgtagagagaagaaatcagaccttgttagacatggtcagattaatgatgtgttactcatcactgccactaaacttttggggatatgcacttctagtgcctacctacattttgaatgtagtacccttgaagagcataagaaatactttaatagaattatggaatgggacaaaacccagtttaaaatatttctagttgctcatgctcttaaacctaagactgggaaacttgctcctagaatttaagtgtgtatgtttgtaggatattcagaggacactcaaggaaattggaaatgagcacatttctaaaccaataattttaacaccattagttgaacgactgacagcggttaccacaatgcctgaaaaggaaatcctagtacatcgttgtagtgggaggattgtgagacaacttgttcgctatgaaaatgaagcataatttcttgtctctgacacatgcaaggacgattccttgacttaaaaataggcaatggaagaccctaactcagacaagtggagcaatgtcatggatttagaaatagattccatgcgcaccaacaaagtcttaaaatattaaattccaccagaggatattacgcccatagggtgtaaatggatttcaagaagaagagaaatactgaagggaaggtagagagttttaaagcaaggcttatggctaaaggctacacacaacgagaagatatcgattttgacaaaaccttctttcttgtgacaatgcttaaatccattcacattttctttccatagctgccacttatgactatgagatatagaaaatggacatcaagaccgctttcctaaatgacaatcttgatgaagtcatttatatggaacagccagaagggtatgtgttaccaggggaagatcgaaaggtgtgtaagttgtttaaatctatttatgaattgaagtaagcctctagaccttggaatatcacctttaataagattattaaagagtatgacttcaaacaaaatgaggacgaagcctgtatatacaaatacattaaaggtaatgcagtggtatttctagttctttaagttgatgctattctactaatttgaaataatgtggaaggttatcaaacgtaaaggaatggttagccgataaattccaaatgaaggatttaggagaagcaagctatgttctcaggatcaaaatctatagagatagaaagcagagaatattaacacattctcaagcaacttatatcgataaggtgcttgaaagattatcaatggagaattccaagaaaagacagcaaccgtctagacatgaaattactcgatgtaaagattaatgtccaaaaactcctcaggagatggaggacatgagaaagtacccttatacatcatctgttaggagcttaatgtatgcaatattgtgtacaaggcttgacatatgttatgctgtagggattggtgtacttgtcattttgtggggtgcaaatatgtgtgtttggtaagagagaagaggagaaagaagagaaaagtggcaagaaaaaaattaatgtagagcccacataaatctatcttgccaaccataagtggggagaaaatagaaaaaaaaaagttattgaagagttttatttacaccttacaaaatgataaatacacccca

SEQ ID NO: 219859 - DNA, 3697 bp, Cannabis indica
tgccgtgtggcagtaaaattgaaaacaattaccccaattgcagtatttttgtaaaatgccctaatatagagacatttgggtaatttaatgaggcccagcctgtgaggctattattatctgcttacatgaaatttgtttgaccacaagtagaaaacatgcatcatttttgtatgtaataaatgaaatttaataactgcttgacaatcactatatttctttatacataatgcttgatttttggagttaaccttagaaacaaaggcttgatatgacaggattcgttattaaatagacactgaattaaccttgatgtttggaaactaatttatcacattttcaaaagtattgctagtaggtatcatattctttcttcattggactcctcttgtcgtatggacaagatgtctttttggaattcggacggcccgacttaacaaattcaatccattattctgattgggcctataaactaagtctttggtaaatgaatttaggtattgaaagtacatgtgtccctctttcagaaacacgaataacatttactccaaaatttctgaaactcgagagttgtgaagacttttagtcttcattctagatgatatgaagacatgtgaaaattgaaaaaaatgtatggagctttttaaattccaacccaatagtaatggatgacaatttcttactttttgaatataatttacacatggcattgttctcttagctcgtgaagattacttgcactaaaaaatacgtaaagttttgaatttgcaaaacgataattaatcagaccagtaaatatcgacgcaaatattatcatttgaattatctcaattccgtacagatcacttaatgctaatatttccacttcctaaaccctcaaatgctgtagatcactatttttttttaaatgaagtaaaaaccatctgtttacaaccccctttacattgagcttgaattttctgagagaaaaaaacaaaaattatttctagtgaatatccaattacttggacgagtgcttacatcttcttcgaattcgtttgcgattaaaaccaggagcaccaaaatattagaattgattattttttattttccatttttttcattatgctactttttctctttcctcaccaaaatccaaattctaaacccttcgtattagtaattcatcctccttcaaggaacaaattagtgcacattacatctattatgtataatgagagcacagaggtcaaaagtacacgaaagaacgatgtttcctcacgtgaaagccaaaatttatttctcacctcattattatacaaaaccaaccaaacgcccaaatattgccacatgtgaattgcccatcataattccctctgccccaaggtactctttttccaacattaaaaaaattgataaatatgccacgcctaataaatatatattcttaatagccactacatttcggcttaaataggagaaaataccaactagtagtctcttccctaataaaaatgaggatgaaaaaaaaataaaatattatttctcttctccagtttcctcatgcaaagaaaacaaaaataattaaaaaaaaaatgaacactgcaaaatcctaggaaacatggagaccccgatatgaaaaagaacgtacaatatgcaattgacaaaaggccagttgcctttgggaaaggaagatatgagagtacacaggatgacgattgatgatgattataactaggttatattgaatggcttggcagctatataagaaattttctattggaaggaaaaaaagatgagcaattgaaaaaggcataatcataatttttctatggaacaaaggtgtggcatcataatacaaagcagatcatagcaaccaaggatcccacacaaggagagacctggaaaagaacatgaagcatgatctaccattcttacaataacttatctttaatccaatggcttctctcggccactttttccttggatcgatggatataaggatgtctcccgaacttcgcctgcaaaccattgagattcacaaattaacaaaaccattcattcttactcggtgttatcagcgcagaaacatacactgtttaagtctctacttctcgaatggatgagatttggagagaagaaaatgctaacgtaaaaacttgtggaaacaattgaaaacgttaaaacacacctagaatttttcatttcaaatgagaaggaaaaagagactaaataccaatctgaatgtgtcaacgtctaggtctagatttgcagcgaaactcagctaggagtgctatatgatcagaggaccactctggggaaggaagagctgtgtctttcctcaagctttcctcatccaagagctccaataaggactccactgttaaagagtccgctgaaacaatggaacagatcatgagataaataaatgggttttacagaaataaaaacatcataggaaaaaacaaactggtattacaagaatttacctgtgtaaaatatgtaatctagggtgccaataaaatctctagtacaatttgtaaataaaggttcgtttgttgaaggatccagtcttctcctctgctgatccaaactgataccaacgcctggtctcgcaaatgatgagtaagcgctcacctgttgcactactcgagtgagaaatagctcaacttgtagatggctaaagaagcaatgcactataaacaatttcttaccagcggtagctgatgtaacagtttggtgtgggggcgcaatatattaagaggatcaactgctaaatctggatgcaaaggttctacctttcccatagcaagaagcgaatgaggagcactgtaacagaattaatcagcacctctaagcaagcaaagaacttgataacaaattctggacacgagaataaaagtgaacgaaccttccaggggtcgaattgaaatctccacaaaccaacatcggaatatctgcactagcagcaattttctccaatccttttaaaagcgtatgaacctaacatgaaaataaatgaaaccattaattgatgtttcaaagagatgacaaactagaccatcacatacagaaagcaaaagtaaaagattaactacctgccagagcttgacatcttttagatcatggtggacattaacatgtgtatttgcctgtaaagtaattcatgacaaaatatatataatattcagaaatgttgtagaaattttttgcatatgaagttggtaaaaatatgatctaattcaaaatactcaattactcataattacaaactccggtattatttatttggtgtacaatttggaaggagtaacaacataaagacaagaaaatacataatcaaggagaaggagaaatatttgtattaaaacccatatatagtacaaaacacagcaatcaccttcctctctaacaagttgcccttgatacccaaacaaacactcattaatcacaagaaagcacctttctggtgcctaaagctccaaaaccccaaacaaatgagatactctggaaatagttttaacgctatcaaataattctaataaacatcacctaaatgagcaggaaggaaaatttgcaagtaaaaattattacaaagcatatatctgacaaacttcaaaatttaacaaaaaaattgagtttataattgaaaaaaaaaacaacataaacaagtgaaatgcgtcacaaaccttcaaaagttcccaaaaataagttaaaatta

SEQ ID NO: 219860 - DNA, 2320 bp, Cannabis indica
tttggtactcaatatgtatatatataaacttgtacatatgatttggtgaacactttcgacaaagaagtacatatatatagttaaatgttttgttcgatttgctaaatacatgtaattatcagaattcataagaaaatagaagacaaggatagaacatgatttgagaccataatgattagaagacagttgacttatttacccaaaatatatatttatatatatgtacatgaaactcctaaattttaaaaaataattaatcctctctaaaataaaattaatcgaaagagggagagttctctttatagtttctatatatactgaattttgtaaattatgttttaagtatttttttttattttttttatactagtttaacacgaccaggatgcaattattaaagatggaaaattaaagctgtataacttccacatcgatatagttaaaagaaatattaattagttttgggtcattttctatatagaaaatataattgtaagaatttagaatatattccacacaaaaaattataattttatttttggctgtcaacttaagctagatttgagaatccttatcacttgaatacacactgaacttgtgctcaagtgtatataaatgcagcattaattcgattcaaaaagaaaaaaaaaacaaaaattgagaggtaacttttggattttagctaatcatcaaagaatttatttatttatttatttgttattatttaatttggttcattaaaatttatgatatgttgatgaattgtctgtgtcatttccaaacgatgaagacaaatcttctgtattcaataaactccataatcctcattattccccggccagccaccattaattattttcttttaaaagaaataaatgaatagaaaacgataattgaccaattacaagatttattatgagagaatcatatgccaaaataacaaaaaaatcaaatttgcctactcttgtaataaaaagaatacgcaatctacacacacaataaataaataaataaataataataataataaaaaaaaggaaatgaaaaagaaccaagaaggacaggtatacttgacttatataaataaaatttatgtataattaacaattaatctaacaaaatttatttcttacagcacgagagatgaacagttggttcactaaattaccacaaactcacataattaaatcagcaaagaaaatatatatgagaagcaagacaatctgtggcactactctttttctctctctatatatatatgcatgagacatgaaaataaattttagaaaacaaataataaagactacgacaccagggcatcatagggctgcacactagtcagatttttgagttttcggatggtcgggtttgagtttttgcatttcggatattttaaatgtgtaatcgaacctaatttttggatagtcggattgtaatacaaatctcaagatcgaccctgacgacagcaaattttttttttattatattctaaataaatatattagctagtttgattaagagtatctcttaatagggtgttataaaaatagtgtacatgtaatttttttagtcaattttataaaattaaactttaaatagtagtgtataatgtggaccaaatatgatatatattaaaagttgtgtgaaatttaacacaaaatataacatgactaaataaacaccacttactatatttttatttattcttttactttctgttaatataactaataattttttactttttctttatatatttaaaaataaaattttatatactttcaataaaaaattaaaatttttgttaattttttaagttaattttatacttaatatattagagtacaattgtaaaatttgagtgccatcattaagaatgactccactccgtccccaccacagagaaaaaaaatcactttcaatgatctaaggggggttttggactcggacccgacttaaataaaattaaaaaataaaaataaaaataaaatttgtagaacacattttttattttctgtatttaaacttgaaaacaaaaatggtcatagaacacattatttttcaaaaataaaattttaaaaataaaaagtttacttttatttttgtgattaaaaaaattttaaaaaaaattgttacaaaataccaccataaagtataaaaattgtataaataagcacgctaattacatacattcatagacgaagacatatattgatttagatgtcgtagcttccatttatgtatgtatatatatatctttatatattaaaagtgtctatctaactgtatttcttggtttaacattcttggtttaacagaa

SEQ ID NO: 219861 - DNA, 3130 bp, Cannabis indica
gatcatcatgatgatcatgagccaagagtgttttcttgcaactattgccaaagaaaattctatagttctcaagctctagggggacatcaaaacgctcacaagagagagagaactttagcaaagagatcatcaagtggttatcatcatcaccaattcatgcacaagaataataatatgtttggtatgatgatgagtagtagtaattcaattccatgcagatattcaagcttggcttctctacctttgcatggcttatctttcaataggtcacttggtattcaggttcattcttctatgattcacaaaccatctcttcttcctctttttatcatcaccagcagaatcagccaaaaactgcgatgatcatgagtcctagtagtactcctagtagtactgggagtcccagtactactagtaattcgcagttttatggttataataatccaaatggttgcttgagatttcaacaacctgccgttggaaggctccaaatacccgagactttttgcggtgatcagactagccccggagggtttttgatgtccccgcctagtggtggtccggcgagttttgagttcggccgtcagagatattccccggtgagtagaagtgatcgtgatgatttggaggaaattggagggttttggtggaataagactaagcaagatgataagttgcagaaacttgacttgtctctcaagctctaataatgaaccacttttcttttttttcttttttctttttttttttttttgttcatttttcatacaatttcaatttgtcatttttattttcttaccttgtgatatgtatatttagttgcaacattattatgtaaatggtttgatattgatcttaattaacttggtaattaattctatgtaatgtcaattgagtttggttgggaataactagtatatattaatatatctctcatatattttcctttaattaatcgttcgatttttatttttccaattttgagatgcaaaattaaagccatggaataaagtcaaatcactctaaagaagattttatatgtatatacatatattgaagtaataagattataaattgaccatatatagtcaaatagtatatatagaggtaattattgtagatgacactagtgtagttcactcttttctaaatacaaaataattatgttaaaaggtataatatattggatcttatatattttaatttaataaataatataaaaaatattattttagtgtttggatactctaaaataccaaataaataatagtcttataattatgtggagtgacatatggggcacaaaacgtgcacaaaattagatgcttgttattgtcctttcccataatttagtttttgacgtggtcacacacacataaatgttatacattttggacggttgtgatttgtgtagccctaaatcaacatctgactttgacccaccacatcagttaaaagtcatgttaactctctctatctatctttctctatctaaaaatgtggagtgagtgagtgagtgagtgtgatcaaattcaaaagaggcatatataatatagtaggataggttggtgtagcaaacccatgtgaaaacaggccacataatgacccttttgctatcctatcacatcatatatttatctttactctattctatatataacttgagatttttaaccaaagaagaagatctcttaattaagaaaatgggtccctaattacaaaaatatatgtgggtccagatctttttgatgtttacaaacctaaaattagtcttatataatagaagaacaaaattctcctcaaattaagttgaaagtaactgaattaagatgtgtcattatgacacttaattatcatcaattattattaattaatcccaaaaaaaaaagaaagcttttaactttgaatgggcaaattctagtagaaaattaaatgatgatcagttaggttgtccttttattttaagttacactgccttattctttaaccatattatattaaaaataattgtggacttaaaaaaccaattgatttcgcctctcaattaaggaacacctttttcctattggaataaaattatatttatttatttattatacaattaataaaaagaagatacattttagatttggagctatctatgttgctgtagattaggtggaaaataatattataaaatttaaataaagtatgacttagtcttcctctttccttcattaccaataataaaatttcatatatattttgtcgtcttctgaattttaatattgtatttattcttctttaatttgtttgatatagctaagctagctaggtatattatttgtccgtttcaatcaaccaaatgaaaatatttaaaacagtagagagataatcaacatcagccttcacccacatggacattattatagaatataattaattaattaattaattaattagacatatatatacttgtgttgtaagaaacaaaatattaattacctaatttaactcgatcttacattgttattaaatagtaaatgctcatattgactaataatagtgtagtaacgatcgagtttccacaatatcacttttgtaataataataataataatctttgtctattttcatactattaaaaatgagtgagatattatctaatttttacacccgaattaggttaaatgtatcatgtgcgtcaacctaagtttgaaacaaagactctttcttaaaataaaaacctaatgtttaggaacatcaaataaatagttacaaaaaaaaaaaaaatagatagaaatagaatccaaatggtctattaattgctatgttgattgataagaattatccttaattaattaattatgcatttggtgtttagttcatagaaataggttgtgcatatatattattacatttggtgtttagttcattgatttcaaatagccttatgtttttttttttcactattaaacttatgatttattcgctcagttatcttcaaatatattatgccaaattaaaagagacacaacacttgcatctatccaattttgttttgagaaaattatgcataagctaaaacttgtgtgagactaggcaaatcaaattacagcactgtcttcagcaaaaaaaaaacaaaaaaaaa

SEQ ID NO: 219862 - DNA, 2033 bp, Cannabis indica
ttaatataataatttttagagaaaattactagtcaatcgcaaagtgacacatttaagaagttacaacaccacttgagtggtgtcaaataacaaagctctataaataataataagatatactagggtgcaagtgtaaagctagagccaaaaatagaattttagttaaaattagactaatcaaagatcaaattcaaaccatatccatcaaagcagagaaatgaaaatgaaaaaaagcaccatattaagaaaatatagtacttattattacataatatgataaacaaaaagtaaaaaaagcaaaagtaaaagctaattaaacataattgaatcccctattgaagattaagaaagcataattgaatcaccatgtagggaaaaaacccatagtggaatcactctgattgtaattatgccattcatgagtagtttcagcagctgagctaggcatcaatggcagcagtggttggctcacattgtaattttgttgttgtaaaggcataagaggattatcaaacaacatcatttcattctgatcattttggtgcataccctcaactccttctccagattccaacacattaatgttgttgttatgttgatcaccttgatcttctagaagaagattagtattattatagtattgatcatcaataccataatcatcagagttcaacagcttagtgaaagagccataattgttgttgtgaacatcaaacgacaccgtttgagagcttgattgaccataaatccaaggcatttgatggttgtggtgaaagtagtggtgatgatgagtaagatcattaggagaatagtattgaacattatggttgtaatcgtagagatgaatcaaatgtctcattctctgtttcaattcttcaattttattatccaaaacaaacatagaaagattgttaccactttcattattatcaatgacaataccctttgattttgaagaagaagaagtttgagattgagacacaacacttaatttctcaatttctgagttgactttctcgagtctttcgttgacgaaatcttgcattgtatggagtctttttgatggtggtttcttcaccatggcatttttgtaatcatttattagagactttactttgtgaggattctctggccatgtgactattggatttgaaggttgattgatcaaatcttttactattaagcaaactttaacatcacaaagtgtgcttaattcataagccttcttgattagcccacttcttctcttcaaaaatgttattcttcttgctttttccttcggtatcaatttcaatggtaattttccacgtcccatctttactttatttcctattaaagcaaaaaaaaaaaatgtagaaaaataaaaaataagtcttttaataaaaccaatttatcaacaaatatataataaagatctatagctttgtaatgaactcaaaataaataaataactatttggttaagaaaatactgcaacaaaattctagagagccttacattagtatatatatatctgaaatagagaaaaactcaaaatggtattcatacaaaacctattgaatatatatatatataatagtgtaggcacctcaattgttgaaaaacagaaatttagaatgaagagagggatagtgaaaagcattcaaaaccaaattaaataaattaattcataataaaaacacttacttgagagagagactcaaaactcttggaggagagagagagagagctatgttatgatcagatcaatatatggttcttttttcttttcaattcaatgactccaaccatgatcctttttatatataaaaataatgtaataattattataatttaaaaattaattaaaattatactttcttttttttttttaggttttttgtagtaaacaaatctgataagattttatgacattaatgttatcttattacgtagtttttttcagacatagtatacgtataattttattttgatatcaagtttctgttaggatttatggcacgatttatatattataataaatttatttatat

SEQ ID NO: 219863 - DNA, 2004 bp, Cannabis indica
gatatatgtagatatataaatatgtaaaaaaaattagtagcaaattactgtaaaattattagttaggtatcgttgcatgttacgttactctttttaattccttacactataaaaatatatattatttaattttttgaagcatgcagttctatttttttaataaaatatattaattaatattatatcgatcttgtatgtacctgctatttgataaaatatttaattcatattatagtgtcacactccatatatgtacaatggaccgatcagtacttatatatacatatatatagtgcactaatgagaaataaagtaaaattctatatataaaaaactaattaatttttcttctttaatttctcatggtaattaaattataagatgtctgtcacacacacatatacaaataaataaaaaaagcattaagattattttaataagagaaatgagctgggagagcatatatgagactttggtgtagcaagatcccatttgaaaacccaatcattgaagataaacagaaaatgacaaaaaagacttcttttttgagaggctttactgtgcaagggaacataagctcattggaaacatgaccaaacagaaagacaatgtagctccatcacatttttttataacccatgcatttggcctatatgcccaatattatctatctaactaccctgccacattcatcatcatattatactataacaataattatctatatatacattgtactctacactacacttactttttttttttttctgctttattatttataaatatattttattatttcagcactagtacaattacaataaaattttatttgtagcgtgcaattaataataatccattgttcagtttggtacttttaattttgagtaaataaacattattattaccttatctaagtcaatatcaaaaacacaggtcaatagaaatcattgcatattaataagaggcctaggatcatcaaattctgttaaagagtcattattgtgagggccttttttttttcttagctttcttgacggtgaagtcaacgaggtgtgtatataccctttatcttccttttttttttttggttcaccaatttttaattcttaatttttttaaccaatttttaattcttaattatatgaggtttttatttttttgatttgtgaatttacaaaacaaaaatatttggggtgacaatgacggctgatagtagtgtcatattaagagtagtatataatcaagatattatgataatgaaaactgaaggaagatgtggccaaagaaatttgggtattaggcaggccggcggacaagataatcctgtgaaatcgaaatgtgttatattttattattagttaatctcatgcaaaattgtcatatttttcaaccatattcatataattaattaatatattaatcgtgacaatgaaatgaaagataaagaagcaaaaaaaagcatattagaaaaatgagaagaaaaggaaattattgaaattattaaaaaggttttaaccgtgcttgttagaaattaatcaatcgatcaatcatgtcaaagtaaaaaatattgtagaaaggtacaccccatgatgcctgtaatatatatacattatttatatatatatataaacacagattcgatctgtttctctctcataattcttacaaaatgatactctcttttcacattattgcccctttttttatgagagaaaaatagggttattaaacaaaaggtttgagcagaaagaaaaatatatactttgttaaaagtaataaaaattcataccgtaaagatgagaacttgagattttttttttcttttttttttgttgggagagggattcagaaagggcacagaggaaaaaacagaaagtgctacgtcagagtaagccgtagggttcctttgagttgtggttttgtgggtattgtttttggacgggttgaggattacagagaggtatatctctttcctcacccacatatttctctctctctctc

SEQ ID NO: 219864 - DNA, 6851 bp, Cannabis indica
ttttcaaaaatttataaaaattaatttataattataataaatacagttataaaaaaatattctgatatatatttccggcgtgaaagagattggaattatcacttctaaaaaaatagtgttggtgtataggtgagttcaatgagcttaagaagaagcattcttctccaactttgtccagtgttaccataatgtactgaagaagaagaagaaagaaataaacgataagagctaagaacagaccaaaatccccaaaacttagaaccgccccattgtccaaggtggccaccaatcccagccgcccgatctctctaaatggaggccacctgtcattttttagctgaagaagctccgaagggtcaccccagaacttgtggctaatgtccttaaggtacaaactgaaccagctttagcttcaaagttcttccattgggctggtaagcaaaaatgttacaagcaagagttttttttttttttttttttgtataataggataatggatgctttaattaaaatggcttatttagatttggctttgtctatttatgaggactttaaggatgatggtttggtggaggagaggagagtgttactttcatgattttgataaagggtctttacaggtttggaaggaaatgaagagacagagttgaacctgatgttatagctcatacaactataatcaatggtttgtgtaaaggagggaggggacattggttcaggcttttgttgtagatgggagagttggataggcttgtcatttgttgaattgaaggatttgatggattcagagtaatgttaatcgaggttacaaggcacacaagctctttctagggccaaactctgagacttttaatcccattgtggtgtcttatgcagagatgaaaaaaatggatgagttttgtgagttgcttgtgcagatgaagaagttgggatcttctgtcatggatgatcctgccaaattctggcaatggaagtgtttgaggactggaaagtcagaggttattatagtgtgttgcaatctacaataaactgatggaggctttccatagaattgggatggcaactaaagcactgtcacttttagatgaaatgaatgatatgaatgtttagccagactcatcaacttatattattgcaatcgagtgtttttgttgaagatggaaatgttaaagaggcttgtgcttgctacaataggataatctagatgtcttgtgttccatcagatacactattcatgcttgaaacgctgcagatatccttgcagtggtaagtgagatgatgcaagaatgatgtcctccggatgatgttgtatgctctgctgttatatttggaatgtgtaagcatgatgttatagaggaggcaaggaaggtcttttcgaacttgagagagcgcaaagttttaagtgaagccaggacgattgtgtatgatgaaatactaattgaacatatgaagaaaaagacagcagacttggttgtatttggattgaaattttccggcttagaatctaagctgaaacttactttcttgcctacaaattaacttggaatcacctttgttcacactttaagcttctcatgttaatgccgcaatttcagagtgttgcttttggggtgatcaagggagctgcccatgatgctattaagtgtcatggtgtcttaaacaggttattcactttcacttaattctgattggagaatgtgtttgttgcttcataacttatgattgtagttttaaatttttgtatacaaacctaaggattatagatttacaataattttaagtatgaagtaagaagcagatatttctagtttgaactacatcatatgctatgtacatgttattgatatatatatatatatacatcatacatgtgagattgtttgttgtagcccttattaatgcttaagtgttaatatgttactccaatttcttatattaaaatgaacctttatactaataaagaatgctcgatcccgcaaaaccctaagcagcagagtttgaggcgcttctgcagttcatgttgagtttgggaaaatggttggaagaggggaaagaggaagttgatgatccgaccttcttctaaagtcagcattattgccatgaagaagcatggtaactttatttaatgttcacacttgtactttttttttttctgataaattatatcgacgagtttgagcatgtcgatgaccactgagctgggaaaattgttgttgagttgaattgaaggctcaaacaaatgtggggttacccttacctcaatttattggatgatcataactgtgctatattaaaaccattgaagtagatggttttgcctagtttgagtgcatgtgcatcaatagcattagtctggaaaaacagaaaaaccaattttattcttgtttctgttatttagtaaatccaactaagtgtcatctaattattacatagtctagccagccacatgtaccaagataatggttcttactcttgatcttgatttgccaaagtggctgtacgccgaggagtttactggccggttgttgtgatcactgttgactaatctgcttaccgaattcctcacaatttttcagttagtatatatatttttcttaaatttgtaaatgagaaggaagagaagagggaaatgacataggatttagccatttcttgagagccttctcttacattaaaaataacaaaagaaaaaggcattactttccaggcaagttgcattgattcccctgctgcttgcatctgttggtgcctacacttttctttcttcacctgcttcttggcatatttttgttgaaattgttatatcaattcttcttttgggttatttaggggctctttctttagtaacccttttaacatgatttgattcagttgaatcttttgtggtcttttactccaatgtccaatgatttgatgtagtgtgttgattgcattgtgttgatcttatcaacatatcatttgattttttttggatttaatctctgaaatgagttttgaatttaatctctaaaatgggtcgggtttaatgagattttggtcttttggatttaatctctgaaatgattctgttgatgtgaaaatggttgtcttatgttgcaatttgcatttatactgatgctagagaatcattctttgcaaatatgcatagatagatattcacagctccctttgtcagcgatgtgcttctggctcatcttcttgcatacaaattaaagatactctcattccatcaactataaatggtagtgattcaagtaaagaattttagggtggaacacaagcattgcttttcctgatatttccccataatagcttaaaggggtttgtttttacaacaaacatgtaattagttagtactaaatgtgatgctctagagctctttggtataatgcaagaaatctatcacattggccctaattttgtgactttccttggtgctctttcagcttgttctcccatgctcggctggtagataagggtgtcgagatctttagaagcgtcgattcagaacactttccgaaatcgaagatggagcattatatgcttgtgtagttgatcttttgggatgagtgttgtgaaaattaaagtacgtaagtatacgcagtcacacaagtaataaagtgataagcaagattgtctccgaaaatcaactaatcacaacttaagtaaatggaaaataatgagaataatggggtaatgaatcaaatttaaaagacctgtaattaaactacaaaaaaaaaatatatggctgctattacaatgaaaacacttgcaaaaattgtattatatttaaaagtgacttgaataactaatctctttagttaggatttttccagttgttacagctttctttcagcaaagttgcacagagataacatattttttttttgtgtttatgagattttttttcaaaactcacaaagtaagttttaccacttagttcaatatattcttatatcaaaccagattgcagaataaaaagagtagagatgagtagaagaagacaaatcctataaataagaatgatgaggcctccttttgtcccctttgtctttctccttaaatttgaagctctcttttcctccttccttttctgtattttttcttctttgcaattaattccttctaaaaatggcagttgagctaagaaaattgatgaaggtggttgtacttcattagttgttaggttattagggtacaatgtaataccttaaaatagaaacttatttctttccattcttggcctactaggtttgggctgacacatgagtgttgagtgttgatgtggatggatgaaattcattagttgttaggttattagggtacaatgttgcttgacacatgaatgttgaatttgttttagcatttgctcagcaattcaacccactttcagcatctatgcccactttggcttcgcatccttttcttttccttggtactttaactcttttttcccaacagcaaacaagcaacatttaattaaataagcacaactaaaaataataatttttacaagacttaaaagctagtttactaaataagaaataaagataaaaactaattaaagttaacaaacaacacactttcattactctttttatgataatttaggtttaaagccactaaaaataattctataccatagagttatcacaccccaaacttagagtattgctcatcctcgagtaatgaaaaacagaaacaataaaaacaaacgaaatagcaacaataaaaatactagtaacagagaggatacaactcatttagatttggcttagcgaagaaaatgctctaaaaaatatgtggaatggatggaaatgatggtagtgaatatgccttaaacctatgtgtctcaatcaagtttcgaatgttatagatatcgttaatgcctatgctgagcaatttaatcaataaagtatgcaaatagttcccacaaaaacctttgaatccctattataactaacttcgatcctcaagtttaaaaattttgctctcataagttgaattagtgcaatcctctccactaatgtagtctagctttacactcaagatcaaaaggactttattaggcttgtaatgtgaggcttaaattagggtaggataaacgttattatttctatggcttggaacctaacctcctcaatttatcaatggcctttctttctctctcaagctctcacccaaaatgcagttttaacccacaatgaatgatttgattcaactttaattctcttgctattgttactttccaactaacatataaacagagagagttaatacaaattaattttgaaaaggggtgatacaccttaaacttagtttcaagaaactcgctctcattgataatatatttgttttttttttttttggtactatatatatagtttctttttcattttttttttttttttgtctaaaatctgacagatatagtaaatgcatgtgtgtgtatatatatatagcaagagaattatgtacacaatcttgtgagctcattcccacatactccaacttaaatcccaccattgtccccaatgttgttacacaaataacactaggaagagctcaccacaatattaccaagaggaatccactcatctaacaactcgcatctaatttgttcttgataaatttgagagggtaagtttagttattgaaggataaaagaactcatgggcaaggactacaatcattgatggttgttaagaacatataggcaaatcagctcaaataagggtgactaagggaagttacgattcaacgggatagctcaaaaggctcaatcgtctaaaatggtctatatcatttctaagatgtaatgctagctaggatttttacttaaggaccacactaaacaattctactcgcaaaaactttctcaaagtgtcgttattctagaaaactcaaagcaaagtaggatattataagcacacacctacttagagaatcactactagcaagacatttagatatcaagaacacttaaaacaagcacataagacacaaagagatcaggcacatcacaaatagagggaaacacaacaatttccatcatcgagcgacatgttaaacaagactaaacaaacagaatcctctcaaaacaacagtgaacacacaataatagcaacaatactaattcagacaacaacaagatacagaacaatgaataaaaaaaaacaaaaaactaattaaaataaactaaaaataaaatgtcaaggcaagaaaaacccctcgagttactaagactcttcgctaggagagtcctcgtcctcctcaacagtgttactccaaacaaactagagaggagctcgaaatgatcaagaatggtggttggtgaaggtgaaagataagcgtgaggctcagggaagaagatgaaaatggtggatatgggggttaaggtgaagaagatggtgcggctaggtgtttcctggaaagggaaattgaaatgaaaagttgatagattagtgaaagggttttagggttaaagatttaggggtaatttagttaaataagtaaacatttatttcaacatttttttcgaaacccccagattagtgagaatagattttaaaaaccccccaaaaattctaacttcacatgctcccaggggctagagcattgcttagcatagcattttcttttgtgtccctacttcaaaatgctgaaataatgctaaaactttgttgtaaatcctggaaccaccttcttctaaaaataaaattctacttttcaccatatttaactaatttccatttttttgcaattttttgttttgtacgtgcaatgaatcaccataaccattgcaaagtcattagtaacaatggagaacaaaacaaaacaaaacatctcga

SEQ ID NO: 219865 - DNA, 5722 bp, Cannabis indica
taagtggtattattgtaataaaacaaagatgttaagtaaaaatgttgatgtaggcgtgtaggggtagaacagtaataaaatgtgcaaaatagatttttggtgtaaaaatttcttaaatatatgtaccgaactttataacacaaagatgtttaaaatttaaaaataatttgtaactcatgaatcacagtagaataaattgtgtaaataagcgagttattagaaattcaaaaagttatgtttctagtcattaaaaacttatataggactcatttatatcattaaaatgaatattgagacattaggtgtgaattggttatgagaaaagttacaaaactccatatttggatttgttgaaaatgttggcaacatgtcgcctgaaagtattttttgtgaaaaacttgtgaaacatttcccaatgcaatgagggtgtcaccaacaatcgataccaatgtttagaatcctatttattctcatattctgactagtaacatctatgggatgtaaacaagcttaaaattcaaatgtttaccaagatttttagaaaattaattatcagaaattaaaactcaagaaataaataattcaaagagagaacataacaacacttaaatttttttacgtggttggacgttaaagagccttagtatacaagtcgatattattatgtattccagctagaaaagccttttgaaatacaatgagtatacgttttctatttttgcctaagaaaatattgcaagagtgttcaacccttaatccgaaggattttgtgagtatttatagagtttatagaaattatacttattttctctttccctctaatggacagttttcataaaacatacacaagttcaaagttgtattcgtgaggcccaaccgatgggacgatgagtttcttaaatagggagattaaacatggtcaagttgtcattaccgtgtcctttaattgtgggtaattaattgtaaattaattacttgatcttcattttaggtagtttccccttttaacttgatacgattttttggctgagatttaaggagagttaattccttattctgtccaattgataaaaagagaaattgttctaggcttctaggaacatgctgtctgaccttctagaaatgcggtactgggactgcttccagatacaggttatccttggcagaagctttgtctgaacgagaaaggtagataccttctttgagggtcttgctggacttgggcttggccccagttaccttcattgggcccactggtgcgctttggatgctgacctagagaccatgtatcccttaccgaaaatgcaaataacatttacctccaagcttatgctatttattgtggaaacttgtcccaatccatatgagtggacatgtggaggttaagagtaaaattcttattgctttccaggttctagttgatcgcagaaggtggacttctatcttcagcttaaggaggtagacgtggcagtcatctagtggtggaggagttcgtttacctaagagttgctttctagaaaagtttttatttcaacggttctttattattagcacatgaattaagaaaagtactttcataattggttgttggactttcaagccacaggatatgtttatgcttttggagatacgatctggatcgttcatttttcttcatgtggataaccattttgagtataaatatccctaaaagctaccatttatcatttttcccatttcaaattttcattcacccaagttcaagttttcttgagagcaaagtacggtgaaagattttagttgtgaatgagcccagatatctcctttaaattgctttttgcattaaaaattatattctaccgaaccatccacgcccagtgatcaagtgttttcagaggagtgacctggtgaatcttgattttaattctgaaatcaattcattgattgccttagccaaccgtattcgtgaaaggtgtgctcgcttgcactatctagaaccaacaaagatcagttgggtgcctttttcttcatgaccatgtatgggcttgtttatttttttttacctttaattgaatttctaattccactgtagaggttagggattgcatgttttttcttcaagtgaaattaggatttcttaggcctgtgaccaatactgctggtagtttttaaatgtgatgaattttactaccattgatttttagtcttagcaatttttgggaaatagttgtgttgctgcagaaatgctggaaatttttttttgtgcctaggatccctctggttctgggtactttgtcaatttcttccttattcttcctcttaatgttcctgatctcctatatggaacaaatgacccctgaaggttttcatttttggatagtaaatctagtggggacctctccaagcagtttatgggggaggatttccctacttcctctctatattaggtagtttaggttgctaactgcttggttttctttctttcgatagaaatcatgtcgaagaaggtccaacgagaagaggttgagctggaagaggagggcatggagcaagagaatgctccaaaattgatgttaaacgacagtccatgggaaatggactagtacattaataaattaaggatttatggtaacctccaaaaatacgagatcctgtgggggcttgaaagtattctggggttgtactggaataggctctctatccatagagagaaaccaagtaaatgtgttgattggggcttcgacatttggagctgggtccatgtggagatgggtgcatagattccgctaaggtgttacttcactaatttctgtgtggtggtcgaagttgtgcccttctagtttatcccacaggtgtactgtctcctatctaaatggtacattttgtgttcacaacacaagaaagtagtaccaacacctgaggagatcttgtatttctacaagattaaatcttaacccatgaggggtaataaggagaacactgtcttctacaggctgtaaagatactccaaaaaggtggcctacacaatcagttaagtgaagtatgcacacgacttttgggactattggttctatacttccagcttctcgttgaggagagttccaacactcagcttggactttaacatagccagtaagtatttgattttcgtccttgttttacttcttgtctttacgaatcttcatattcagatgtatatttttattctttttagattgcatttcacagtcgcctttgactccgaagttggaggaagaaaattaatttataaaattccttgtcatccaaggagttacaggtggcccaaattgtaaccaccaagagtctccgtgagcttggccttatttctcccccaaagcatcgatgcaatttcaatgaaggataacatccaagagttgatttgaggagactatgatgatgtgaaagaggagattacagccataactgtagcgaaggccttgaaggctatgaaggttgacgagcaatggttggctgactggaggagcaaatttttagaagagataagtgaggctaagagctcactatccattttggagatgtagttcggaatgagggtactctaggagagagtaccttcaaaagtggtgagacactctttcatgtaattagagttccatccttggaaaatttaagtaatattgaccagggtggattcgaccaatatttcttagatttataccatgataagtaccctaacactgattacatagataaggcagtttgcatagtgagaagtccaaaccacttcattcctccaatacaccaccatgttagaatgaatgtatttagaaaaatttactttctagggttcttccaatatgagactaatttaggttaagaagacattgtcgtttttggtagagaaaaaaccaattatgctaagataaaaggtttggatctttttggcatgttgtttaataattttaattgtagttacatttgatataatctgacatgttaccactttatttatttttgcaaaacaacttgccacatattagatgggcattttaaacaatttcttggatgccatcaactctagggccaatgaagtctgtgaggtggctaaagacagattgaggaagggtaaagtcgcacaagtctccaggagtgtatctcagaagccaacaccatcgaccccaagctaagaggctgctctgaaggctccgaccacaaaaaatttacctaagatgaagtttttctctaaaaaaatctacccatgaaaatcaagagaaatcatctgcacacaaaaaaatatcttttaccattcaaacttttaacctaaattggacccatcagattcatgtgaaaaattcaagaactctaaaagtgttcacataaggtacacttctgtgagatatttttggttgattgccaaactgacatgttccacatttgcttacagcttctttacccaatttaggtaattctggaacaatccctgcactggataattctttcagatttttgtaatgaatgtgtccaagtttttcatgccataaatcagtggtgttatcaatagcagagtgacaagtagcatatgtagtgatggtgtaacaattatcattagatttcaatccttgtaaaatagtttcatcacgattattaagaacatagcaatgaatactataaaaattaacagtgtaacccgatcacaaatttgactaatgctaaggagattaactcttagtccttcaactaacattacatttttaagcctgggtagaccttcaaaattaagagttcccatccctatgacttttccaataagaccattaccaaaagtaacttctccacattgcattggtctaatgttgtcaagatagtcttttttacttgtcatatgcttggaataaccactgtcaaaataccacatttgagaagcaatagatttaaaacaagaagaaacaaccaaatatttatttttgacaacccattcttgtttttgagaaacatatttatttctaaaatatttagaattaaacatgtttttcattgtaatacatctaggtcgaatgtgacattttattctacaaaaatggcatataggaatgaatcgattcctattttctttcggattgccaaacttaccaaacttgttcttttttgtaatagcaatacattttgctatagagtcaggatcctgtaaagtaatgttaaaacattcagaaactaaaattttaaatttgagaaatttagtatttgatttggattaagccttaacaaaacccaaaccagcatgactcatttgtcctgaattttgaaccttttcaaaaatattagaacctggatttaacattttaacatttcttttcaattttttaagttccttagttaaagatacaaatttacaatttcttgaaatcaatttagattcacaacatttatttttctttgcgagatctttgatgttatgagataactctttgttaaattttactaaggaaagattttcatcaacaatttgcaaccacttaccaaagattaccttgtaagattctgccaatgattcgttatcaagttctaactcatctgaatctgaaataacttctttatcattatgaacattcaaagtgttgattaaacacaaaactttttctttttcctataaaaacacttgtttaagtaacaatttttttttcactattttcaaaatcatcatcactccaagtaacattaaaaccctttttattctttttcaaggtattagcacattcagatt

SEQ ID NO: 219866 - DNA, 3766 bp, Cannabis indica
aactttgtacatgtactaaatcatgtcccttgaactttcatcaatgttagactttttttatttaaaattagacaaaagtccttaaatccaacaatctcaatagttcaggggatatttttaacgatcttaaaaatttagggagcatgatttgatacatgtcaaagtttaggggacaaaattagtctaaaaattggagattttacacaaaacactaaattaattcaattattacatttataataatgttacacaagtatttataaatttgtgcttctttcacttttctttgtttgttggaggttttaaaatttttaatgctatttttaaagtcaaattaattaaaataaattaattttaattaaaatatttaataaatttttcagtaattagtattgataattcttttatttataaggaaataaattaaaaacattttacatttaatttattaattttttaattaatttataaattaatcacaactatttaataataactaaagtaaatgtaattactgaaatcttctctaaataaatatatatatcttatattaaatatagttatttaattcttaccaaaaaaaagaaaaaagagagaaagggaattttacataaacatacatcaaattcaaaataattataaaaatatctcaaaaaataaatattaaaaatatagtgtcacgagatcagcatatagatacctgattcaaacttaaaatatagtccgggtcctgagtcccaggtccggatctgggtcccgttccaagttcgggtttgagtccgggtccgggtctgagtctgaattcgggtctcgggttccgggtccgggtctcgggtttaggtctaggtccgatttgggacccggtctgggtggtttcgagtttggttccaggtctggggtctgggtccaggtctcgggtttgggttcggtttcgggtttgggttgaatattggtgttgaccctgaatcttttgtaaatatataacacaagcttatacagaccatttgttatgtattaaataatacattatatattaaaaaatttagtcgtaataattaatacaatacattactttatccaaacatatatagtgttatttattatttacaataaaatatttacagtaccaaacaagtcctataactttctaaatatacttgtaaaaaccccataaaaataagaatcattataacatattctaaagtacaatgtaaagttgtaacagaattacaaaaaaaaaaaagaagagaaagagaaatgaacgtatctatacattctctaagttcgtatatatattcaaagtatataactaattaaataaataattgaataatatatatatttgttcagaaaataattgaataatatatataaatatatggagctatatatatattgaataaataatttcacagaattgttgtagtaattgggagagacaagagtgtattttgggaacaaaattaggttataataataagctccacgtgaaacacgtaccaagttaggcctacgtaccttttttcagttttctttcttaactttattataatggtgtgccatactatacatatatactatgaatttcttccattcctatgtgaactttttcttccttttcatttcttgatggaaaatctcatgattgcttatatgaaattaattattaaaagtttttcaaagaagtaattattacaaaataagttacagtattgacactttcccaatccaatcattatgattagctatagcttgattatcgccagcctttgccctaatttggctttctcgtacgtacgtcccttctagaatatttttgtctacgtggcagggatatatatatatatatatttctcaaatctaacatcattaatacagttaattaatcattatataatagataaattagttcagttaggtggtaaatataagaaaattaattatacaaactaaccataatttctttgagtgcatgcatttgtttgtgtatgaaacgtttcaaagtcttcttttaattatctgaaatattaatgataccatcgatcttaatctcataatattccttctacatttatatgtaatatataattaaggtgtggtactttttcattatcgaccaaccgtataatgttgtataagaagcgaaccaaagtactatacattaattaattaactaatatataattatgatgagtctaaattaattaatcttcggaaaacaaattaattaaataaagatggatgagttttttttttgtattgtgatattgttatgaaagatattatagacttaacccaacctaataaaattggcttattgaagaggattacctatcttatgtctcattaacttaattaaccttttacttttattttattaatatatattgttattatacatcatgcatatcaataattagccaattacaattaatatttattctctgtatgcatatgtgtaggaatatctttctaggatatataatataaaattttctaccgatatattttgtaaaacgtgatcggagtcaagatcatgtgtccctaaagtaattaccgaaaggtagtgaatacagcttttaaaaaaaaaaaattgctgtgtttttcttacggctcgtttgatagatgatataagtctttagataaaataatatattatactatttaatactatacttatattataatatttataaaaaaattcggagtcaattccaatctcccacctagatttagagacccaatggattggattgggattgggacccgaacctaaactaattagtcccaagatcgaacccgaatccaagactgggacctggcccgtaatcggtattggagtcaaatttattaaaattaatatattataattttacgtaatctattaatacactaaacatagtattgtattaaataatactaatacaatataatataatacggtatactaaacgaactcttaaaagatcatcaattcctaatgaaatagatgtagcagtcgcttaccggaaccccaaagtctttatttgatctaggatgtgagatgtatatgtcattccgaaatgatttattaatctactaataagtcgtttaatggcagttccatctttgaataccatatactataatatcactgaaaatattgttaaaatccttttacgagaaggttttattgaaaacatgaggaaacatcaggagaacaacaaatactttttagttttaactctacgacatagaaggaataaaaaaaggttatctagaactgttttaaatttaaaacgtatcagtcgacttggtctacaaatctattcaaactatattaaggaatcaaattggatattagcaagaaaagctcggtaagaactttcatttttaggtagctaaatccgatttcatattcatatcgttttttatatttgtagttgctatagttgttatcgattgaatagatacgaacttgattacgtagcaatagcacatccctatatatttaaatatttaatagttccattaaaatataaatagttatatttttatatgacttgttataatagtttatatataggtaaaaaatttatttttaaatttaaataattatatatttaaaataaattaaatttttaattaaaatatttaataagatatttttcacaactaatatttataaataatttttaattttatttataaaaataaataaaatcaagttatagtagaggttataggtaatttttaattattttatttaattttaaattaatcacaa

SEQ ID NO: 219867 - DNA, 3058 bp, Cannabis indica
  modified_base (2839)..(2839): a, c, t, g, unknown or other
aaagagccagccccctagcaagcccaattggattcacaacaaacacgccctcaaagccaagaacacgggccaacccatcaacttttgatttttgacactttattttacacaagaatataagactcagtttattttgagagacaatctctcttagaaattaaatagtccgttagttcctaagcctccgacaattctagtttaacacattcataatttgtgatgggcctgagaaccagcacccaccccattcaagtttttttggaaaaatatcttggcccaccaatacattctcactaacatgggatatttccatatttaaataagtaacattattatgtacaataaagctcaatcctacctcttcctcactattaggcccatttcgcttgttagagcccattcttcttcttttaagatcaataaataatagtccatcatttgaaatatcttcatttagcgccactaacttctccccttcgttgaccacccctgtatcaagggatttttctttaatttctaacacaccatatcctggtattaaactttccccatacaatcccacattattagtttttgtattaccaggctgtaataaagatccttgattgcgaggaatcaaaggacgttgaccatcattcctagctgtcatcagagatgaccgttgacggccaccattgttgctgctctcccatctttccgttgaagaactagattttgtagccaccccaatctcagccatttagaaccattggcatagtgacgtcttcttggtaaagcttttaactcaagatcatagcttttaatgatttgatcttttggcatgtgaaataacctttcgtagaacctcagagtgcccaagaactccacatatgaagcagaatgtaggtaaatcctcatacttaaaggtcacgtagcaaattgggccaccttgtatttccaacttcttctacttttttagtagcataacaacttgaagcttaactcgaatccttagataatcacgccaaatgcctaagaaattattaagtaccaatatagttaccaacacctcttataattctttttgacataagtccaattggcatattatgcaactggacccagagtttaagtttagtaaggggcacgaggcgtgggttttccccttttttaacatgttcaaagattaaaggggcttgatcaaacgtctatatgctatcctcaatataactctttcgatatccacttcatggtaaaactagaataagaaaagatagaatcattcattatgaatcaagatgacaaagatacaatctttatataagcactgaacataaaacccataacagaaagacagttagaactaatacagatgtcctaacaacctttaactaactcctctaacagctaacgaactaggtactcttaacagcccccctcaagcttagggtggtgaagcaagccacactaagcttgtcacgaagaagagagaacctagaactagagatgggtttagtgaggcaatcgacaatttgatgtttagcaggaacatgttgaacaagtatctctttattcaacactttgtcacgaacataatggatgtcaatgtctatatgctttgtgcgtgcatgaaaattggattggctgaaagttgcacaacactaaggttatcacaccaaataaccgggagagtagttggagactgttgcagttcagatagaagagactgcagccaactgatttcagtgacaacagcagcaaggctgcgatattcagcctcagtcaaggatcgggagaccgtttgttgctttttggattgccatccaacaagattgccaccaaagtaaatgtagtagccagtggttgagcgtcgatcatcgggatcagatgcccaatcagcattacaaaaggcttcaatttgcatgttcgtggggcatttcatgtgtaagccatagtcaagagtgccggctaagtatctgataattcttttgacagccagaagatgggattgaagtggggactgcataaactagcacactttatttacactgaacgcaatatttggcctggttaaagttgcatattgtaatgcaccaactaaagatctgtaagccgttgcatcagctactggttcactcccaaaattaggcaatcggaggccactgttcataggagaactttgtgtcttaactcccgtgcatttcagtccttgtaaatttgtcttggatatacttttgttgagaaagaatgacaccatttgttgtaggaacaacctgaatcttaagaagaaatccatgatgccaaatcctttaaagcaaactgagtagctgaggtcagatactaatttggagacaaggttgttgttgttgccagtaattaatatatcatctacatagatgagtatatagatggtggtagtgggagtgatgagagtgaacaaggattgatcggttttggctgaggaaaaaccaagctgaagcaaaacattggacaatttttcaaaccaagctctaggagcttgtttgagtccataaattgcattgtgtaatttgtaggtttagttggatgatcgggatcaacgaaaccaggtggctgaaccatgtaaatgtcttcatgaagatcctcattgagaaagacattgttgacatcaagttgcctaatggtccaacgttttgataaagcaatagtgtgcacaacacgaatagtgacaggtttgacaatcgggctaaaggtttcatgaaaatcaaagccagcttgttgatgataacccttggccactagtcttgcttttagtctacttacagaaccatctgaattctactttatcttgaaaatccatttacagccgattggctctctntttggtagtaaattcacaagagtgtaggtcttgttctttttgagtagccacattctcttcagcatagctacatgccatttggatcatccaaggcctttttgactgatgtgggaagtgagaagccatgagactctaggtttctaatgcccgatttagctctgttttcataggatgtgtgttggcacgagtgttggctcgaatgtgctgaacccgtggcag

SEQ ID NO: 219868 - DNA, 3472 bp, Cannabis indica
cccaacgttgactttagaccatcgttatacttgatagcccaatcattcatttcttggaagcagtctccagaagagcttttcctcctttgtgccgggcagcacccaattggccctacaccaatcaccacaaatttccgagcaccataactgtgtaatttctgtgaagtaaaagagacaaaaaataaacaaggttataaaagtatgagaaatttctttgagcattaggatcactagtaggtggacgtaccttgagttgttctttaattgtaacaatcatttcttccacatactcttgtggggtagttcgattacgaagcttggaggagccaaagtatccaaagaggtcgttacttccaatgacaatactgaataaagattttgagagatgttgctcagcgcttgtgggtcctagttgctgcaccagtttgtcatgtacaatcgaatagtactggacttgcttcgttaaaggtattgattgccgctacaaaattcaaattcaagtataatttattagtaggtttgtttcatcagcggggatagctcagttgggagagcgtcagactgaagatctgaaggtcgcgtgttcgatccacgctcaccgcattccttttgttaattttctccataataacagatgacaaatgagagataggattattgtaattcacttacataaacttcgtctgtgccattaaaaattcctgctccaccggaggcaaaactagttccgtttatcaacaaagtcgtgttctttttggatttcagagacagatatggtggcgaagttggcaatcccactttctcagctgctcaagaacaataatttcaaatattttctactatataaataaatatctataataaaattaaagacaataaaaacattaatttctataattcagttcactcaaaatgggaatggcatgcatatttttgtatacacgtggacgtggtctcagctcttgggtggcaaacttttaatgttaattttatcacattacttttaagtttttaactagcggtacttcaatcatggaattcaaagaaagaaaaaaaggaaaaataaaatataataaaataaaaaagagtgccttcactgaatgagaggctcaccgctcattcatgtgcgtagacaaatacaatctaaatttcgcggagcaagcccaaatattaggagggaattttttttctataaaaggacacttataaaaaaaaatattatttttattataaaaaaatataaattttatagagactaaaatagatatatatatgagaataaatataaaaatatgcaaagataaaaataaaaaaatatataaatttatatagccaaaattataatatgtaatggtaaaattaaaataaaaataaaatttattagaagaaaaatataaatttattaaaaaatacataaaaaaataaattttaaaaagatcacatgacccaatcttcctcggccataaggcaaccgaaataggtagaagtactagttggtagtacccatatgccttttcaaccttttgggatcttgtgacccactgaatacagagtcctcaaccttcttttgttcaattaaattgtgacttcaaattaatctagtcctccaccatcatttttttgctagtatatattaatcaatataaacataaagctaaatgtacacagatattggaatatatatatatattaacatatttattggcatagaatagaaagaaatactgcaaggtcgaaaatgtgtggtcataggaagatctgttatccttgcaaaagaaagctagggaaaaatgcaccgtacgtttattattttaaatatataacgggaattaatttattattttattaatcaagatatataaatatttatcttgttttcttgataaaatttatatacaaatagcagggcatacagacttttattcatttaacaataacatttgtagtctgtgttttaatgtatttatagttaatggagttttataaaaataatgataatggataagaaactaacgacatatatacacaacaaactcatgatataggaagagaagtttatcaatcctactagcatgtatatatatgcattacaatcgctctctatatttagttatatgttatacatagaatattaaaatttgtatattataaataacagagcatagaatatatatatttatatatgtacctagaaaatctgcagcattccggccattacagaatcttccggtagcttttttgcctggaaaatcaacgccgttatgaggaaagttagccttagcaagagacaaggctaagtgattgttgttacccacatcgactaaggagtcaccaaacacatacatggctggagccgtaatatgagcttccgaggaggagtagtggaagagattaaagatgatgtagaagaaaaataataaggaacccattgacaaaatgttgctattatttttactagccatgaattatttttatttaatttcgaggagatttatttgattaagctaggtatttttctcttcaactccaaccataactcaggtttattgaatctaatctaatcaaataaatgtgtatttgtggaggcagtgaaaggtttcggctggtttggtttgtttatataatgagttgatcgatacacaactagtgctatagcttctatatgtgtggaaagatatttgcaaattttaataccgcgttgggtccactaatattctcattttaggcctcacttcattttcgttgaattgatgcactggttgaaatttgatgagacaactccatatactaattagagccattttatatattttaacacttaatcatataaattgattttttggacggcaaaatctattcacatcttattcttttttgttctttacacttacatctaaaaactccagtgaagtactacaacgtactgcccacgtctatagtagtatacacgtaacaaatttttaatagtctgcataatattaattattaaaatattataaaaaataatttaaaacttataaaaataaataaattataaataaatatatatttttttcttttcattctttttctctttatctccctgaaaccctttcactttccatagaccacacccactaaaaccctagctcttttctttgtggggtagccttcctctactaccatcggtaatccttagcccaaacgggccacaccattaatattatccccaaccccgagaaacccaaatccccaatgactccctctcgtgtcctatcgtcctatctctcttcctgatgaccgatcccccatttcttttttcacctctctctttctcatcgacaaaaaggacagacagaggtcaatggaggtcttgggttttaccttttagacacatcatctcctttgttgggatccatctttctttccttgcaggtcaacggaggttggagctttagctaggctttggtcgatgatggtgagggcttcgcct

SEQ ID NO: 219869 - DNA, 2551 bp, Cannabis indica
agagagagatagagaaagagagatgagaagggtatgatgtagaaaacattaagcatataaatataggtatggggagagagaaagcacatgacatttcctattgttgcgccgggtataaggtttgtttgtgtgtgtttttatatatatatgaatgaaatatacaaaagaagattcttttactataggaaccaacaataccggtttaaaaagcatcttcaatcttcatagtctctttctttggtaatatacttcatttatttgattatataaatatgtttgattcgtatcatcatcatcatcatatcatgcatatattgatgcctacgccgtctgttagcttgtgattaaagatgagtttgataaattttggtcaaccatattaattgtgtatagatctataattataaattaccattaaagaaatcaacacaaaggacaaatttagtatacaataatagtttatatttgatcatgatcattattaggcagcggaggacaaaaggaattggatatataatatagaacaaggggattaatttcttataatagtaattgtgtattaaatatatatactaaatttgaaatgttgaattttgtactatcttttcggaatcaatacaaagtatctagagcttttaattaagcatgatgacaaacaaaagctagctagtaagctatatggtatatacatattgtagagtgtattaaagccattttcttccttattacaaaaaaaaaaaaaaaaaaagccattttcttcctcttatcactgcaaaattaacgcttcttaattgctgcaatctcacgatacaaatttatatggttctttgcattcaatttggtcaccataacttcttaatttggtcgaaattaccaattctcagccaaataaattatacaataataattaaacttgtacacatttttagtgcacctaattcaagctaatcaacttgtgtttataaattctaattaaggaaaaaaggatatatcttctcataactaattaaccggtcctttgccaaccattctcatacatttatttatttattattattatgattgttatattacaactttaaatatatagaaaatctttggggaggaactagtaataagcaacatatataattttgaagtgataaaacatacataatatataattaaagtaacaataataataataataataataaaaaggactaaattcaaaaattaattaattgcttgatatataagtaagctaattttcaatattggtagctttaattacggtggaaatcacgtactggcaaaggatgggtatgttctctgtattttgcatgtgacaccgtttttattttttattttttattttttaatattatcatttcaaattgttttgttattaaatatatatatcttcgattatatatatataattaataagccgagctcatgagctactcagctacctaggctttgatatgtttcagttgaggctatcacacccgtagaaatagttgctgtaagcatcttctacacatgggttttggttcgcacttcaacatcagctctattcatatatattaaaaaatttagtttgatgttaaatttaaaaaaaaatcacagtaataattcttgattatcattttcgtaagttcattagttttttttttttaataaatccgtttactaattcaaaaggttaaaaatataatttaaattaatttaaaatttataattaaaataaataaatacattataatatttttttggctccccataaaaaaaaccaccaactttcacatgttgtctagaacttctctcaaaatatatatgtgactctttaggtggaaagcaagtaccaatagtagtaggatttatatttcagaaaagcctgtaaagatattttttattattaaataaagagtcaaatatttgatatatgtatgaatgttaaattattaataattaatattaaatatcagaaaaattccttattcatgtatgagattgtggcttgtagctgtatagagaactaagaccacttagctatgaataaacaatcagtaacatattaaagttatagaatctttaatcaatagttgcaagtacggttcactgatacatgcccgttcttcgatgtaagtaatcttggtttggattacagatgtaataagacatcaaagtgaatgtactgtgtttataataaatattatatatgacaaaggacctatatgaataaaactgtctttattaacatgtcgtttatcataaggacctaattcttatcataatgatgatcaatagtagatcggcctaaatcttaagttatcatgaactcttgttcatgttattagttttttttgatttcactcgttaaagtttatcagagaagatgattcttacaatttctttttagaaatctaataacatggatgactgggaacatgatgtacaattatagaatactaactttcctaaatgatcaaatagttggttccctttaacgtgttaattttggtaactggaatgttgttgcacaaatttaaatagtagatcttgaatt

SEQ ID NO: 219870 - DNA, 2164 bp, Cannabis indica
aacaccagtgaaaatttaacacaatatactgcagtatgaaacttataaaaaaatacaagtaaaaaagtaaaaactaccgcctgataatatttttaataaaaaataacaataacatgtaaatttcccaattaatatgcaatgaacagaagaaagcccatttattatgtgtctgccactcactcagtgaaagtaggtggagtgattgacttgctattaatattccttgagttagtattgaactattgaatgagttggaattattattgctataataataaacccaacccaattataatacaagctcttttctaattgcattgttagctaaaaaaaaaaaaagaagaaagcaaagccacttgcaattgggattaggatggtgggacttggttggttacactctctatctcttgtctatataaatatagtgaaacacaaatgaaaatgttatttgtgattgaagaagataagaaaaatgataggtgctgtctttatccatatatgtaaacgtggacgtctattgtgatggctagctactcctatgactagaccacattacattttagtacactatcctaattacgtaacacccaaacaaaaatacatatatatatattttgtggtaaaacaaaaatacatattgaatgtgtaggatagagataaggggagatatagatgtaatgtttttatgagaacggtgatatttcatatctttatttggtatgaggctttcttttcaattttttttagataggtttcaatcatttttttttattttttttaagattgatgcaattttattaataagaaacacaatcagaattagaataaaaaaataataaaaaaaataagttaactaatcagccatctgattcttgaattattttttttaaaaaaaaattaaaataaaatcaaataaaaaatattacagcattactattgtgagaaacagaaacaatcaacaacttacgattcagtttacggtaccaacaaacactaaacacaatcaagaaatcatatgctaagagatcacaagattcaagtaatgaattaagcagtaaaataaaaaagaataacaccaagtttaacgagttcgagctatgtacaatgctctacatctcggttggaatagcagcagccatatctttgttgatatcagtatttacaaggttataagaattttcacacacttctcagagattacaagaagaaatttctctctagtctagactctctgtcactctcaaccttacactatcacgatttacactcaagctatattggtctaattctcaacacaggttacaaagatttacaactatttatagatttgcattgttgccaaaattatctcctaaatcatcgtgatacatttacaatgccttaaatgatccagctcatcaccaacaacaataatccacgtcatcttgaaaattacgcttttagtacagaaaatctagaagctttataaacacacaagcctttcggatacgtacatgacttccttcttgaatggaccttcaagactaatagtaagctgtccgggagtttaccttcggattaataacaagctatccgggagagacattccatacacgacacaagcttatctggaagtaccttccagatgctacaagatcttctgcataggggcttttcgaatccacactaagctttcggtatctgctcttcaaattaaaaacttccaccccagatgacaaaacttataaccataaccaacaaatctccaccttggttttaagttgaaggcacttgataaatcattattttaaatgttgttgtcccctcagcccctctaggctcaactgactccaatcagcttcaggcaatgctcaaactcgttgtttggcactaccttggttatcctatcagaaggattgtcttcagttagaaccttgacaatcttcacagcttctttctccacaacctctcgtatgaaatgaagcttgatattaatgtgcttagtacgttcatggtgcacacaattcttagttaattgaattgcactctgattatcacaattaggggtgaaaatcggtcggttatggtcggtttttaaaattttataaccgaccggacggttacggtttttattttacgaaaaccgtaaccgaccgtttagaaattataaccgtataaaaccgac

SEQ ID NO: 219871 - DNA, 2474 bp, Cannabis indica
atatggcgctatttcaaataatggaatttatctcaaaaaaaataaaataatggaattaatacacatatgagtccacctcaaggaaaatacaaattaatggcctttctttatatccaatggagtgagggaaatatgggaacagagtcaataacacttttatatatcatgaaggacacaacatagtattactcatcaccttttttcttcaacgaaagccaaagacaaaattgtaggggaaaattaaaagaaagaaagagctttattgtttatgtttttttataaaaatatttaataaaagaaaagatagtgagattttagttttgttaagtcactgttacaaaaaagcttagttgagtactaaaatggtgggttgataaactttattgtctcatgggactgtgacaacccaaactttattctacttatgccattgttcatatttatttattgtaaatgaattttctcaatgattctagagaatattatattaattgattgtagaaaatatgaagataatctttttctttattattttttatttctggaacatcagttcaaatatgaagataactactcttttacttttggaatttgggtgctttttgcactatacatctaattatcaaaaatgcaaagcgcctattagtacctacctttttctccaaagagaaaagaagccttatcacttttttctttttaatttttcatgatatttacagcaatatattttttctgaaaacatcaatacattaagaatacaatgtttttatatattagacaatggaaaatgaacatcaacaatcaagatgaaaatattaactctatgttgtttggtattacccaattaagtctgaaattggatgaattgaggaaaaaatgattagtaaattataaaattgttccatacctgtttagatgtaggctttttctctttaaagtttcattaagtccattttgccgccaaccaaggtctgagtttttactgttaacacttaagttagttgcaagtctgtaaaagttatatggtcttaatagtttacttttcacttgcttttctgttacaattgtaacaaaatatttttgtgcctataaataaagcttctatcaatgtgagatgatgcaagttttactgcattgttactctcatttttcgtttctctgccttatattcttggtgctctgctcaagttctgttgttcatataagttcacatggtatcaatcgccaatcgacattgctaaatgtcgtctttaacctctgatcctggtgctcccatggctactgccaatgatactgctgctactcaacctaatcaaaccatgcttggtccttcttagaatactttttctcactctctcacatccacactcacgatcaaactcgattgtaacaagtatctttcttggaaatctcaggtcataccaactgtaattgatcatgatcttgatgaaattctattttctggccttcctccacccaggaacctcgtcaatggcgattttaatctgtaatacactcagtggaagaaaaaagaccagctccttctttcgaggctatgttcctcaatgactaaagtcattcttgcctcagttttcttcctcaaggcacttctttaaggtgttcttaaggatttttttgacaacttctacctacccattttcttgaggatatgcaacggtagagaagcttttgatgatgacatgcttgttgcagaaattagtgaacatgttacgattgaactgctttccattatccgacacaatcttctgtggaagtccaaattgacatatgatgttttttacaacaaagccaagaacttttttggaggtgattgttgccagaggtttagcttctgcccacttagtgaagtagtctactacgactacagcaaattgtaccccttattttccctttgggagttgaccagttaggtatatcccccacactacgaagggctaaggagattgcatcatcgtgagctcattgggtggagctctcttagaattttcgagaatctctgacacttgtcccattttttgacgtagtccattgagtcttcgatcattgttggccaaaattacccctatcgaagtatctttttggataggcttttcccccgacatggttttcgcagaagccttcatgcacttctatcattagtcgctcgacctcagcctagctgacacaccttaagagcgacattgagaagctccatctgtacattactccgtttacaattagatacctagcacattttcttcttatctttttttcttcattcttcctttctgacaaggcttaagtctggaggtaagctgcaataggtgtcatccatgttggactgccatccgataagtcaacttctttagggatggtaatgcttggtttttttaggaactgcattggcaccaagttgtccttgtcattaatggtgctgcttgccagatgggtaagtgcatctactatagcattct

SEQ ID NO: 219872 - DNA, 3621 bp, Cannabis indica
ttcctattcctattcccattctcattcctattcttatataatttgttagctttttttataattttattaaagtataataattgcgacttaatattaaattgtaccacgaaagtattagataatcatttaataatatttctctttacaatatgatatttatctttaattcaaaagaaaagaatcatatataaattaacataaggaatatttatttagtacttttcattgttataaaagatatatttagtactttgtatttttaataatatttaattggtattttatattttaaaattgttacattttagtaatctaaagtaaaatttaattaattacaattttatcaatttaactaaatagttctcagttatatgtaattaaataactaaatttgaattcataattcataaatacaaaaaaaattaaaatttaaaatattaaatatatatatatgattttaaaatataaaatacaaaaaaaaaatattattaaaaatacaatgtataacttatttaaataaaatacacagtaccaaatgggtaaacacccattaacatatgaaaaaacatgttcttttacatttcgataacaagaggctagagcacaattcaactccatatataacactttataatctatatatatacattatataaaattcatataaaaatgaagccacacataaagttgacacgtggcaagtgatgggcatgcgtgtatatgatctgagagtattttgtatacatattatatacatattataaatatagtcaaaggaagaaagttattattattatttgattaattaattcactgtcaagtaaggggaaccatatattttggtgtgtcggattgtgcaaggtgcaatttatttttgttttgttagtacttatcattttatataattttataataataatagaccattttttagattttccacattagtggttatgataattaagctgatttatgtgatggttataagtaatttgtcttcaagcctcaaatttcaaaccaaccattcatctcttgttgctagtagtttatatatattactcgtcacatcatcaatcatgtaaatatttaattttaaaaagaaaatagataagaatatcaatgctactattgcttttacaccacacttgcagttaaatcattttaatatgatagttatttaaaatatatagagaagagatttttccgtgttcaaatgttaataaattttaatttacaagtcaatagcattaagtttttataatagtaattataattggaattattggatagagtttctgcactttaaatactaagtttcaaaacccccttcatagtagtggtgagactctatttatagagagagtcatgcaccttgggttgaactgaaccgggcccaacaaatgtatttggtttatacctggcccactattggtgcatttacaaacatgtagttagaattttgtcaaatatatagaatgggcttgttgttaaaggcccagtacccaaatattgcagacaaacactgttcagtactacgaggaaattacattgtatacccactttactttattttattttaatttttacctctattttcatatttttttagatatacccacttttatggatgatgtttccataagaccccttagattatgtaaattatatgctagacttaataaagagtgagggtatattaggcaattcactcattaaaatggatatattttaataaaagaaataatatgagagtatttttgattaatgaatacaaaaaagaggtatttttcaacttatctctattactattgacatagcccatgcgtgagccgccgcatggagcatggaaaatgatcatgtcagagtagtggtcgtggtaatcccaacgttaattaccttcttgccaaacccatttttgtgagtagatagaagagacattctagcaaatttggtgggatcgtatcaaagttatgacacgtggaaacatgcctggaccattaagcgaccccggggagcaatttgcttccaggtgaattctcgtcctaagataattttattatagttccgcatgatttaaattgtttgataatttcaattggtaattattaaaaatagaatttcaataggtggtgtcaatgttcttttaaatactcttagtctacggggtcaggctcagagaatgaaatcaattagtaaagtctcaaacaattacaaactacaattgacttaaacaagtttagactctctctaaagttttgccgcaatcctttataatttactttgccaatctaatttcctttcgaagtaaggctttgacaagtcttctctcgaagactcttctcttgttcaatgaagtttttcaacctattctaagaacagtataagaacaataaacaaagactaaaacctagatgaacactttaggttttcacaaaagaaactctctcctcacaaaaatgaaaatatgaaaaatgaaactaaaagagatgagaaacgtttgactgctctttaggttctatatatagtacataaaaaccatagggacatccacaaacacgtttacacagctgtacaaaactttcctaaaatatatattgatttgcagtgacaaaattgtactttgcagtggcagttcaatgtcaaattggaaaactttttaaataagtctaagatcacaatttggactttaattcctcactactataaaataaccttttagaggcgattttttgcgagacagggtagccaaaacgtccaaatattcttacttattgaaaattgacatttagagacgattattttataaaaaccgtagctataaaattcaccaaaatcatataaaggcggttatttaaacagagatattttggtataaaaaaataccctataaccgacagcataagtacattttttttgtaacacgtgtatcatatgtcatcggttattttctaataatagttgctaactttttatctaaatttgctctagagttacatgaaactaactttttgttggagagtttactttcaagtttcacctatggtttagaaagatagggagagaggaagaagacatcaaaggcgcctgtggttgcagtgctcttcttgttgcttcttttagctttgattccatctggatcatcctcaactttccctgctttcctctagtcttcacatcggtaatgattattatccctttctcccaatttgtatgagtatatgaacaattgaactattattacattcgcagggttcatccatcatcatcatcatctgtaaattatcactctttctccaaaggatttggctaagtccccctactctcccaagctggatggtcacacttactggttagttagttagtttattcattcttctttacttacatttcgaattgttgattctaaattttgagtttttttcttctttcattctttagtgctcagataatcaagttaagcaacctttggatctggctcttatctttgttggttcagaggtaaatttcatagcttttactctttttttttaagacatgtactaaattgagctttgaaatatgaaagctttttcttacttactacaactaaatatgtaaagtccttttttggcaagttaggtg

SEQ ID NO: 219873 - DNA, 5229 bp, Cannabis indica
gttgttgttgttgttgttatattgaatcagttgagtagtagaaagaaaggcaattggtagcatggacttcattatttcaattgcaaccaaaatagttgagtatgcagtggcaccagcgggtcgacagttgggctatctatttcactacacagccaacgtaagtgaactcaggaatcaattggaagatttgaacaatgccacacaaagaatggaacgccgtgtcaatgaagcattaaataattgtcatgaaatcgaagttgatgttcaaacatggttgaacaatgctggaaaagtctctgtagaggccatcacatttcttaaccccgaaagccatgcacaggccttgtgctcttgtggatcgcctcatcatttggtgatgcgacaccaactgagtaggaaagcaaagaagatgtcaaacaatgtacgtgtagttgtctccaagaaaaacgaatttgattctgttccaatttcgtatcctcgtcagccagaaggatcctctacaacaccagcgaaagggtaccagacttttgattcaaggagtagaattatgaagaagataatggcagctgtgggagatggtaataggaggaggatagggttgcatggaatgggtggggttggcaaaactatgcttgcggatgaaattggtagacgagctcaagaagagaagctgtttagtaaggtggttaaaatcactatttctcaaacacctaatacaaaagagattcaacaacaaattgctgaaatgctagatataacaagtttcaaccaaatagaaagcacaagcaagagagcagagctacttcgaatgcggttgaagcaagaggaaaacaagattttattaatcctcgacgatatttggaaggaacttgatctggaagctattggaatcgaccatcaagagtctaggatgctgcttacctctagatatctacatgttttacgcaacttcatggatgttgatgagagtaatgtgttcttaattgaagctttggagtcgagcgaaggcataagtttgtttaagagaatcattggagagactaaagttgaaaagagtggagattacaaggctctagcacttgagattgttgatgaatgtgcaggactgccaattgccattgcgacagtggcacatgctttgaaatgcaataatatggataacttgttcatatggaaggatgcgttgcaacgactaaagaattccaactttaggggaattgagggaatgcatgacaaagtgtacttgagtattcgattgagttatgattttcttggaagacatgaggaggaggccaagtcattgctattgctttgtgctttacataaagaagatcaacaaatagacgtggaagacttgattcgatacagcattggctggaacttgcttcaaggagtgagaacagtgagtgaagcaagaaacagggtgaattcattggttgttaaattgaaatctcattgtcttttgttggatgaaactgagactgataaagtgaagatgcacgatgtcattcgagatgtttgcatagcgattgcaaaggaagatgatgatgatgatcatgggcataggatgttcatgaatagcattactagtgctgctacctatgaagaattagttgttcatcaaaggcataaagcatctaaagcaatctcctttgttgattttgatgattttgataatcttcctcagatattggaatgtcctgggttagaattacttcttctatctagaactcgcctttgtttggaatcaattccaaatgacttctttgaacaaactgggcaacttaaatcgttgggtatgaatggtgcacgcctaagatcattacctttgtcttttcgtttgcttcaaaatctccaaacattatgtctgtgtggttcttttatagaagacatagcggtgattggtgagttaaagaatttaaaagttcttgatgtgtcctggtcttttttcattaagcgactgccaaaagaaataggagcattgcagcgtttgcaagtgctagatctacgagtatgtagaaatttaaaagtgatcgaggcgaatgtcatttcaaatttgacacaaatggaagaactctatcttcctactacatttgagagatgggataaaattgaagaagacggaacaagaaatgccagtcttatcgagataaagagtttgcaacgactaacagctttatgtttgtatgttccaagtgatcaacatgtcttgccagagggtttgtttgatgaaaaattggaaagataccaaatatctattagaggcgatagatatttggatgataaaatttcatcaagcaggtgcttgcacttatgtctctctcaattggatcaagtatatgcacgtgaacttgtagcgtttatgacaaggtctgaatatttatcactagagggatattttaatgttgctccatgtttggctaaagaaggttttccttagattaaaggaattgacttttgtaggcaaatgaaggcgccaaatatatcattaatccgacagacatgatgattcatgatcaagaagcctttccatgtttggaggaattaacacttcgacatttagaaagcttggaaagcattgtaagtaatattaatgtactcccaagagggtctttcttcaatcaattgagaaaggtggatgtgtaccgttgtggtagattaaagaatttgttccctttgtcaattgccaaacttcttcatgagatttcagtacaagaatgtgagatgatagaagagatcatagtcagagaagatggtgatgatgatcatgaagtagttgttgcccataataactcttctttgcaattacgctctttgcgtttaaattatttgctaaacttggtccaattctactgctctccactaatagaagattattctatgcctttattcagtgaaacggtacaaaactcttcctatatgaatacatacaaattgaaaagaaaaaaaagttatcttatatgaaattccttattaatttgcaggtttcttttcctaagttggaagacttgaccatccattacttcactaaaaaaatgttatggccagatcaagttgtggaatcatcatcaagttcttattacatgcaaaacttaacaaggttaaatgtgagtaattgcaataatttaaagtatctattctctttctctattgctcaaaagtttgtaaacttaaagagtatacaagtcaaagattgtaaggcaatggaagacataataagagtagtagatcaacttggagaagaagatgatcagttgcaaagggattatattattttgttccctaaattagaatgtgttaagcttgatgagctttcatccctccaaaggatttatggaactgcatgtactgatttatcagagcttgttgttagctcttcaacacaaactttcttcaaaaaaaaggtaattaattaatttcttaaatgtgattatgtttcttataggttgtcccatatgtttattgaacaatagagcattgcaatttgaaatcatgaggtataagatattgccttacaaatgattattaacgatttaatatttaattctaccaatagtaacaatactttggatgggtttagactgcatttttattattcttaaattgaagtgagtacaagtaattaatgctttaatgttttattttcagattgcattaatgcccaacttaaaagagtttaatgttaggtactgtcacaatttggagtctctgttaccatctgccatagctcgaagacttgtacaacttgagagattaagtgtaacaagatgtgggaacataaaagtggtaattgtaagcaatagtagtgatgataaggaatatctatcatttgagaaacttgaatcccttgaacttgataggcttccaaaccttttaagcttctgtgaaggagattattgcattgaatgtcccttattgtctaagctggttatagatgattgtcctaaaatgaaggagtttatgaagatggtgtccactcctaataaacaaataagtcacttcaaacacaataataaggtacactagtatatatatttataaaattttagtttcatttaaaagtaatttcttgcacatttaaaataaaaagataccaagaagcagtccttatttatttttattttaattgtcactacaaaattagtttctttactgataatcttttatttataaaatatgactaaatgtgactttaagtcaggataaaaaattacttgtagctaaaatatagtatttgaatataagttgttgctaatttagttttagttacaacaagtattatgactaaaaatatatttttaattacaataaattgtaatttttgtgcctaatacttttagttacgaaacttttagtcacaatataagaatgatgatttgtaattaggcataaatttattgtgactaaaagtagagtttttgcagtgtgtttttaaaattaaattaattattaattagatgttcaatgcacttgtaatattgttttcctttttgtaggtgatttttcctatgctaaagaatttacaaacagcctggagtgaaggaattaaggagatatttgagatgagtagtaactcaataatattatttcccaacctttccaatgtttcatttaaatcttatggtgatgaaccaattggtgtaccgaatctgaactcattccttcacaagtatcacaaaattcgtacactttcattgtatggctcctttgtcaatttaagtagcactcgtggtagtggtaatggtaatagtaatagtaatagtgacgatgaatcgatggacaacattactgctactcatcttacatctatagcttcttcattggagacactgtatgttattggtgctgagaagcttgattatgtgtttgggatagaaccatcacatgcacataataagtccattgtcttatttccaaatttagattacgtgtgtgttcaagattgtaacagattactgagccttgcaccctccaatatgtcttttcacaacttgggaaatctcgaaattaaaaaatgtcatggactgaggtatttattctcttcctcaacagcaaccactcttcttcaactgagagaaatgagaatagataattgcaaagagttgagggacattattattactattaatactactcagtctgaaaatagtagtggtaatcaccatcactactccatactagttttcgagaatttgaaccaactatttctaactgaattacccaatctcg

SEQ ID NO: 219874 - DNA, 1646 bp, Cannabis indica
ataaattaatccaaacaaatattaatgcaacttctctaaagtgtacctaactatcaaacatatttatcgtaccttactttttttttcttgttggaatatataaggagtttgtaggtatctattatgtgcgttcaatgttttcttggtcttaaaggtaaagaatatatcatttcacatttgtttatccatttatttatcacatatattctttgtttttatcattattcgttttctaaagaaataaaaaacgcttttttaagaaaaagaaaaaattgttatttgagaaatctctttgtccatttattttttcaataatgaatctaactaatctgaaattttagacatataataaatattcgaagtgcaaactgtaagaggagacaaggagtgaatcttcttaattatttacagatttttgcaacaacaaacaattgaataaaagaagcacacacgtgtgcatgtgaagcacttgcttagtcagggtgtacaagtacaagtataatataaaataaaataaaaatacaattcaagaattatatatatatattttcacccctcccaattataaggaaagaggacaaaaagaagaagaaaaaaatataagaggacaggaaggaaaaaaagaaagaaaaaagttttcctcattaaattgaaaaatatatatctatctggttatcatttgtagaaaattgacaagcatatagcaatagcagtacaattattaatatttttatcaatatcaattaaataagagtttctgtcaacaacaaagaaacctttactttactaaaaagagctctctataaaatatatgtgattcattttgattatatatagcttttgtagtataaattaacaataataatgaactttatcatgtatatatagctaataggttcgtttcgcggtatatatgtaatgtgtaacacggataaaagaaaaatcaaagtagtaactaatagtagtacacttgtgaatcaccaaagcaatagtactagtatatatatacatatatataggactcatatttacttgaattgatcatagaaattagaaaagagttgaaaaataacaaagaaggtacatagacaaagaaaaaaaaattatataccaagtctttttttttccatacatatatacgtcatttttttttctctttttgacaaaattcaatggaggagacagctagctagcttagttagctattttaacaagttgcatgtgccttccattatggaggattttatgccatcttcaacgtgtttacgtaatatatatatactcattactcaatcaaccaatcacaggctacttattaagtcctctcccttttggacccacacactgtcatattcaggttaactaataattcaattgtaatttgtgtattcctttcattttcttatatatatttaaacagaaaatgagaaaaataaattgtcaccatatagttagaaatagaaacccacgcgtttacgttactatattacctcatctttttcaccaaacatattagacagtatggcaattggcaaaaccatatctggggtcatactcatggagtcatatatatatatatatatatatatatatactaggcggcaactacgtgcgaggcacatgttattttatttttgataattttt

SEQ ID NO: 219875 - DNA, 2451 bp, Cannabis indica
gttgttccacatgtagagaaatactattcattgctctaaaatttatgtaaaatagagtatttgttgtatgccatattttataaatttatatcttttcttgtctattttaaagaaataccaagtttagagtgctcttacatatctggtttccatttgttattgtcaacaaagtaattaatatttttatacaaagagtgtaaaaatatcaacttgcattttgtattttgagtaatgtattactaacaatggttatattttgtatgacaattcatgtctgttttatatgaatgtgtgaagcataaaacacacttggcatagaatttaataagaaaaacattctcattgttgtctccatttttattgaacaagtactaaaataacttaattagttccaaagtaatgtagactttgttgaacatccttattgaattgaaaccagttctttcatgtcatcactctcttagaagagagaaagcatggattgaccgaacatctctctcgaatccttctcacactccaatgtgtcttctccgagatagtttcgaaaataggctctgcaaagaagttcactctccactctgctcacaagctctccattcactgcacccatcaaaacttgtaacattagtaaattttatgttacatatacaatacaaccataaaaaaaatggtaaaaatttatttagtatcttatattttatcgaaatataaatttgattttatactttaaaatcatacatattgttttttgtagtctaaccttttgtttcaagaacatatcctggtagtttagatacaatcatttctgaaccaagtcttaacttaattttatcagaagtagtaccgaaaactctacaagaaaaatcacaaaaacacaacaagttttatatatatataagaatgtttaagttaaataatggttggttgtagaaagtagaaaagaatttttattttgtttacttgtttgaaagttcctcatttttttggccagtgagtttcttcatagattctctcatagcttcagtaaagccctttttggccatgctcaatttcacaccagaaaaggatactaccattttgatagtcatcccaaaatcaccatcaattgctaactgatacatctcttctgttggttttgatggggcttttttctatttttgactttcaaaacatctttcaatttatcactatctacatacaaccctgcaattccaacaatattggattatatgagattatatgcaatttaattagttacgatatatatttataaaaaaaaaataatatttatagatataatataaaaatttagtataatggttaaattaaattacatataattgtaaattctaagtctgtttctcatacttattatacctatgtttcaactaaacaatattaacaataaataagaatgaataaggaaaaagaataaatataccaaagccataagccttaatgctaagcccaagcaaagatttcttattatagccaacacaatacaagattttgccatcatccaatttcaccggaaaagaaatgccggtcttcggctcaacttgaaccgcctcttctttggtggccgcgttggagcttccatctgaagttgccattgtttgagagtttgtgttaataagatgaaatgaaagagaaagggagttagttagtatttgtgagtggtgaatacaatatacattgtgactatgtatttatattggtatgaaaataatgtttttttttatgtaaatagcttcaataggttcttgatcatggaaaattattgtccattctagttgctacataggtaggaaagaaaatgttatgttatagaagcgttcccatggaaaaaatgatcatttttatttataggttttttttaattaaaaagaattatgaaatatttaaattacaacaaacatttcactatattttccattaaaccattaacaggtaagattatcttcaatgcaatatctaaaatttgacataaaaaataaatttgtgatatatttagtccactattcatccaacatcttattttttgaagaagcctgatatgcaaggcgttttgggatggtctttttagttcactcgaaatttttgaggtgcgaacaggaaagcccctctgcttgttggttttagggccagcaaaacgggtcagacacaataacacgacttgaaactcgtacgagatttagcaggtttaggtttgccttaaatgggtttgggtcgtgctcaggtcgacttgtctaacccatttaataaacggatcgcgttcgggttgacacagctgacacaaaactgacccgttaatgatatatttaaagttattttagtactttaacatgtcataaataggttatgaacgtattgaatacttcataaacgtgttattggttgacatgtttaaacaaataatgcatataaacggattacacgggtcgtgtcgtg

SEQ ID NO: 219876 - DNA, 2942 bp, Cannabis indica
aagtctgtctttaacaatattaagaaaaaatatactaaataatactaaaattcgaaactataaaacactaattactagcatgatataaatgtgtgtgtatattatatttactgtaaaatatatttacgtttttattttttttttactgaaaaaataattaataataaagaaaaagagaaagagaaagtgaatatctatgatgatgagaatgctgggtagataggaaacaacccaactagcttgaggtttatgtgcaaagggacaaattggtaaaagtggtagacgatagttgaattaatcacttaaaatataatattatattatttgatatggaaggaggttccagtagtacagaggaagaagtgtacgtagtagtggagacagatggtttctgaaaggctgattaaaattgtactttgaaaagagaaacatcactacccaaccgacttacttggcccaacccaacccaaacatacaatactatgctaggaggttttggtacaatactattctatataatttaatattataattattgtagaatatctttaattatttgttgttgaagtcgattgttcaatccttgccctcttattgagcattttttttttgatcctattagatatttgcaaagatgttgacaggcttatgaggcggttttggtggcatactaagtccttggaggtcaagatattcattggaaaagctaggataagctttatctccataaacataaaggtagattggattttcgcaatcttcgtgattttaatttatctatattaggcaagcaagggtggaggttgttgacaaatcctacctctctagtggctcgggttttcaaggctagatattatccccaaggttcatttttttgatcctgagcttggagttgctaacccaagctatgtttggaagaatgtctttgaggcaaaaacggttgttaaaatgggagctaggtggagggtgggttctggtttttctatctctgttcttcatcaaccatggctcctttgtaaggagaacccttatgtgatctcttctcgtgtggctctccaagagtgcagggtctataatttactaaaagcatattgttttcagtgggatgatgaagtgggataagtgttggaggacttgtttgaacaaaggaatattgatttaatctgaagtatcccctgtcttcaacttcaattgaggatacctgattttgggcttttaagacttatggtgattactctatcaaaagtgcatattgagctttgcaggtgagtagtgggagatagaactctcaagataattcagatttttggaagatgttttggaacctgcagttgcctctaaaagtgagtagtttatgtcttctgtgtagtagggaggatgagaccatttttcatattatgctcagttgccctttcaccaaagcgtgcattgacaggggcctgggagttattttcaggggggtgaagctgtgcttggtagctgtttaaaaaatttctgcaagtttcaatccgtacggggagaatattgacaagctttctatgatcctttggggcatttggggtgcccgtaatgatgtggttggaataaaaagtcttttatctatggagagggtggtgagctctataattacttaccttgattcttgggaaattattcaaattgataagggtgttgtatcgacaatttcaggtcagcatacaaccatttgtgagcactggtctaaaccgcttattggagagataaaggttaattgcgatgtcccagtttgggatggattgctcgggagcatgaaagtttgttcttcgaagcttcagctgtcaagaagagcgaacaacttgatcctttaattactaaagctatttaaaagaggcactcagccataattcattcattcaacgttcctgcggagaccgccggtgcgtgtttctttttgtccaggtgatcccgtaaatcaccgtgtttctcgttgatctgatgtcttagatcaatgggagggtatcttcggttcccccttcctttttccccaggttccaggtgcacagaaacgctttttcggtctttgatcctgagggccaagactccctttttggagcttgcccctctgcggtccttttcctttcgggaaataagagcggaccttttgcggatcatgcgtctttttctttttccctatgatggaagtaggattttttcgttggtttccttcagagggataccgtatggggctaggttccctagacttatgttttcgagtgcttggtgaggactcttcgggtgtttcctcgagtcccgcagggatggcctttggggtgcatgtggatccttgcggtctttatggctttttgcatggcgaccatcacctcttgcatctttatgttttgctctttttgagctgtgatctcagcttcatgatcaacagccttttgtctcaagagcagtagctcagtgtaactgccttcgtcgtaggcatcgtactcgtcgaagttttcctcgtattcgtcatcgttggcctcctctcgttcctcagaatctacgttgacttttgaagccacttcctcgtcttcagggttttgagcatcttgaggaggacggggctgacgtgtattgcgagtttccaccattgttgctttagcttataaggttgttgtctatttgaagacgcttccttcagctctcaatgaaagcaccaaaatgttgactgaggttttcggcaaccaattaatattatatatatatatgaaagctgtaggaagtttaatgcacggaattttggttggggcattaaagagccttagtccacgagtctttgttatttatgggagtatttattacagagaatgttcttggtagagatcactcctattttctctctttaatccttgtgagcccagaattctcgacccctgtcttagtgcgtttgggtggtatttatagtgtttttc

SEQ ID NO: 219877 - DNA, 3926 bp, Cannabis indica
caaggtttacaattcttggtttctgtactaactcaagaaaattgcttgaaggaagctctaagttgctggagagatgacagagtgggtttgcagccagactccaccacctataattcaataattcgtcctttgtgtaaagcaagaaagctagaggaggctcaaattatgttagccactatgataggagagaacataagtccaaccatagacacctaccatgcatttcttgagagtgcagatttttcggaaactcatggaattcttagtcggatgaggaaagctaagttaggccctaataatgaaacctttcttatgcttcttgaaaagttcttcaagttggagcagtctgagaatgcaataaagatttgggaacaaatgaaggattatgaagttgtgccagattctacacattacacggttatggtacaaggactggcaaaatgtgggttgttaatcaagggtaaagagtttttggctgcaatgggatcacatgggtttttggtggatccaaagcttaagaagctgttgaaggagccagatagtgaaagtagtagtgaccaaacaaaaaggctgtttacacagttaaagggaggaaaaagggttaatcataggaaaggtaaatgatatgtggagactaacaacaaacattcaagaaagaagaaagcattttaaagttctcttggcttgcactcactgctgaataagcttgctaatgctgtagtttattattaaacgacgttcgcctgacattgcgatttcgccagtcattgaaacactatgtaaaacattccatataagaatacttgtgtaccttcagaaatggtatgcacaagcacaattctcaatatacaagctacagagtattgcttcacttgtatgtttttcaatatgattaactagtgatttttctagtaagtgaccctcaacattggacttgacaaggatgaaaaaagaaagatgggaatttgaagtggaaaattcacttccattcccaaaatttaatattcaacattatggtccacagatgcagctgaagtctgatcaaatcgtttctcatatatgttattgatttattttcctaaaacttcttcatagtctttcgaagattatcaatagacaccaaaatcccacataacatagttaaaaacaaatacttttaaccatgatttgttgacacattggcccactagcttaaagatgtctatttcatcctttatttatattatagagtggaccttattgtactcttcaatggctatgcagctttaattcaaactcaacctccctagtggaaagtggaaacggtaatatatttgatcattatcctacttatactcaggggaccactctttctctaaatttcttggacctgttacctatgtagtatgctccttcattctctagtgtgttccagcttccagccaaaacagaaaaaacaaaaaaactcactgtagtgtgtcaactccaggcatactttggtaaaagatttaatttttcctagaaaagagagagagagggaaagaaacaacaatacccaccaagctaactaaccaaccatagaagtgaaaatgtccaactcagtataccttatcttctccattgttctcatctccgccgtttcgacccttcctcctatttttgccacagatcatattgttggagctaataagggttggaatcctggtctaaactacactctttgggccaaaaaccatacattttatgttggtgactttatctgtaagtgttttccttttttttttttctgtacttatatataggtttggcttatatttgaagattttgttaacccaattcttgtttaaagaaaagattgaatcttgagctaaaaagatttcatctttaggctttatgctatgttagtttgaaaatgaaccaagtaaactttactttgttgtttaaactttttggctttcattttcctttggtcctgaaaatgcactgtttgtcacagcatttaggtatcaaaagaaccagtacaatgtgtttgaggtgaacaaaactggatatgacaactgcacaattgaaggtgctgtggggaactggagcagtggcaaagacttcatactcctcaaagaggccaaaagatactacttcatttgtggaaatggacagtgcttcagtggcatgaaggtatctgtggttgtccaccatttgccaccacctccatcttcttctcccatgcacttatcccagaactccacagctgcagaaattccaagacctggaatccgggctttgacagtgtcgttggcattgatctggtttggttcttggggtttttagtgatttgttgtagcttcaagctttaaatcagacatttgtataattgaatcatttcattgttggggttcttctgtttttgtgtgtgccaaactcttaggaggcagtcctttttcaaagtgaattttttttccttctctcccctacttctgtgaggttagttctcatttttttgccttggctgcatttcttttcttaatggcaaagtccacatttatggcaaggtttagtttggtatttattggattttggatttaatgtaccatttttagattattatagaggtttatgttatcttctaattaccggttataacacttattaatgcattcaatgttctctttctctctctctggacaaaaatatttagttcttttcccaagtcccatatgaaccttacatttattttatacaaaataaaccagaaaaggatccaggtcacttgccaagctttgtatatttagttgtgtttttaattatatcaatttttagtttgccaaaagggttagtatataatggagcaaggctatgagtcctttaaattcagttgataaaaaatccgtgggaaatgtagtttatagatttgatatggaagaaaactggttctgctttgactgattgcaagattcagctacttcttgttcttctttcaattatgttttcattctacacacgaaaagaaaaatatgacactacacagctcaattccattcttcaaaaacaaaccattttccactggatatggagagatttggtttccaaatttcaatgaacatactatattgattctgactttaattcaaaacaggtgaaataaaaacagacgtttacagctaaaataatgaaaacaaaagttggggattattaacaaagtcatatcaaaataagatatggtaacaatataacaagacaagagacacaatatatatttaaggtaaaagggttttgttggttttgataaagatgagagctttagcaacttccaccatgtctggtctctcatccacattctctttgatacacatttctactagcttggcacattccattatttgaagtcttgtttcttcttctctttcttctctcaatgtattgaccttcaactcatttttccaagcatcaaaccagtaggcacagggaccatcgatccaagtagcaggatcagccatatatggccaactctttccagtcaataactcagacaatagaaccccaaaggcgtaggcatcactcctttctgtaaaacgcccatgaacagctgcctccggagagacaaacccgtaagtcccaaaaacatcagcatctacatgagtttccccttcaggaattggaattgaagcaaagaaattaaagagtttgggaccgtagtctttctctaacaacacttgtctactatgtatatctctgttaatgaatgtctttgagtgaccatgatggagataagcaactgcattggctactccaatcccaattcttaacttggtctcgaatggcagccgtggtggcgattctttatttctttggaggagaaaacgagagagtttaccttgaatagggaagtgatcatataccagcataggcaactctgtgtcaagacagtatcccaagagcttcaaaacatt

SEQ ID NO: 219878 - DNA, 2197 bp, Cannabis indica
tgctacaacccttcagccaccttctagagaagtcgcaaacacaagaaacacacccgataccactgtcgcacccaattcatctgcttccagtactgcagaaccaccgtctctgtctccagcattgtcaccacaacaggtacatcattttgaatctgatgatgacttctctgtgcagcaactctctacagatcactttcatgcctctcctcagtctcatgttgtttctgaacgtgttgagcaacctaagccgcttcagccttctcacccaatgatcactcgctcaaaggctggggtgttcaagccaaaagtctaccttggtcatgcgaaatttaacctctcttgtcatgaaccacattctattgaagaggcactttcacatggaggggtggaatggtgctatgggagatgaaatggctgctctacaccgaaataaaacatgggttctggtaccacgatctgctgtcactacaccgaatctcgttggctgtaaatgggttcacaaaatcaaatacaatgccgatggaagctttcagcgcttcaaggcacgactcgttgccaaaggcttccatcaacgcccgggaattgatttttctgaaacgtttagtccagtgatcaaggcctctactgtacgagttgtgttgtctattgcggtctctcacaattgggaaatcatacagctggatgtgaacaatgcgttccttaatggaatcttggaagaagatgtctttatgatacaacctcccgggtttgaagatgccacaaagcctgattatgtttgcaaactaaacaagtcgatatatggacttcgacaagcgcctagatcgtggtttgaccaactgaagaagaccttgtgtgaatggagctttgaaaattcaaaggccgattcttctctgttcatgttgaagaagccaaagtttgtgattatggtacttatctacgtggatgacataatagtcaccggaaataacacggctgaaatcaggagctttgttgcaaaattgaatcaaaagttttccttgaaggacttggggcagctgcaatatttcttaggaattgaagtcttcagagatgacaccgggatctatctttcacaaaagaaatacattgttgagcttctccaaaaatacaacatggccaacactaaaccgagttcaacaccaataacagcaggaagaccactttccatcaatgatggagaaccacttgagaatccgtctaactacagaagtattatgggagcgctgcaatatttgagccacacaagaccagatatttcttttgcagtaaacaagttgagccaattccttaaaagaccaacaacaacacactggggtgctgctaagagaatccttcgatacctcaagggtaccatgtatcacggccttcacatagcacctagcatcaatctcaatctgcaaggcttttcggatgccgattgggcctgctgcccggatgatcgaagatcagtagcaggttattgcgtctttcttggtgaatcactagtttcctggtcatcgaagaaacaaaccgttgtcgccagatcgagcactgagtcggaatatagatccttggcacatttggcagccgaattatcctggctgcaagaactactgcaggaaatgaaaataaagtcatcaacagcaccaataatctggtgtgacaacatgagcgcaagcgctcttgcatcaaacccggtgtaccatgctcggacaaagcacatagaaatcgatgtgcacttcgtgagagacaaggtgttgcaaaagaaacttgaaattcgctacattccctcgcacgatcaaacggctgactgcttgacaaagggactgacttcaacacgattcagatttttgatagacaagctcggagtggttgaatccccactcagcttgaggggtggagttgaagaacagagtaaatatgcaggggtgaatcagtaatttcttttctgttgtatttccctgtcactatcatcagaatattccctcaatgatttgggaataattctgttatgattgtatttgcccttttgtgattctgtagccttgcgtgtcactgtgccaatggccatttgtaatttccaagctttgcccatgaggctataaatatcagaactctactcactcattttctgagctgagatttacattttacactgtgtttctcttattcttcactgtttcatcaaagaccacattcc

SEQ ID NO: 219879 - DNA, 4853 bp, Cannabis indica
attttttgtcattttcttaatctgtttacatttaatcaaatttgtatgacactatggggaaatatgttttctatttttgtctttttgtctttttatctttttcattttcatcaaaaataaatcatctttttgtttttattttttatagactttttaaaacattataacatataaatgattgtataatattagcctttatttaaataatactttaagtttgatctaaatatgccaaattaaaaagtatatgtcctatactatagtgctaaattaatgcatataaagtagaaaactttaactttgattttttttattgacaaactttaagtttgatttaaatatgccaaattaaaaagtatgtcctatactaagaagataagttaaattacaaactagaaaataattaattgtgtgaattgagtccaatgcatttgaagtggcataagataaataattatttcttttaataatttttttataagctttgaggtattttaaattgtattcaattttccaataaatttttaagaaattcaaaaaattaatttaggattccaaaattatgagaaacaatttgagcataacatcttaagttgtgtaatttttcaaaaatttgtaataattactctattactatattatacatcatcataaattttaaaaaaattataattataataacaaaaatataaattgtatttataaatagtgattaaaaacaaaatattctcttaacagaatttatttaacttagattcctactaaatgaaatattacgaagcatgaattattgacagatgaagtacgtcttatttgcgattttcatttagaaactacttatcatgttttatggtgtttcacttcttaatctaagtgtcctaagctttgggatgtttctttggggaaactctaattacgtgtcatgatttttatgagttcggtcataaattttttgatccattatatttagagttgattttagttatcatgtggagaatttggtttaagagaaaccaaatgatgcacaataatacgtttctttcaccaaatattgttatttcttggggtcgtgatttccttcttgattaatagagaataatccatcagtcgactgagactttgcctgtaactcactgtgattcggttggctttatttggatgttgcctgctatatattaggacagtgaaagttaatgttgatgctgaccttggttctttaaatcacaaatgtggtttggatatggtggtttgtgactcttcaggtgtcgttgtggtttctgctatttggttgatcttaggtagtttctttcctaaaatgttagaagttttagcattgaaaaatgtagtaattcaatgtcgcctgttggattttcagaacatttttttgaatctaattatttaaatgtggttctgaagtttaataatgaggtttcattggcttcttctttgaagttggtcttaaaagattttaggaataacttttatgaatttcattttataagtctttctttttgttctagatttattaatgttgttgctcatttcttagctaaatatattttgtgggaagttattaacaaggtttgatagcctgattatcctttttatattcataagtgagattaattaatataatcaatgctccttcccctttcaattaagctctttgcttgaaatgtggtttttttgtggttcttctaaaaaaaaaaatacccaacaatttttatataaatttataacatgtttttgctcccctaaagtgtgttgaagcttatcttttccacaataatagagtcctcatataagtggtatagatatgaatctcattgctcaaactagaacacaaaattcatatcatccttatttggaatcattgaaaataacatattactatcttgtattgaggaaaagaacacataagccatcaacaacaaaaaaaaaaaaaaaaagataagggactcaatctaggctggcctagtcaaagctaagctaatacaataataatgcctagcctatgtacaaaccaagctccaaatttcatttcatttctctatccattgcatattcattcacctaatgaatttgctcacttatttcttcttctttaaaaacatgggcaattttgtattatgatgaaattacaatttcccaccttgtatgacaagtgtttttttcttgggtaaattcttcttgtttgtttgcaccacttttttgctagtcattattctcaaactttgcctcaatatatcaacctctctatccctcttgtacatttcttgttccatagaaaccaactttgatttcaactcttttatggtctcttctttggcttggacctctctttttagctcctctgctatgtcttcctcttctgctctccaatacaatccaccttctgcaccaatcacaaaaaagggtaaccaaaaattcgaaaaaatactaaaaggtatcagtggtactcagaaccacttaaagtgtcataatattattagtacaattaagtattaatttttatgcaatatcgataactatttgtagcgcgtgtctaataacaatgctcgaaaatttatatcaaaaacaaaaaataaaaagtaaaaaaattgtacaaataggttcatgtttcagtaaactctcaaaaagtgtcaattttgtaaagtttgtcaggaatataaacactattcataagcacatgtgtgtaccaatacaaaacattttttagccacagcatcaatgttggatctggtcaaatagtatataatacatttttcccacttacaatttattaaatatgaatttattaggtgctagccatttaataaaaagaaaaataaaaaaaaaattagtactttttttttccttatctttttcatgatgcaaaatagtacaataggaataaatactctgagatataggaagttgctaatgaaactaatcacttaacaaaacaaaaaataactatgaagtaaattagacttttgttacttttaacctaaaaaaatcttgaaaaggaggaagtttcttaagacccttttagacttagagttgggaaaaaaacaaaagcacttgcttttctttctttatccacctcttttgacaattttcttttatttattgtgatatttttttggctacaattcatagtgactttaccaatttcattcaattattttttgaagaaagaaagaataacatatgccctccatgaaaggaaagactaactcatacaagaaaagaaagaatcactaaacaatgacttcacaagagaataataattttacttagtaatgaatttagtattgtgtttaatgtgatgagatgtactatgcattgagataatattaataaatagaaaaatagagaaagagaattaccatgagtcctttgaatgagatcatcaagctccatctttatagccaaataaagttgtttccatttctcaatagtttgatctcttctagctctttcttgctccatttgatcaaccaagaaattagcacccaaaaaagcccattctttttcaacactagaattgttattatcattattattagcaacaaccaaaccttgttgttccatttctctaatcttatcttctttttcatcaactaaagtcttcaacatcttcacctcttctttcaatttcttcttctcttgtttccactcagcctttttgaaagcaaaagccatcatttctttctcataaactattacttttggactttgctctttcatcaccctttggtacttagactcaccactattattagtactacttttctcttcttggattataaacttaaccttgttattcttcttcttcttcactaaccctttctcacatgatgatgataaacccctcttactatgcttgctaggtttcccacccattttgggaacactgataagagtggtagtagtagtgatgggaaattctccttgggatttgagaaagtgatgaatagagttgtagtattgaaaatgtgtgagtgacataaattctaagcaaaggctctcccccacaatcccattcatttaatgaagagaaaaaagctttgcttgggattgcttatataataagatgagttagctccactcacttactcactcactttatctagcataattattgcataaatcctaagggcacttgtaatttattatcgggtctcatataatttaattaaattaataatacgagaaactgctaactacttacaaattacaacacgctatatcggtattgtgttgggtacctgtgcttaatagcaatactcgcaattgatatttgacaccttaaaatacctaacaccatatcaatatgatacattataattggttagcgatttaaggttcatattatttattaaataaaaatatgtaggacctaatattttatttttgataaagattagaataaccataagtgattgtttaaccaaatcaaaaatcacaaataaaagattgtaaatttttgaaccatcattgaccaaactatccctgatgaatttagataatcgccaacgcaataacatatcaaaaatgattcacgaaatatttgtaaaacaaaataaggcaaagaaaaataaattaacccccaaacaataatattaaaaactaataaaagaaaattttcaacaatattaaaatatgtaaaactccatattaaaatgcagtaagcaatgatgagtgaggcctaacattttggtaattattaagggagagagagagtgaatgaagtctcgtgaagggttgtctttgagtgatttatacaaacagattggacacacaagacatgaccaatatgcaactatatataaatgggaacaatcaagtcacatgcataatatatatat

SEQ ID NO: 219880 - DNA, 3606 bp, Cannabis indica
aattaagaaaaaaaaaaactgtttaaaaaaatattgaaagtaatttttttcgtttttaaaattttgattctcaattaaaaaattgaaaagtaaaaacagttatatagaacatgtttttgaaaaatattttcactttttcaattttaaaacagaaaactgattaaaaaaagtgttaccaaacgacacctatatttttataatttattaggtgatagaagtcttcacatatggcccaacaaaggttgtcattgttgaaaatatatggtccttgtatatttttatagtgtggtggatgattaaattaaccgctaattagaatagaatagtttactagatatttatggctgaagagtgttagaatatatttttttcataatatttttcgttatagttatatagttactttataaattttaaagttttttaaataatttacagtattgacaacaaattttttaatattcaactttaccaaacatgttcaaaaacctataaacttattttcaatattgtagcctatttgaaaatttttaaaaatttacaaaagtaatcatattgtaactataacgaatactattataaaaaaaataaaaagtgacgatattattattaattatgtcactgttttttcttgaccgtcgaaatttggtagattttctcaataggaagagtctttgccaatataaatggaggtatagtctagttagatttacatattatatattatcgcataatactaataaattatatttctctcactttaaattctcaatatgatgaccaaagttttagtacttctaatggtgctagccacaaatactcatgtattgagttcatcaagccaaaattattgcatagagacagaaagacaagctcttctcagcttgaagaaaggctttgttgattatggcaatcgtctttcctcgtggacaagtactagacgagattgttgtgcaaggagaggtatcaggtgcgataacttaactcatcatattatcagccttgatcttcattctaatgataacgattcaatcttattgagtggcgagatcaacccttctttggttgaacttccatatttaaggtacttggatctaagttacaacaatttcactaataaccttaacacaacacttttcaataagcctttagaacacttgaatttgagtagaagcgaaatcaaagggcaattatcgaatttttcaaacttttcatttcttagagtgttggatctctctaataataagcttagtggtacttttcctgaagatattggcaagcttcaacatcttgaagtattggatgtctcttcaaactttttcacagggcttgtcactgaatttcactttgaaaaactttcgaaattgaaaaatcttcatcttcatgataattccttaacattgaagatcaattcatccacttgggtaccaccatttcaattagatattctaatattaagatcttgtaaattaggtccacaatttcctatttggctcaaaactcaaataaatttatcttctcttgacatttccaactctagtattcaagatactattcctaattggtttagtaatcactttacaaaattgaattttctgaacctttcttcaaaccaattttatggtcatatcccttattatctatcatttgtggagatattggatctttcatataataggtttaatactaatttaaggtctcttctttgtgagccaataaatgggacaacaaaacttcttgatatttcaaataatatgttaagtgggagccttcctaattgtgattggaacttgaagaatttaattgttctaaaattagataaaaataatttgattggagtaattccaacttcaattggtttgtccaatcgaattcaatatctacttttgggacacaataatttttctggaaattttccttcatcgttaaagaattgtacacaacttcgagttcttgatgtcaaagctaataaactaaaaggcaacataccaatttggattggagaaaaactcacaaatttgatttttcttagactaaaatcaaataattttcatggagttataccgccaagtatgtgtcatcttcattttattcaaatatttgacctttccaataataacatatctggatttattccttcatgcataaataatttcacctctatggtagataaaaggaacattcaaaaaatgagtaacatatccacagaagtttccttagataataatcgtcatcaagtacttttgtatgaaattgttacgatgattatgtggaaaggagttcttcgacagtatagcaagactctcgggttactaagattcattgatctttcgcgtaacgaattgactggaaaaatacctgaagagttatgcaatcttgttgaattgattcaactaaacctttcaaggaatagtttgagtggaagtatccctatggaaatagggaacttgaataagttggattctctagatttatcccataacaagctttctagtgtcattccaacaagcttggcaagtatatcttctctatcttttttgaatttgtcaagtaacatattgtctggaagaattcctatcggtactcaattgcaaagttttaatgcttcgatatacattgataatgatggattgtgcggacttccactaaacaatttatgtcttggagatgagacaccaaatagccctaaagatattgatgatccaagtgatgttgaagaatatgatgaagggtggcttaacatgtcatggctttatatgggaattggagtgggatttgtagttggatttgttggagtttgtggcactttattgcttattacttcatgctaattcacttatgtaaatattatttacttcattctatatttggaaattagtattaattatgtgtagtttgtgttaaattattcacttatgtaataattttctattcatattctcttttcatgttactatttataagggacaacttgtgtctctctttgtagtgttttttacttttggattctaatataaggcactaaattgtttaattaaatcaaaaaatgtgttcaattttcctaaaattgaaaaggtcctaatcattctatccccccttttcctcagtctctctttttattcctccattatcattcttgttgactaagtatacgcctaattaaattagtaaattgattcttattataagttattaaattgttgacttggtggccaatcactataaaatttttcacttttagtcacaattgataaaagttgtgacaaaaataataaagtgactaattataaattattatttttacactgtgactaaaatgtttgtggctaaaagtattagtcacaaaaattattgtgactaaatgtatttttagtcacaacacttattgtgactaaaaggttgtaactaaaagtagccgttttttatagtggtcacaagtaacacaaaaaaattatattataactaaactgttgtcactaaaggtgaatttttttataataaattatgtgtaagtgtcatgtctttgagtggcaaattatgtaaatactcttgtttagtatttctgcatcagtattgtttttctaacatcttttctgtggttagttg

SEQ ID NO: 219881 - DNA, 2343 bp, Cannabis indica
gctatgagtttttatattgcaagaagaacgacgctggattctccttcaggtattttatctactttcattgatcattgaaatctagctccaaaagaaggccaatacataccatcatctatcaatagaaacaatgtcatggctctcacaatgaatcactcattgcttaccatttacacttttgtttatgtggaatttttcagttgttgggatatccaagcaagcctattggcctctttataagtcggtcgataatcttcagatctgattccaatggtgaagatctggaaggctatgctggtgcaggtctttatgacaggtaactccctgaaccctgtgtttacattagtttcattccctcaattcctgttacaaaatcatgctaacacgatcaaaacttcctgcgtagtgtgcctatggatgaggaagagaaagtggtgctcgattactcaactgatccgctaatggttgatcagaaattccaacattcaattctttcaagcatagctcgtgccggaaatgcaatagaggaactctatggcactccacaagacattgaaggggtgattagagatgggaagctctatgtggtccaaacaagaccccaaatgtaatctataacagtagttagtagtcttttgatgtggcatttcattcagccatggtcaaaggaagaaaaataaaaagaataaaattggacatttttaactgtttaataggaaaaataataatattaataatatatttaaatagtaaatatatatattttttaacttaaaatggcatctattttcttaaacaggaaatgggagtctaaatctggttccccacgcaaactgcctgaagcattacatgtttatgttgttgctcttttttttgctatctttgttgttcttttgtttatttctaaaccacaaaagatacgaaagctgctgggtttatcaagaaatttatacataagaactactaatgatattaagagctttgctgaagaagtatggtgcttcagactcaaaagaggaagagatcaagatctgtcaccattataaatcgaatttacaaccttaaccaatcaatgacttattactattgaagggaaaaagaagatatatttttattttattgtaaagattaaaatcactccccctagttgaaaatatactcactgtaatacatggactgaaaaattagctaacatgactcaatgaacattatttgagaaagatcaatgttggtgattatcattatttagaaagggaatgccctatattttcaaaaagaaaaaaaaaaagtaagtcctaagtttaaattcctctcctccgaagtataccaaaaataaaaaataaaaaatttacttaatgagccattttatatgtttttttaattaataataataaaaaaaataattttattattctcaaactcgaaatacgtacacttaatacaattatgtttttttttatataaaattacactaaaaaaaaagcttatcatgtttaacttaaaattgaaatgcttaacaaattcatttatttcatattttacatataaaaataaaactaattagtttaatggtaacacaagaaataaaaaagacatccaattcttatacttataaaaatctttcttagactccaacagtaaaactaccaattactcatatgcattactaaaacactttccttactccatttatttacctaattaacatagccaataatagcaaggctaataaaagcaagtacatttattcctcttgataaaaagggcatccttgagcagtaaaacctgaaacaacattaatccaaacttcattcaatctaccagtaattccactatgatggtgagaagaattgtactgagcaatggtgtaggaattactaccactactactactattcttattatccaccatggtcagtacttgatgagatttattaaggctgttcttaagtgattcaacttctttatcaatgttatcatcctcagcaaacccagaaaactttcttatggctatgcaatgacttttccacttattaagcttcagattcagatcttgtaaggctttggagttgctttatcatatttagtagataaataaagccttacataatagtccagcccttgtactgatgaattaacattattattaataataatggttgttaagataggagcacttattggaattttggttgagttaagattagctccatgtatgtactgatacaacctgattagaagtatagaatcatttaacccaattaataaaattatataaaatcacaccaaacataacatttattcaattaattgaggctttgggattaaaataaaattaaaaaa

SEQ ID NO: 219882 - DNA, 5511 bp, Cannabis indica
ggttcattcttggactctctcactagtcgaaataaagcaaaataacaaaattagttgagtggcatacacaggcaacaattcatagctagtgtggtggaagaagataaagaaacaaatataaatcaccactgaaaagaaaaaggtactcaatgatacagaaatagcgcgaaagagcaaagattgtatatatgggacacaggaaaaaaattattataaaaaataaatccaacagcactttaactcattaagccagcacccacagccattttacaaggccgttctcctgaaaaaattattagaaacgccttcctagcatggaaaatagtacagctacaaagattttttaaatactatcacttgtcgtaagacacattaacaaaattattcagctttgacatcaaatatttcttcaaaagcatatcagtaaaaaaaaaatcccaaacaaagtacaaaagaaaactcaagtccaatttttttttctttttggatggaagtagaccaaattcattagaagtctgtccaattgaagtataaagacttgatatttgaaactgctgcctcttagaaaatacacttattttgcagtaaaggtaaagccacaaatcttagtgaaagactgaatttgttatcccatatttgctttttgtgaagaaataccaattgaaataccaattgaaaagaacggtagctgatactgagcatgtttcccatctatattacataaccactatcatgttgtcattatttatttaaacttgatgtaaaaatacaaattttatatttcctaaccataaactaccacatagacagacacgtataaataagaaaagcaacgtcattcatatgcatatatggaaatatgtaagaacccaatacttaccattctacactgcaagaaaactataaacaaacattggctgaagctcatcccaaataaagtatatagtcactcaataaaatataaacatacatgccaaaatacaataaaatcattaagctcacagaaaatacttccctcacagccaaatccataacaaacagcaacaaatattcaaagaaacttataaaactaataaagacacaacaaatagatatattcagagcaaaaaagctactaaagagaaaaaaaactcaccagcctgagcaggaggaagaggcttggaaggcagattagccgccttattctgcagagcaggagaagccgccggctttccctgagctgaccctttcttcgacggcgccgacgcagcaatagcagcagcagccgcagcagcctgcttctgagcagcgatcaactgtgatgggtcctcagcatcgtcatcccccaacaaatcaaaggggtttgcagtcgccattccccaatactaagaaaaagctcaacaaccaaaaagaacaaaaaaaccaaaaaatcgctgagaagagaatctcacagtgaagggcgaccacgcaaccctagcttaaaaacaactccatcaaaattttatataaatatatatatatatattcgcacttcactgtgtaaatatagatctgaaagagtgaaactttttcagtgtgtttgaagagagagaaaaaccctagcggctagaacagaagtgaagagtgaaaacccaatctaaataaataacaaaataatatttattattctcgattttttttttcttctacggacttcgactcgtgcggtatttatatatgtttaattatttatttatttatttttcaagatacggaaaatgtgaaattacgaaattgggtttgagtttttgatttaattacgattgtgccattaagatgagacgagatgacgggggagagggctttggtttgggcttatcggtctcgaatggttgatctgtttgccacgtggatggatttaagccgttgataaatgtccttattttttatttttattttgagattttgaggggaatttgtttttaatccacaagtgggggaaggaattgtaataccatgataaagttgtcattgtctttttcaatatttttttgttcgtattaatttgtccactttctattttgtacaatgagaaattaattctcattttgcaataattttacattggctaatattttcacccaattctatctttggccttcattcaattgtgttatgggtatgttgtgatcaaatatattatgttgggtaaattatgtatgtgattatctatgttgcatatggatgtatagtagagttgactacattttattcttcaagtttgaatatcatcttaagaaaatataaagtgtatgtaaatcaattatggaaagttaaatattgtaatgttaattttaaggataacgacgcataccacgttttttttttttttttgtgtgaaaaatatactacgtattttaagtgcattaatagtgtgtcttcatatttattagtagagtttattcctcaacgacggctcctaatgaagtaacttcttcaaaaaaatatacttatatccaccactcaatttgatttgagggacataaatccataatcacaaaattaaccaaaagtagcatttcttttaaaaatctttttggattgaactttcgatcatgctaacagagaaaaaaagaactcaatttggtcaatgaattgtagaagcatttactcgggaaacttatgcttaatatgaaagttagtatatagtatgttaataattatacaacttaataattatattagattttataatatatattgtgcgttttgataataattatatttgaattattattgtaacataattagaatgtatttaaaacatattctataattattattctactcgaataattaaacaacttagttatgaagaaaatcacgctttgcgctgtccattaccattttggtaaattaaaatttacacaatatattgttttcatcatattttgctatgagaattttaattttattattagttttaggttattttgaaatttttgtttttaaactattaacgctagtaaattgtactttcttaaattttttgtttgttaaaaatttcttagaattattcacagtgaagtgattaagtataagacttttgttaaattttatcctataatatttttgttagtgttaactaaggttttcgacatccaataaataaagttgtatgaaataattaatgagtgttagaagataagatttttacgtgatttgggcattaataagccttagtccacgagtcactgtacttattagagtatttatcacagagtttctccgatcgattccccttgatatacatcattgggaatatttataggcttataatggtggtaaaaaggccattattatcgtgtttgtgtgcaccatactttgcacaatttctcaaatctaattttagggcattgcctacttttatgatgaattttaggttgtttataggtgtttggtgggatttgacttatcccttacttatgacttgacggcttatttatgcagtcgtcaattgatgtatagggtctcatgaaatcaaagaatgatgggtttaaacccttaaacacgcttgtcagagtaagtcatcagatgttctttcccatgccgcattaaattcgtatatagtgtcttgatccttgagtgacatgtcatgtttcatcaatcctctagtacctttttccgggtagacttcactcgcagagaggaaaagacaagagatactcattgtccagcaagaccctctcggagatgactatttttgtcatactctcctgaaatattgagcaccaacagtaatgaatgtaatgtgtcttgttaggtgggtcctactgtcatctggatcgctctgagactgccacgtattttgggaaaaattatagacagcatttacccctcaagtcctttcttataattttgcaagatgagacttgcgatgtgcctcctggagtgttggcgtcatgctgcacgtgatcattttagatgttgttcattattttccctcgttattgataacaacgatttgatttcttactcaattctgatgccattagttactggacgtcagatggacatttgagtagtgtaactgtccttttatgcttgtatgtatgccaactgccccctggcccttggatcttggggtttttaatctttgagctaggatcgttggatggtcgatgatccatatcgcctttggatggtctataaaaacccctcattttccttcttcaagatttttaccctcatatttttaagaatcctcaaaccagttaaaattccaagcagcccaaactttcttttactctttctttgacgttgtcaagctcgattttactgacgttttgcaccagcatctgcaactactcgattttcttctatttgtaagtttctaaccacaagaactttttctcttccttattttatttctgtaacttcatttggtgatatgcttacatgaacgttttattgacactgtatctgtgatttttggggtattttccccaagtagtttttaactttcatcttttaggcaagaggtttatatgtcagggttagtaggatttgccattttcctttttcttcgcatcatttgcaccattgtttttcaccatggtgcagtctgcaccttatgcatggcatatgaaatttctttatttcttgatattcttgcatctagaaggggtctcttcttagcagttaggggacccacattccctttttgtgtttagggtttgatatgggactaactattgggttaattcttaccttttcagatgagtgacatcttgagggatctttgtaaacacaaattttgcacttttgacaaaaaaaaacttagaacttcactcaacaattagaatgtcgaatcttgaagcttttgcccaaacttcttctcaagtcatggtattgcggtaccctgtagtgacactatctatcgtgatgcagggtccagtcctggttccaaactatgtgcaccgagctactgcttgggaggcaaaagagttgcactcatccatgggttgtgttcaccacttaggagccattgtgactgagaatggaatcatgccccaggaccagaggttttccaccgtgtggccagggagactgaaacccccaataataaccatggagagtttggggcatggagacaagcacagctcatgtccgacatgatgcttctgttgttgaaaattttgtaccaggatctaaatttactagcatgtatgtttgattataaatttttaatctaacatcctaaatatgaattctctaaaacaatgaattaaacacatataaagttacaaaaaaccttacatttatggcagcaaaataatatgactcattccgttcagatctctaactcttgatcctttctgtcgtagagtatgatcaagatctgaacttggtttctcccttaggtgacaaaaacactacacaatcttccacactatcttgagtattaacttgaagtgtgtgggtaaatactcatacactatagggcacaaaattatgaaaagaagaagcaaggaattcgaaaatagaagagct

SEQ ID NO: 219883 - DNA, 2242 bp, Cannabis indica
aaaaaaaaatatatgaaattttagaagatttttttttgggcccttgagcttggtaagccctagatacatgcctagcctgcctatgtccagagtcgagcttgccagttctgggccaattgtagctgttgagttggcataatataaaatctaatagctagaaccatgtccattaaattaataatactttataatattaatttagaaagttaaggataaaaataggatgtcaccagttggtttgagctttaatttatcctttgaatttatttttgtcaactttattgtttttcgcgcggttgaagtgactgagcttcatctactctatactcttctcttcccattttcattatttctcttaaatttgtctatacgcaagggaattcgattcactctagttcatctataccaaaggcaaagggagtgatcataccaaagtcgacgaggggctcttacacattctagagaaagtaataaagcttattcaaggtattttgcatggatttgattattttttataatgtaaattgggaatttttgctagggctaggattttttcttctgagtatggttttttattattattattataatagagaagttgatcatcaaagatttgatcttttttcaacccattttaccttaaactagattgggtcgtgattttcattgcatgttttatgagattgtattatgaatatcttttaaaaggtctaggtaccatatgtaaatggatttggctatgtcctctattagtttaatttgatttttagtagcagttgaaatcgatatttttctttcttttatatagtttaaattcgtaagatttcgcttagtttgcatttttgataagattgacctattatcaatttattttatatcgaattttgattgtgaaaagaaaactaaccttctgagatagtttgattatcatgcaattttttccattttttattgttgagcttgttgaagagaatgatcattataaatagcatggagaatgcatattttacttggagttattttttgtggtgaatgtgtttactacttgttaaatggatgtttcaacttgttattgcataatcataaaacagttggattaaatgataactaattatgttgtttagcgattagtaggtatttatcgaaatttttggaaactaattaaataaaagctttaggaattaaataactattaaataaatgagacaaagaattttatgtggttctgacattaattatccctagtccacgagtcaatatattgtggtgtttacaatgaaaccctaactctggttctctaggtttctcttgaagaagatgaaagcttagagagtgttttggcaaagcttcagctatgtaattttttcatcccacctttgtgaagaaatacagggacttatataggcttaagtactggtataggcatacccatgacctgcctagggtttcttgttaaaagcccacccactgttggagtaaaatacataaaaaatactgactattgggcccccaagagggctctttctcgtggggaaaagggtccgtacagctaggaccattgttggtgcagaatacgtgtcgagtggaggttgcacctggtagacaaaacgcttagaggagccaccagacagaaaggtgtattcagagtaggtgtgcacactgccatgttatgacacgggggacaagatttgatcttgtgtcagaaaagtaactgtcacaagagtcattccagtctcgtttcatgacaagcttttggttttccttgtgcaattggtgtaaagaccgcttagcttttatttggaaattagcagataattagggtttcattatgaaacttggttattagctttgaattattaatttatgatgatttatttgaattcagaatgtattttatatgtcatatatagaaatttcataattttgcatgttttatgccctgcaacattggaatgcggtgtttggctattagaatcacatcctagtacttttagtatagctgggtagtataattagacattgggaatgtcagaaatagttgagattttagaattgacaaaaatacccctaagtgaccttttatgatttttagtgtaaaaggggcaaaatgatcattttgtcaaatcatgttttgtcttttgtgggtttatattatgtttaataatccgatttttaattcaattttaagctgatatttattttttaaaaaaaacctttaattcatttattcaaaattagaaaa

SEQ ID NO: 219884 - DNA, 2741 bp, Cannabis indica
aagagagaacaagcggtagaagaacaactaattaagcaaaggatgcaatttattataatttatttatatatatagatgccgcgaggtggaacctgttgttacctgcagttgaaatggtattggatcaaatgccaaccgatttccaaatccaagaaaatgtacaactccattttaagtagaatagggagacattcttcaagtaaaacttggctttgcctcttttctgatgtcttcatctgtaatctgatacaacagtccatcatcaatgtaattcaaaaacatagcagaagcaaaaaaaaaaggaggggaaggggaaagagattccaaattgaggagatgaacgtacaatgctaccgatggatttcaaatctagtgatcccagctccttgggtagttctttcacaatccgaatatcttgtgacaagtaattaataaaatgctcctcttgatagatatctctgaattgactgtgagatagtaatatgagattagctgatgcaaaaactaggaagcatgaagtaggactgttaactgtgctccaagtaaactcattgaatgtgaacaatcagcagcatatatcaatcaggtagcccttacagcttctccatttcataaaaatattataaacgcaaccttataaatgaaaaaacctacaaaaatagatgataggaagggaaaggaaagaaatgaatcaccttacatctttccaaacgctactatacaaaaatttaggaacaaccagagttgcattgagtaatcttgcaagaacgacagcattgcatacctgttataaaacagaagtgttcaaatttcataggtcgaaaaatgaaccaagaggctttccaattctgggaaagtactatttcaaattcggatgttaaccaaaaaaggaaataaaccacaaattaatgaagataaatttaatatttactcacagctactctctgctggttcattcctccatttgcagtaaccaaaatgtatccattctttccttctgttaaggcattgaaaaagtgcaggtaagaaccagcttaagtcatttgtactaaattaaaagaaaataacttgcccctttttttaaaaaggaaaataactggcctttaagaagctacaaactctcaaatcacatattcaagcaaagcacaaacacatttatatgagagatggaataagaccattaggctcccagttacgttggtcggcgcaaggcttccaagaagatgcaggaataaatggttccagccacaaatcttttggctcaggtttattctgtccctgtgttatataaaatacagtcagagcggtaaagaaccataaatagttatcatcactcaacctggcagactccatctaaaatttcagatgataacttgatctcatctcaactaaactgacttaaaatgccattcaaacagttgacatgaaatcaaatacctctgccaaggcatgagctgctagagccaacatccttccatagatccctttatgtgcactttttcctttaccaaacttcttccaccctttctgcagaagccaagagaaaaacaaaacaaaaggagaatctcaacaaccacgtttttgtcaaccaaattacctgagagtaaaaaacttttaacatatcacaaacctcatgtacctggcttgcttaaatgtatattttttttttttatttttttttggctctatatagagtaactaacataatttctgcatgacccccaaaaacaaaaagtttgctccttttaccaacttatccaatcacgttggtaatggtgcagtttgcacacagttcatttataagtacaaccttactttgtgtcacttaattcattcacaacacatgaataaatagtcccttgaacctataacttattttgaattgtttaattcaaaaaaataaaaaaaaaattattgttgttatatacacgaatcagcagattcccatttacacaaattcaaaagaccaagtggaacacaataataacaagtacataatacgtacccgtgcagagacagaagccgaattcgtagaagagcgagctttgggatggattccatggttttgtagccgcgaaagcatgatccaatccaccaacaaaaataaacccagtaagaaaatcaagattacgattcctttgactcgcttcatcccataccacaccttccctaccttcctcctcgctctctgctgccgaggcttctgcttcttctgatccaagagacaaccaaaaatgttaaacccatgaaacgaggagtcatacttagaatcgcaggatctatcagcgaaggagaaacgactggggccgggtcggggagaattagccggggaggattggcggctcctgggtgtggaggagttcaagcgagaattgatgaaactggacaaggaggtattgggttccgacagttcttcttctctatcttggtgagggagtgttgaatcacctcctgtaaaggccatggttgggatgagatcttagaaaagcagtaggagggaataagatattctgagtcttggaaaagaaaaaagcgaggaaaagctcgacgtgggtcttcttgcttttgctaattgcaaagcttactacgaaaatcaaaggaatgaactttggatcgtcggagtttcgcgggatttcagtgaaacgactcgtcgttttaatagatgctgtcctctttgtctttttttacctttgctggtcaaaaaaacataaattaataactttttcttttttttaaaaaaa

SEQ ID NO: 219885 - DNA, 4528 bp, Cannabis indica
ttgtatggtgacatgtgtcccttattaggtctcctctttattaaaaatatagttgtattgtgtactcttttcctttgaggaatagcaatacatctttttcattccttctaacatggtatcagagccaaaaaggctccccatggcatcaatagattgtactagctctaccccacaaatggaagatgaaaatatccaaaaccccattcaaaaccctaccatcactaacacacaaaaccctaatactacagccgcaccacctatctcggcctcatcttcttctccttccttacccccaaatttttcttcattcaaccaaaccatctcagtgaagttagatgacacaaattacctagtttggagaatgcaaatgcaaaacattattattgcaaatggtcttgaaggttacatagatggcactgtggcatgttcggcacaatttcccaattctacttcgagccaagtcgacccagcattcacaacatggcacagatacaaccagctgttgatgagctggctctacgcctccctctctgactcaatgctcggtcaaatcgtgggtttcaccactgcaacagagatctgggtctcccttgaacgcacctactccgccacctcgtttgcacggagcttcgattttcgcatggcgctgcaaaacctgaagaaagacagactcaatgcttcggcatatctccaaaaactaaaaaccctctgcaacactcttgcttcagttggggacccaatttcctctcaagaacatttgacttacctcttgaatggccttggactggagtacaatgcttttgttactccaatcttagcccggcctgtgaaacccaccattgaagaggtacatgcccttcttctcagctatgaagctcgtcttgaacgacaaaacgctgctgcctcacctagctcccttcaagccaactttgccaacctttcctttcccaaacaaagacctaaatcatcctctcaacaaccctcttcccaaccccgcttcccgtcccatcctcagcaaaattgcccacccactataccttcttttcatcaacctcgcaaccattatccatcccctcctcgatcccttacaccgtggcttccatctggtcctccccgtcccccttcaagacccccaaaatgccagatttgcttcaaaacatgacacactgcactaatgtgctaccaccgaaccaatctcagctttcaacctccacccccacgcctatttaatgcctatttcaccgaacaacaaccacaaactactccaccaccattaactacctcaccagccaacactcaaccattactacccactcctccgtccacgggtgccctcactgatccagcttggtatatggactccggagcttctcatcacttcactctcgatctgaatcttcttgagtctgccactccatattatggtaatgatcacattactatgggaaattgtaagttttcttccatttctcatgtgggcactgcatatctaccatcttcatcctttcctatcattaaactgaatcgcatttaccattctccttctttatctaagaatctgctcagtgtctccaaactttgtttggataataatgcttatgttgagtttcaccttactttctttcttgtcaaaaattagggcagtcatcaaatcattctcaaaggccttcttgatcaaggcatctatcgagtcacctcttcccccgccacatctcttgctgcctcaccacaacttctctacacttccaagaattccattgacctatggcactctcgcttgggtcatccgacctccgatattatctctcgcatttcctctacttgtaatttttcttttccaagaaaagattgcctaactttttgtactgcttgtcaattaggcaaatctcataggcttagctttaccaactctgtatctcgggcttcaaaaccctttgaattaatacactctaatatttggggtccagccctagttacttcaatcactggtgttaaatattttctcttatttattgatgattacacacatttctcttggttttatcttctaaatacaaaagaagaagcattcaatacatttctcacctttaaaaaccttgtttccactcaatttcaaagcatcattcaatcggtttgaaccgattggggtggtgaataccgctccttgtctcggttcttcactcaacatggcattcgccatgatctctcgtgtccccacacacctcaaaatggccgcctcgaacgcaagaatcaccatgtcgttgaaactggcctcactttgttagctcatgcccatcttctcgttcatttttggccttacgctttctctaccgctgtttatttaatcaatcgccttcctactcgagttttccattatgacagcccctatcacttactctataacaaagctccaaactattcattactccgagtgtttggctgccaatgtttcccctttcttcgaccttataactctcataaactagagtttcgctcctctccttgcacttttcttggctacaacagcaaacacaaaggctatctttgccttcatcccacctccaggcgtctttttatcactcgtcatgtcatctttaatgagtcgtgttttccctttgccactccctcggccgcttcaccacctacccatacacctcactcagtcattaccgcccttcctctctcggttccctccaccacaaatgctcccaatgttactccaattcattcatctccacatacttcatctccctactagtccatctcatcacatctcgtctcctccttcctctccccatacatcggcccgtcctgaatcactccacacttcccccaccccaacacatgttactcatattactcctctccttgatacccctttctcacatacaccttcatcatcatcttccaccgcctccccacccaccattcctttgatcgtagatttgcaaggcccatgtgctcttcctattgcccatactaatgtacatcccatgattactagagctaaatcgggcatctccaagcctcgtttgttttttagtgttgctgcaggtacaccggctaaatcgtctaactttcgggaggctagcaaagatcccaaatggcttgcggcaatggatacagaagtggtggccttaaaatctcaaggtacttggattcttgttcccccaccttccggttttaaggtcattggttgcaaatgggtgtatcgcattaaacttaatgcggatgggtccgtggaacgctataaggctcgcttagttgccaagggcttccatcaaactcaaggacttgactatcatgaaacatttagtccggttgttaagctgaactcaattcggttggtcctctccttggccgtttctttcaattggattgttaagcaacttgatattcaaaatgcctttcttcatggcgatctcaccgagaccgtgtacatgactcaaccagaaggctttgttgatcccgatcatccacaccatgtttgcaagctcactaagtctctctacggtctaaaataatctccacgggcctggtttttcaagattagtactgccattctccaattgggctttgttgcttctcaagccgatacttctctcttcatatacaggtctgattttgcagtaatagtgctcttaatttatgtggctgatattattgtggctggctcatcttcctctgctattgctgaccttcttacctatctcaacactcggtttacagtcaaagatctcgagcccctccacttctttctcggtgttcaagttcatcgatctacaaccgattttcacttgtctcaaacgaagaatatctgggatctcctcactaaaactgggttacttgacaccaagccggtcactactcccatggctcttacttctttatctctctatgatggtgagcccctcaccgatggtacttcttattgcagtcttgttggggccttgcaatattgtacgctaacacggccagacatttcattcacggtcaacaaactatgccagtttctccatgcccccactaccatccattaccaagctgtaaaacgggttctttggtaccttaatggcacgactcaccttggcatccttctccaacctgacattacaagtgaacttcattgctttactgatgctgattgggcctcatgtcctgatgaccaccgcagcactagtgcttattgtatatactttggattaaacctcatctcttggtcttcggctaaatacaaggttgtatcacggtctagtaccaaatcgaaatatcgagctcttaccaatggcgcttctgaagtttcttggcttcaatcccttcttcgtgaacttggcttccctcttgctgtcccgcctacaatgcattgtgataacatcagtacactccatctcgcctccaatcctgttttacatgctcgtacaaagcacattgaaatcgactatcactttgttcgtgaacgagtcaagaacggtcttctccaacttcgctacactccctccgaagaccaagttgctgattgtctcacaaa

SEQ ID NO: 219886 - DNA, 3743 bp, Cannabis indica
ttatttttttatttaaaaaaatcctatttaagacatttttctatttcaagagtatatatgtaatggttacataccttaatagaaatgcttctcccgccgcataatccctaacttatctctgttttaatttaaacgggtattaaggcagataggggtgggggagcaatccctgcctccattcaccccatttacattcctaaatacttctatctctaccttgggaaaaaaacactaccttttcttttctttgtgttgggtcattgcacattcgtgtgtactttttatcttggtaaatttgctaatgggtcatggagaaaatactctcataaaaacactatagtgtggtgaaaaataaacaaatttatatcacattaggaaaatgaaatagtgacatgcagtagttataattttgctcacagaatagaaaggtgaatgaatatacatagtacagggtctattattacgttcctttgccttattcttcttcttattttttcttgttttttcgaaaattcaaacttcaaataattatttatcaaactggataacaaagctaaaaatacatacaataatatgtgatgaaaggttaactctaactatggtaaaatcactaaacacactctacaacatataacttaatatatataataatgacaaacaggtatataatatataatcagcttcatcaatccaaaaacaaaaagatgacaaaaaggaagaagagtctaagaatgaagaatagcatagtgattaactagagctaaagcattgctagtcatatgagcaaccttaacaatgttttccctcacagtggttttgacacttccattcataccattcccagaaaagccatcaacacaagtatcttcatcagtcaaagcagcactaacccaagtctcaatatcactcatttgcatctcaaagttgacatctttcttacccatttcaccaacagacctctgaagctcatccacagagtccccaagctcctcaacacaatcctttaaggctgcagcttctctaacagtcaagccttgggatttggccagttttgacatggctgctgatgttaaacgcaccgttttgagagtctctgagagagctgcccctgccaacagctgagggttgctctggatttcaaaagcgtggcttgagagtgtggtgaaacagaggtcagggtatgttgtggcaccacatgaggtcttgataaattctgtgttggaatccatgggttcgtttgataataagcctgtggctaccattacatagctttgaataatcatcactatgaatatgatgattaccattgttggctttttagatgaacaataataattagccatatatctatttggttctttgttaatggttttttaattggggtgggaagatagaatgagtatatatatgattgttggtaaagagagggtccctaggggtgcgatcataccagcactaatgcaccggatcccatcagaactccgcagttaagcgtgcttgggcgagagtagtactaggatgggtgacctcctgggaagtcctcgtgttgcacccctaaattttttaaaaaaaaaaagagagggtccctatctaataatgaataatgttattgcatgtgatatatagccaatgtagtgtcacatgagtccccctccacccccatataaggtgtttttttttatatgatatgtaaaatagaaaaaataaataaaaaaaattatgatgcactcacatgtcgatcagtcctattttttgttctttttgaattttactgccacagctatgtaataggagtactaggatagccggataggagaggcatacaaagtcatcgtcacaaatatatttcaatgaaaaacaaaactactcatttcatgaataacatttctgttattatggaaaaggttgtagttagttggtgatgtttaaaaatgtgtagtttggttttaagaagaacggtttggacgacaggtgtgaaacccataaaaaggtgaaagattaggtttacactaaaggtacttttgaaatttgaaactattagttggaccctaaccagaattagtgataaataatacgattaattaagagaatgaaatagatcaaaaattgaagtgacttttgtccatattttaaggctcttaaatttgaaacctagacaatattgattatggtccccttagttagctggccttttgtttttttatgttctttttttttttttggtggtgtggagcatctttcagaaaattgtgcctaaatcacagccgtaataaaagtaacaaaaaaccataagtgataagactcaacttcttcaccgatcacatttcacttagatttctctacaaaaccatattactttgtgtgaatgataatgcataaaaagccaatgtggcaagacaaggcaagcatgtgcattctcttcccataaaagcattactcatttaaattcttgggtccccaaacctaaaattaggaactatttgtcactcttgttataattcaccactcatcaaatggaaacttcctgactttgccaacaaatgaaccactctttcaatgagtacttgaaacacattatttgaaccaccaatcaataatgaagtacaacaaagtaggaaatacaatataataatcatatataacattgaaatgatgttttaaaaatacaatggtaagtcaatttgtaactggtaggatccaaaacattgtttcaatgagatgaataaggtgtttcttcaataatacactagtatttaatttgcatttatttattcatttattttttaaagataagagttttttgtagaaggttagaagtaagtatacataagtacaacaaaagtcatttgctttaagcaaatgctttccagacttgatcaaatatatgtgaaccaaatcaaatctgttgggaaatgatatagtaatgggcttcctatttagatttttggagttgtgtaaaaaagtgaattaccattagcattattcacaccttggctggctggctgcagcagcatcatggttactattcatgttcaaatttaatatggccttaatacatctaacttacatttttaggagtttgacagaatatttttgtgaaaaagtcatttttataaaactaattttcagagcacatttttgaagtagtcataggcggacctaagggtgttgagggagggctctcagatttaaaaaatatattaatatacaattgttactttcatatatacatagtagttaaatagaacaattagttaaaatgctttaaatttacatgggagactatgttctgaatttccttcctcctttttttctaagtgtatctatattttatttattaaaaaaccaaatgaagtataaagtttaaactaagatcgaacttatgaccattagaataggagtatgctcctaaattatcattctacttaaatttagctagttatttattgttttagattatattgaatgtatgactaagtctaccctaaaattcaattatgagtccgccactgaaagtagttactttaattttggagcagtaataataagactcgtgcatagcaaaaaagacacctatcatcacaaaaaggacaaaacattttaatgacaatttttttcatgactaacaaaatgttattaactaaccacttgaggctagctcaagtggccataggagggtgcatgtgtgttggaggtcctgggttcgagttccagattatccattgtaatatataaacgcttaa

SEQ ID NO: 219887 - DNA, 3797 bp, Cannabis indica
aagtcatggtaatcctcactattctacagtcaagattttgagtgcataatcttctttttttttttttcatatattatatatatattatataatattgtgtaatttattcatctcatctatctttcatatatatacatatatatagtgtaattttatcataatgctgacacgtgttaaatttttacactatggcatcagttattttcaaataatcaaggtcatagggttatttatctaacccctttagcctaacagcctcactccgtcttcttcaacacgatacacacagcaaccaccagcccagaaaccaccacgaaaactctcgcaaaccacaaccctaaaacccaatatctataccatttttacaccattttatccctttttttaaatcttctattttttttatatgtaaatctatatacccaaaaagttttttttttgcctatttcactgtaaatcgaagctattgaaaaaaagtagtggttttaacccctgccacagattctagtagagaaaatattgaatctcaatgtcaattaatgtataattatgatttctattcattttagtaatgtacattgctttattttagtttttataattgtttttggaatttttccattttatcaatattatgttgttgtgtatgtatatagtggccagatttttataggaattagtcgccagattgcgcttataaggtaaaaatttaaaccttaatatatagtatatatgtatgtattttatgttttgttgagtatgtgtgtatatatattttgtattgtgtgtatatatattgtgaataggaatgagaaaggaggtttaattagttagaaatgaagtttttaaaattttgttagggtgagatataatttattatatatgtatgtatatgtaaattttttaaaatttatgtatataatttactaaatagtaattaattactttcttttttttttcattaatattcatatatttttattactaactagttactcataagtgatataactagtaagtagtcaaataattaaaattttaattttgttgtatctaattatattataggttgtgagctaattttgaaggttctgaatactttggagtttattggattttagcttgctataggtatgtatattcactaactttttattattaattaattatttatcaatacttagttgagtttgaatgtcttaaatattcattcatggtgaagtaggttctgcattatattgtactacggccgagtaagtggaataatatgcatgtttgttaagtttgaatatcttaaaaatttaactatagtgaagtaggttctgcgaatacatgcactgttgtcggatgggtggataatttatgtattaatgttattttgttggttttttattgttttgtttgtgtgatttatgcatgtttaaaatttttgggaacgtccaattacagttgttatgctgctaaaatttggtagatttaagataaagtttactaaaaatacataaatattaaagaaaaagtgttacgcataacacaaataattgtgatcatgtctttttatgtagttgttgtgttatcgctaactttatattatctttgttaataatatagatatggcaaactcatgttctagctcagatacaaatttggacctagcagtagagtgttctaggaggatatctaaacaaggtagaactgaaatgaacaaaattagtcacttgatggactaagaaaaccgacttcctctccttgtcaacaataaaggagattatggaaaaaactatgcaaagctagtatcgacttgaggatttagatgccatatgataattgggttgtcctatgaaaattgaaagcaagtcaacccttaacttaaaaataaaatttggaaagatatacaaataagcggttatttgttaaaattttaatttgtgtttgattaatcaagatgttaactgtaatcatgtttgtttaccttaaaattagatgagttttatagtttgggatgatttcaaacataattgcatggtcattcccaaaaaatttgtaaaagatttcaaaaaaagaatgaccaaggacatcattatccccacattagaggaaaatgatttgtaacggttggcggacgtccctaaaaagcatcctaaaattggcaaaaatgacttgttgaaatttgataaaagtcgtctaactcttgaatttcaggtattaattatatttgtactaagataaacttttaaatataactactgataggtaatgtatttttttttttgcatggtaggaactgaataaaatacaaagggaatgatcggtgaaaaaccaatccaggcatcaaagtggtcggagcagaatggtgtacataagagaagatatggtaagtaattaatataaagaatttctagcaatatgcatcaaaatatattaatagtactcatttaatattttttaaacaatgaaaaaggaccttaatgtttaggatctcccacgccagcgtgtttggatcaaatctcagaccatgaaaataaaacttgtcactgattacgacaagaaaattgctgataagatagtaagtatatactaatcattgattaggtactaatgagttaatatagataaatcatatactaattgcttgaatatgtgtactaggctcaattagaggagcaagttcaggtccatggctaaaataatattctaatgcaagcgctcaggaaaccagagcttcctggatgtgtaagggctattgggtatgctagtacttaaaaaatattatttcattagttagacaaaataaatattccttaactttatttattaagttgtaggttccttgccaaggcgtgtgaactgtttgacaggaagaaaatggaagtttctgatattgtcgctcagaaatagagggagaatgagaaattaaaggcagaattctaatcccttaaacagaagaaaatattgtcgaacaagagcagaatgaggatgaagatgatgaagaagtacaagtagctcatcaggcgtatgttctgcaagaatatgcttaggaggatgaggttctacaaaattctgaaggaggcaaaacagatcatatcttttgagcaaccaaacagacatcagtgaagacttacccttgaaggggagcataaggaaacagagaaagaaaaagaaagaaagaaacagagagaaagagaaatttttaacagactaaaaactattgcagtcatccaataaaaattagataaacactaaataaataatataatttcaagaaaacaatttgcataacaattttacccaaaaacacactatttgatatccaaaaaaaatcaaatgtgcaaaacactagatgcatatattgaatatttctagcaatactaaattaactttcacaattcaatgtttcaatactcaacaagcttggagaactataagattttaaggcatatatttatgcatcacacaagttgcacaaacaagacaacttacttaaattacaagatatatacatcgatttatacataaactagtgagtattatatattatatatgagacagtctaagagagtagtcctcaaactttatctcacctaaagcctaaattaataaaaaatccacaaacttcataactattattatttaaaattggaaaacagaatcaatcaatttatgaaccacaatcacctatgatataagcaattgataatggattcaagatgctgaagagatgaattgagcaactgggctttgacaatttcaataattatctttgaatctgatttcagaaataaaaaataacataaaca

SEQ ID NO: 219888 - DNA, 1843 bp, Cannabis indica
tatattattttttatgttgttgtgttttatagaatatcgtaaaaatgtattaaacaactttaaatgtaaatatataaaaattagtattttgtgtaattattcattcagtggaatatttggtaaactttttttaatttaagaatgctaattcagtttttgagttgcaagagaatttttatttttcttttgaagaataaccttaaaagaacatacttaactcgaaaagatgtcaaggactaggatttacttgtaagctcgaataaaatcaaataactcagctacctgacaatagtatcaatcaatatcaaaatatatttaactaaaatgtgagctcaaaactaataaagagatatataattattttttttacttgacaaagatttataattgttgcgcccattccaataaattaactaggtattggataaaatcttaaaattaaacatataatcgtatttcgtggatgcacaaaatcacaaaaacgatagaattaatggtgctacatttgtattaatatataatttacagaaatatgtctctatgaaatgttaacccatatttctataaaatatttttaaacttagattgaaattaaccacaattcttattaataaatgatctaaaatgggcactaattgtttacattacaaatgtggtagaaactagaaactctcaactttactttgaagctcattaagatgagacaccaaccaaaatgtgagtatatttacagatatggtaaattttgtctttcattggtgaaaaggtttattcattgcaaactacatataaatttttactcacaagtgaaaataataataataaaaattgaagtgatttgatagtttatcagttccatgcaagaccaattttgtcgtttttaataaaagtagttggaggttggagggatatgaacagcattaaaacttatcataataattattgccaacttataaagaggaaagagacccacaaaacataattattattactaatcctaatcttaattaccttaataccatttggtttggactattaggttcatctagataagttttgctttttgattataatatctaaataaaaaagcatagaataaactaaaaaatatgactcatttgtttggatatataattactacataaaggtaataatttaaagattaatttaaatttttgtcttttaaattttgatatgttttagattatgtcttttgaattttgaagaccattaaaaattcttctgaactattaagacggttggaattaaggatttttgtctaattttagtaaaaaaaatttaacatgaataaaagttcgaaggatatgatttaataaatatcaaagtctaaagaacacgatttagtacatggataattaccgaattagtaaaattgaatgaaattagagaaaaaaatttaattccaacaatctcaatagttcaaagagaatttttaacaggcaaaaaaattcaagaagtataatttagtacatatttcagaacgcaaaaaacttaattagcttttttttaaattatttttgaataaatgaaaaatctcattaggcctaagccaaaataagtctgaagatttacattaaactccagtaattttggccaccgaactctttggtgatcaagccaaaatttgttgagtgattacaaaaatattaagattaattacgagccaaataaatatcttgcaaaattgaaccataaactgctaaacacgactctttcttgttcaacaacttagaaacaagttaggaatctgttttgacttcaacatggacacagccaagccgataacacaattggagacctaccaaaataattttaaataaaa

SEQ ID NO: 219889 - DNA, 2649 bp, Cannabis indica
gccttattcaagacaagctaaatcaacttatttgaagccaagctttcactccccatgtagccctgaaaatgagacacaaaatgatcaaccactttagggaaattatcaacaacaatttcctgttcagtaatgtatgaggttattctgttctcaatttttcttttcttcaaacaagcatggaaaaaagaagtgttctcatcacctttatgaagccaagttatcttgctatgttgccttaaaaagctgtgatacatcttctctttacacaagaaattttcagcaccaagcttctctttttcaagaaaaagaggctcccttaggtgagattgagcaagtagtttggattcatgaaattcattctttgcggcatggttagtcttcccaatatctcctatgaagtcacggctaaaattcttgagacaatgctttaatctcataagcttgagataaagagcaaggatacccttaacagctatgggcttctcccaattcttcatgacagctgctttaaactcagaatgtttgacccaaaagttgtggtatctaaagggtttgaaccctattttgttagaaatagcagtagcaatagtacatgagcagtgatctgagatggtctcccatctaaataagaattagggaacatatcaaaccactcctcatttgcaaagacgtgatcaatctttgaataaattctgctatctccatcttggttatttgaccaagtatagactgaaccagaacatagaattgcttcaacattaaccgaagttaaccattgagatggatcataagtgtcgctgaaagttctagggttccctccttctctatcacccgtattaaatacaacattaaagtccccaagaattatccaaggcttcacatgaaatctaaggtttgacaaatcctcccaaagacattttctttcatcaactgtattgtatccatatataaaagtagcacaaaaagtagcatcaaaactagacatttgaacataacaatgagccaactgtggtgatttaacaatgactatagttctaacaaagctcttcctccaaataatcaaaagcctaccttctattgtaggactagtaaagttatcccgattggaaagtttattgtccatcttatctttgatcttattcgctttgagtttggtctctaaaaaagatcctactccaaccttatttgtcttacaaaattcagcaacaacatcctatttatctttgttattgacactcctaacattccaacaagaaatcttacagttatccatgggaaaattgagatattaccttgtttccatgttcatcctgaactagctccatttcctctcgaatttcttgttcctacaaagcactgaaggtattgcccactgtatggttaaaatcagagctagagctcctctgaattttaccctgaacagtcttattaggaacatgcagtccctgtcctgtattgcacttagaaactggttttcttggcaaagaaattaaatctccctggttagaatctaaactgatagcaacatcttgtaaaggattatcatcataagtagagttttgctattttttctctagttttggcttctcactagctgctggttttttcttccattcatccttacgacaatttgccataatatggccaaatcctaagcattttttacacttaacaaacagccattcgtaatcaatactctgctctagcaattgcccatgttcattaaggtattgaaaggatctcgaggtgaatccgttatatacatctcaaccaaaatacgagtaaattgaaccctagtacgatctttagtatgttcatctaccataaaaggttttccaacagtactaactaaggcactgaggcttttgtttccccaatattggagacccaaatcgtgcaacagaatccataaaggaacagacctgaccagtttcacaacattcaagtcagttgtccaaggtctaactatgaccgacttcctatcaaattgaataactcctgcttccaaaacctcacctctagttgcctcatcattaaacttcaccatgatcagtcctttggacatcttagcaatctggactatcccaaggtgtccccatatttgtttgataaaaccttcaaaaatagccattggtgggttcacactaagaatcatacaaatagcagctgaattccatgcctctgtttgttccctaacctcctcataatccaattaagcaattttcaagccattaatttctaattagaggctttgtgtaaggaagcttcgaatcacagctcagaactttctctttagcaaaggtattctagggactcttggttgattccagaaattgcacatgtctgttaccctcttcctgttctaattctgcctccttagcccagctcatactaatttgaggtgtgtgaaactccgagatacttagagattgtcgaaacaagttctgacttatttcgtcaccaaaatcatcattagcaaccttactcatgtaaagagtcatacctgaagcatcttcttcttcatcagcgtgagttccatggctggaaacagcctcaggtaacttgatagcaggctttcgaactatcctttttcttcttcgccatgagagagagagagagagagagagagagagagagagagagagagag

SEQ ID NO: 219890 - DNA, 11048 bp, Cannabis indica
gagagagagagagagagacaaatttctaaggaaatttagtgcaaaatgaacatacctccctaacatcttcaagaaaagcttcatgcgaactgccataagccccagcagccaatctcaaatcgatagtcctgaagtccaatggcctggataccattgctggcaatcccaaaagtccctcgtcatcattatcggtagagtttatcagctttcttcccagcaaattgcagaagaattttgagtcatctgcagcagcagcacgacgtaatacaatgcggcactgtttcatgacaacatcagatatagagatgacagttttcctcttcttccgtttatcaggttttggtggcaacccttcaccaccaccacatacatctgctaaaactgacagaacagctttctgtgttcaatcagccacgagaaacatttaaacaggtgcataaagaaatcagtagataaaagttcaaaaacagttctaaattatcataaccatacaggaaaaactaacaagtcaatttataactgcaatttcctgtcaattattgatagtaccaaaaaatacactagtagcctaccaaaagaaaagattaacgcaaatagcacctttgttggtcctgatgcattgcctttatagacttccttactgatggagtgttccaatattttctttgcccactctggtggatccttcaacaaagcctcgttgacgcactttctaattcttgttcccacatttgtggggagctttctgacaggctctaggaccttggcccactctggaatattaccatcattcagcaaattcttctcagaagcactagttgcatcaggctcatcatcctcaaaagtaagaacgtcattttctctgtccaccgaaccaaaaatttgttttgaagcctcagcaagcaactgaagaaaaatggacacaattacattaatatgcatttaattacctttctattttcactacccctaatataagcaagaaaacagagagaaacaataacaaaatcaactcagcacccagcgttatcatctggaaaaacaacagagaaaactacataaaatgcaaacaagaatctggtgctgcaaaactataatcctctgatataattaagaaattattataccataagaatacatcaagctctcaataaggtaaattagatccccagtagcaaagctaaaatgtctaagcattatgatttcaaaagtaactcaaactttgtccaggtaagtagaaagtataataaggctacaaatggatattcattccaaaaaagtcttggaatccaacacaaaagatgagcatcttgttcaatcacttaacaaggccacattccatactgtattatgcacaactagccaatttccactaagaagatatgtataccaaaaagaaaaaaaaaaaagtatatatatatatacatatttgtaacaaaggaaaaagtccattagaaaaacaaaattaataaatcaaaacatgagatcgttataaattatttctacagctcattactcatgaatctaacactaacggtttatccaagaagactgccaaatccccttttagttgcaactctcttaacacagaattaatactatctaatcactctcaggccaggtgccaagtcagatagaatggttggacatggctgttgaatttcaagtaaactaccttctacatatatatggagactacggaaaaccttttgttgaattttaagcacttatacaatctttgttaaacatgtcagtaaaggattaatctatggaaaacataaagaagtaagaaccaaacttacaagtgcatctgcttccatcccagcaacaccagtaagtgagccacaaagcaccccaccatcaccttgcaaacaccgaaacaccttgccactttcacgtgcgataatctcagcagagtcaaggttaccatccatggataagacagccaagatgtatctacgagctaattctggccaagtcaattcattaattggaagtatgttaagcttggtccttttgacaaaaagtgagctatcaacatctttcttccttcccctttttgatttagactctccagaatcaaaatttggatctacaagtgctgcaactttgaactgcagctcacccactagtacttggaggagtgaattgtgggcttttgttaaaaccacaccagaacatctactgtatgtaatagatgcatgtttagtctgagctgcttccttcattgctcctgtttccatttgaataaaggcaggggcatctgtacaatcagtgtcagttctcttagaattcaaatcttgattaccacgaatctcctgctcaaacttctctaaaagttctgagttatcaaaccaagggttactaagctcttgctcaagttcttctagagacaaaggcccttccaaacccaaaatatcataaaaacgccataatgattcccaaacctgaatacatagtaaaaaaggaataagaccccaaatccttactgagaaaaaagaaaaggcatctgaaatgataactatataattttaaaacacaactggcaagtacatgcatacctgataaacatcaccaacaagttctttaggaacctttgagcacaattgtttcccaggaggacgacaatgattatccatcatatcattttcaatcaacttggctttctttgatcttctaaataagccattcaaagtatcattttccttgcattctaagctacctctaatcttcggaaccaaaagcccattcccaattgttattgatgaagaatgagagctcctctcacaaagcatttgatattgtgaacaagcttgtaccccaggaagctgttctaatatatcttgcacaaaatccacatctaatccaaatctgtcttgattaagccatttttccactatatttttaagagagtcaatctctttatcagcgtgaattacagatgggatgtcaaaaccttgtgaactagagaatttctctaatgacagaagttccctttgcttgtgtcattcttcataacatgactggggatgtcaccatcttttgcaacatgcttgcagaaaaatctaaatgaacctctccgtttgaggatttagaacaagcattaacaagtttttctgaaatcattctccagaccgaagacaaggatttttcttctgctgagaactcgccaatttcatctatggaacccatctcgcatgaaccattttcagaattttcacgggtggaacaacaagcttcttgctgcgattcgatagatgtttgaagattgctaccaccacctgagcaatttctaagacaagacaagatatcattttccataggtgggcaaggatctgaaagaatcattcgaatactctcgatattatcacaagttccatcactttcatcatccattggactcaaaaactgcccagagctctgtctaaagaggacagttgaacaatatggcacaggtacagacgagcatgaaagccttttgactttaaaactaggtccaccttcaccaccatccaaaatttcacatacaaaaagagaaccagtaatcttatcgtgccaacaagacttaaaccctacaggccagagaaatctagcatcatgataagaaggtctagtgtcaatctttcccgtagaaagaaggaaaaaatcttcaaactgtagaggaagtccctcctgaaatgaaaaacaaacacaaatttaagagaaagcagaaataactgagggaaaagaatttcaacataactacattgccctcctaccacaactacgagaagcatagtaaacaaaataaaatttaataacctataacttacattatttttatcagactccaagcaaccaatttcacctgctccaacctccataaattgtgcattacagtcgaaagtcattgaacgaacttccatacttggaccattggatggaagatccttacaataaccaccaactgaggttcccttattttcagaaaagccattggacattgcaaatcttcttgcctttctttttctgggtaaattagttttttcagatatagaaaaaccaccctcaattcttctttcaggctccttagaattgtacttagagttagacatcaagccaaggtagcatgcaacttcataaactgaatcaaatgtcttcccatctggggaacaataaactgcacaaaattcacaactgcctatagattgtttaagctccacacgccaaccttcctctaattcaccatgcttttcagaaacaaaatccctaagagcctgcaaaaaaatatcacttgtactcggagatgataatttaaaacctgtattattcctacaccttcctaatggaaaacttaaatctacttcctcaaagcttttccccataacatttgtatgatgcaatatatcctcaaaccccactttaactgtgtgtgttagaagcccaggagccttctggaagccaaatccatttcccgcgcacaaaaagtttgaatatgtcactggtgcatcaaatggattgccgccaaaagaatcaccaccaagagtatgctttctaaaaccaaaaataaatgtcaacagtaagtaaaatgatgaaaaatgcaagactggcaggtttattactagcaactaaggtaaattcatagttcatgatagagaaaccaagatgcattatatacacatcctagaagcttgaatatctctcaatataaacaattactttcaatgcaatcgcttacttatttaacgatctacaacacatgcagccattcatctcaataatcacatctacaatttcacttcaatcacctagggcaatgcccgaaattgaattctataggcaatgcctcaagaagaacattacaaaacaggcaaaagaggtttaaaaacaaataggtccaccggtgtgtgtataggtgacactcctatcctatgacactctcccttccataacaattacgagaggaacaatataatcacgtgtaaccaggcttaagagtgcaatatgcattaaaataatgccttgaagaaccttactttttaagatctggaaccacaatctccccctttttataatacaaagaattagtctgaaataagtaatgctcttgcaacatactattgcaacgacatgtataaaaaaactatgttgttgttttcattgtttctctacattaagaagatggtagatccttggatatttaggtttgtatttggctactaaacatgggcaagatgagcacaaatgacactaaagccaatatatgatctatgttcttgataaatattggtgtacaagtttggcctcttctctgccaagatattctgccataagagagtggaataagatcggaatcaagaagaaagcaaaagcttcagaacatatatgtagttgcaataccgtggactctttggttagaaagaaacaataacacttttcaagattgaaatttggattgtaaacaaatttaaaaacttgggaaaagaattgcctagtatattggattttcaacacttgtgactataatgttttcattttccgatatacttggtgtgtggcccacttggctcctatctaatttgaatatgatatcttaacttatagacccttgtatccaaatcatcgtaagtcactaaataagtgaaagtgaatgcagctaagaacaaatgttgccacagctttaatgcaactaagtaaatttgcaacagtatatataaatttccacgttttggcaccatggcccaatgcaatatcgtattattcatcaagcccaacaccagcataaactcatggcaacggcacatagaagttatgcaatgcaatgaatccagtagttaatttcactaactacccccatggcatggctgttaaaattttcataagtgaaaaacacaccaccaaggcaatttcctagcagcataggtttcatgactaaaggttactccaggcgctgccattctgttattcaagtttgaaaaaagttaccatctaaaaagtagacacagtaatgggctactggtaattcaggcaagtgaaaccacgatgcatgcagcatcgtccctaaactaacgcatatcacttccatacacaatgcaagtattttaaagctaaataacaaagctactacaacttcatctttgttcaggaaaaccatacaaccatctataccaacaacgattggactcaagaaagttttattctttgcatatgtgattatgtgagtatctactattcaatcttcaaaatcaaatatcagaatgactgaagtaacatacctcgaatccaacaagtcctcagttccctcggcatctccgtctacatcgctcggcggcgaagcattcatatccaaaatccgcttagacttgccaagaggccaacgtttactcttcactccactacactcacactcaccacagacccactcctccataatcgaaaccagagggccccgcattctaacgcagccaagatggtacccacgctcgcaggcgtcacacacgacgacgtagtcgcgaccctccggcttgccacatacggagcaataagagccaaaagaagctaccggaacaccagcaggaccgccgggaggcggcgaagggttgtcgtgataagaccttacaacgtcaatggaatcaagaggaagggtttcagtcggtgaagggatctcattaagatcgatgccaagaaaggaacgagtcggttcggcgtcaccggcagtagaggtagaggcaagcttagggttgttgtctctgagttcgtcgctacttgaatcggcggtgagttccatcatccgagtcggcgagttgttggcgagttccgatgtaacgctcgtaccattgttttgggggtaccaaaactttgagaaatgtatcgatcggacggccaagatttaacgacgcccccaaaaaaaaaaatagagccaaaaaagaggtttccttgcttctggttcgcgtttttgagtttgtttggccgtttgggttaaaaaaaaaattggttgggttaagaagaagagaatgggaccaaaagaggaccagtttattttccttttttaattaattactttatcagtaaaataaaatatttaatatttattttttttgattaattttaaaaaaaaaaaagttgggtggagacgccacgggattgtagttgaaatgggctgttaaatgccacgtggcagaagtgtgttaagagtcgaaactgaagattggtgttgttgtttgtaaggcaactcccaaagtcccaaaagtacaaaatatctttacgtcaaaaagccgaaaaaacaacccaaacacagccttaactaaagtgaatcataataatattcttaataaataaataaaatcaaaattaattaattaattaatttaaataactctgacctgttatttcttcttttgtattggccaaaatcttaattttcctttgtgattataattatggaaacatgtcaatgatatcacccaacttagaattataattcaaattttggtctaaaataaccaaataagattttgcggattttggggaacttataatatactaccgttagtaagaaaaataatttataattaatgcatttgaaatttatgttttgaattatatttggtaaaatggtataaacagaaagaatgagcaatggattaacatggatagatgcaatggatatagatgatagtgatttttctgtaatattttgtatattttatcttcactgtcactaataaattgggtattatatctatagagatgcatgtcattaaagatttcaataaattttttaaaattttgatgaaaataaaaggttattttatcaaattagattgaaaaaggaatttgtttagtagaatgtctatacacttaatcaggtctaaaaaatctagaaattgtagaagtactatataggaattatggtaaaacaaatacaaaagaatttgacttgattcaacataaaatgtcttttttatggattactatgtttattgatccaaaagtattacaagacataaacattacatgagacttgtcacttgctcaattaacacgagattatatagaatttatcaattaaactctttgttataatttttcgcgaaaaacttttaacttacaaattacttgaggtctttaaaaattcctatatcaaaatagctttacaaagggctatgtatagacaatagtttataattgacttaacggtaatgatagtcaagataccacataaataatctctcttaattaagtggcttaacttgattcaccatataatgtgttatgttgtggattaatttatttgttgatcaaaagagcggacacaaataccgatatgactagtctcatttaacactaactaacacataattaatcactcaaactctttatggcggtttctcgcaaaagcccataacttacaaattgtttggagtctttaaaaactcctacgtcaaaaataacctcacacatggctatatatggacaatagcctataattgacttagcggtaatggtagctaagatactacataagcaaactctctgaattaagtggtttaattataatcactactatatttgttccgtgaaattatttattttacttgtaaaagaattttacttgattcagtataaaatgttttttgtcgtagattaatttatttgttgatcgaaaaagcgttacaagacacaaataccaatgagacttatctcatttaacactagattacatagaatccatcactcaaactctttattacaatttctcgcgaaaactatcaacttacaaactatttgggatgtttaaaaactcatagaaatagtctcataacggactatacatagacaatagcatataactaacttaatgataatgacatctaagatgccacataaacaaactctcgtaattaagtagttcaatcatataattgctcccatgaaattactaattttacttgattcaacataaattgtattttgttgtagatttaaattaatttatttgttaatcgaaaagcgttacaaggcacaaataccaatgagacttgtctcatttaatactagattacacagaatccatcactcaaactctttattacaatttctcgcgaaaactctcaacttacaaactatttgggatatttaaaaactcatagatcaaaatagcctcataacagactatacatagacaatagcatataactatcttaacagtaatgacatctaagataccacataaacaaactctcgtaattaagtagcttaattataaccactactataattgccccgtgaacttatttattttacttgattcatcataaaatgtgttttgtcgtggattaatttattattgatcggaagagtattaaaggacacaaataccaatgggacttgtctcatttaacactagattacacgaaatccatcactcaaactcttcattacaatttcccgcgaaaactctccagttaaaaattttttggggtgtttaaaaactcagatcaaaatagggactatatatagacaatagcctataacttacttaacggtaatgacaactaaaatgacacataagcaaactttcttaattaagtggcttaattataaccactactataattgcacacgtgaaattatttattttacttgcaaaaaaaatttacttaaattagcataaaatatgttttgttgtggattaatttatttattgatcaacatagtgttacaagacacgaattttacaccaatgagacttgcctcaattaacaccagattacacagaatccattactcaaactctttgttacaatttctcgtgaaaaactctcaacttaaaagctgtctggggagtttaaccttgtatatcaaagtaacctcacaaaggactatatataaataatagcctataactaacttaacgataatgacagctaagatgacacataagcaaacaatcttaattaagtggcttaattataacaacttctataattgctcccgtcaaattatttattttacttgtaaaagaatttcacttcattcagcataaaatatgttttgttgtggattaatttatttattgattgaaagagtgttacaagacacaaaaattacactaatgtgacttgcctcaattaacaccaaattacacaaaatctttcactcaaactctttgttacaattttccgcaaaaactctcaacttacaaagtatttggagagtttaaaaattcatatttcaaaatagcctcacaaagggctatatatagacaatagcctaaactaacttaacggtaatgacatttaagatgtcacataaacaaactctcttaattaagtggcttaagtataaccactactaatttgctcccaataaattatttattttacttgcaaaagaattttacttgattcagcataaaacatattttgttgtggattaatttatttattgatcaaaaaagtactacaagacacaaatagtacactaagcgacttgcctcaattaacaccagattacacaaaaatattttactcaaactctttgttataattttctgcaaaaactctgaacttacaaattgtttggggagtttaactcatgtatcaaaatagcctcacaaagaactatatataaacaatatccttaactaagatatcacataagcaaaccctcttaattgatttttaattataactactatatttgctcccgtaaaattatatattttacttataaaaaaattttatttaattcaacataaaacaatttttttttggattaatttatttattgatcgaaaaagtgctataagacacgaatattacaccaatgcgacttgcctcaattaacactaaattgcacaaaaaaaattcactcaaactccttgttacaatttcttgtgaaaactctggaacttacaaactctttggggagtttaaaaacttgtatataaaaatagcctcacaaagcactatatatagatgatagcctataactaacttagcggtaatgtcagttaaaatactacataaacaaattcatttagttaagtagcttaaatgtaaata

SEQ ID NO: 219891 - DNA, 3699 bp, Cannabis indica
atgtgtttttagttcataatatttattgtgactaaaactaaattagtgacaacttgtaactaaatattatattttagtcgcaagtatcttttttgttgtaactaaaagtctcatttaattacaaaaaatttatattgtgactaaaaggttgtcactaaagatagcagtttttttttttgtaataatgaccaactatatgtaaggcaagaatggtgataatgcaatcccttttcatctcaccatttatgtctaattaccacaatattcttaatcatcacttattgtccaataaaagaatattgtgtaacacctttcaagcccgctaacttggcaatatactcaagcctaacaactatgagagtctaactaccatatatgttattaatttgtagtttctatatatttatttgtcaaaatatatgataatatatttttggagataactaaattagaaaagtgtaaattgccaagaagtgaacaagaatgcattgtacttattaattcctatttaggagaagaatgaacgagttgatcatttgataacaacaacttaggattggtcaaataagctaaatttatcataaaattttcaataaatttcagttatcattatatataattgttgaattcattttctcatgaatgtcctttagataattccataacaaatatccaatcctactcaatttaattctactctccaaattgacggaatcttatgtatattattatgttgattacacttttactaattttatgtaaattttagtgaattaaagtatgtgaaactgtgtggattttgtcaaattattaagattggttctaacacatgttatgccgaagcgtggtggagaaagtagagagtgaacgataggatttcattttaaaattaattgataatgaaatgagtatttcaaaacatactttatataaaaaataaattaagctcacacacattgtcattatatgtgcaagatgaacatgaacattctttttggtctcactatcttcaaatcactaataagttgacttttttagttctacttcttggaataatttttagattttggtgaccccattgtctctattatatttttagattggattacgagttttgtttttagctatatcatgtagtttcatcttaaaaacaattttcaataaagaagtgttagaatttgggataagataaatgaggttccatctcaaaactaattggcaatgaaaagagtagctcattcctcttatatatatattttattattttttcatacattagggatgtgggataatttaatatgatatattaagctgtcacacattatacttttttacaatacaaatttttctaaaacagttataatacatggttaatatatttatactggcacattgaaaaagtaagtgtagtataattaatatggagaagatgtactaattaatttaaaaaataacatacattataattcaacagaactatatatagttatagatatataaaatttaacctatatatcagtgacattaattagtatttcatctcttcatatatatatgaagacgaaatctttaaacctagccactgtatatataacatttctcatttaaaaatatacaactggtataacatactttattagtaatccaatttggtggttctctaaacaacgacatatgaacacagcctggagaaaaaataaaatagaataataaacatattaattaatattatgcataattttataggtttagtaattggttgaagtatataattaagtacataaaattagtctcttcaatcttaaaaaatctttaagtagtggtgagtaaaaatagtttttctagataagaatgttaatcaatattttgaataatatatcacaaaagtcggccagatttacaatttttttatagtcataatataaataaatatatatagtactctgtcttattcttgatcttcgaatatatgcttattaattatgctgttagactaagaagtttgctttttatattctattttcaggaaaaaaatatacattgatttacaaaccctagttacttatataattagtttaatataaaaaatatggttagtattgtaacgtattaatgtcgtgaaatgtaatgtatcatttaattaatgatatcttaaaggctagtgtccattgagttgtcgaaatatcattggataatgttattattttaataattctaattaatattttacttatgaataggaggcatgtaaatatcatcactacaaccgacaaagacttttacattgttggtaattttgtttttaatcagagttacattatacaaaaatttatctaaatttaattaatggaattgcagatgttctatgccgtttgtaaattttctattaagagtttttaggtcggttttctgatgtaaaaatcatttaaggacttcatattaagagtttttaggtcggttttctgatgtaaaaatcatttaaggacttcatattatgatgtcaataaagtatgtagtgacatcaattttattgcgcaattagcgtaaaagattataaacaaagcgtcattaacttttttttttaatttctcactttatcttaattttaatcacccatgatcattatttgttcgaaaaatacaaaaattggctcttgtgtttagtgcgaatacgtgataaatttcgtgttttgttaaataataatttagtgtaccatgtttttggtaaaataaatcaaattgatatctcgacctcaatttaattaatttggtcaagtaatttttcaatatgtctaaatctgagaggtttttgttcgacctaaatcaaaagtcatgatatctgaaaaattaagctcacagtaccaatgtattaaaacattgtttgatctaaattgagttaaagatattattttcatccatgttttaaacaaaagtgtggaaatcttcacttaaccaaatacgaagagatgaccatgaagagatgtcaggataggccgggtaaccagggtgacatgagaccctaccaactggacaaagacagacaaagaagagagagcaagcctccaaacaggttgggctatgctgatttcattgcttatgcaacaacagttgcagaagaagttgatagcacaaaacctaacagttataaagaaataatcaattaattgtaaagatgttgcaacatggctacaagcaatagagcaagagaagctgtcccttttgaaggaaaagagatggattatggtcactactgcaaattaattttaagataaaaggaaggaatttctgggattataaaagcaaggtataaggcaaggctagtttccaagagactcataaaaaagaaaaagtggatttaatgagatttttcttgagtggtcaagaaaatttcaataagagtcatgatggctgaagctaccaagcttgatttagaaattgaccaaatgcatgttagaaaacctattacatggggaattataagagaatgtgtatatgcaactgcctaaaaggtttgagagtgaaaatcctgataggtagtgtttgctcaagaagttcttatatggtctcaagcaatcttcaagcaagtgaactttgagatttgattctcatatggttaaaaaattggaagtcaaacaaaagtaaaaagtcaaaatagatcaaagatagaatgaaactcaagatgaaaatccaaatgaatgag

SEQ ID NO: 219892 - DNA, 1734 bp, Cannabis indica
ccttccttctcttttcctctttgaaaccaaaatggtaatgagcttttggtttgagcactcttttctggagcaattacagaataattgttgaagggatttatctcagtgtatctatatatcttacctttctgatgtttatgttgctgtattacatgaaagttagtgaccaaactacaactctgattgtttgttgtgttttatacagttttggtatagaaagttgtgactggttagatcatgcaggtgctgggaaatgcaggatcttactacagaaaatcagaaatgtgtactgaccgtcgtcttgttcacttgtaatatcttttgccgacttttcgtttatcttcttcctctgtaaaatttgaaattctatttgttatggtcaatagaacttaatagcataaatcttctgcttcaagtttagctctaattttgtcctcatcgccactaccacgggaaatactctttcccacgatggtgtcttcctcagccatggttatgttaatcaactcataaaatgaataaagggtcaagttgaagataggcatattggccttaattttctgctacagaagtgagctaagatccaatttgagggctccctttatttattttattagacttttggtaaaagattactgctctaaactattcaaatgtctgttatgaaatcaaacttgctcttaatattctttcttaatacagtttgctgtcagaaccttttccctttccctaatgtacaaatcatgcatatacagttttcagaattgaataaaaatcatgcatagggatagataggtatgttttttcagtcattgctatgtgatgatgagtaccctcttactaacttatttagtaatgttaaataaatatcccacaaccttgttctatactctgtgatggagttgctgctggtagttaattcaaaaataactgtttttactattaaacagcccgcgcaaggcaggggatgccttctctgcggagaaaatatccattactaccctatcctactgattgtaacaggttgattgagtgggagactaggcaccactcggctctttgtgccttccaaagccgaggcccgagacctaactaactcgagaccagtccccctaagcaccaagctgagaccaatctttcctccaccatgtgtacatagcaactttcctctcactgtgtctatagcaacattcacattagctttgatagtgcctttcgacaacttaatcaacactggattaattacattgattccctcaacaactctctattgctccctctaacttttggtgttagctttcctctatgaatctaagtaatccaaagaccacttaacaataagatcaaatgagagatattttcatgcaccattttgttcccttctatgccaaatagacaaagaataaactaacacatgttccatcttttttttttcaagtgcaacatagtgatattataatttactaatatctttggagttttaagttcgaaatcttgctctctcccttttccccatctctctctctctcttggatttggctcaaaagtcaaattgccttgaagttgtaaatatatggtttaataattaagaaatttagaacttattatttgccacatttgtcaatgaagttatgcaatagctattgactaatactctcatttattatatatggtttgaagatgagttatatctcattaattatatatggttgggagataaattacctcttatta

SEQ ID NO: 219893 - DNA, 2382 bp, Cannabis indica
ttatttaagttattgtaattactcttatttctttaacatagttttatgttgtcttatttggttattggtttgtgttttattttttaatgactcactataaatttgtataaaatgtgaagtaaactaaatataaatatttttaagattaattataatacccttaatttttgtaatttttttttttaaatggtatgggaatcaagagtatgattgagtagttgattagttttttttattattattataattctagttgtatttgaaccgacagatgtttctattaaattgcagattactattaataaaatattcttccaaaaaaatatctatatataattatctaatagagtaattaatacgtgtatttaaaatatactattacatactgatacagttacgtaactgtatttttaaaataatagtctcaatctaattattttaacagaattatcacgtataccaccaaaaaaagattatcacgtaattcggcgaattgtttagtacatgtttttgattgttttttttaattatttaacatctcatcactctatttaattattacatctatatatgatgtagacgtaaaatagttttgtgatcataaaagtcttcatgggtttgttaggactattttaactatcccatgcggattaaattagttttcaataaagagattattacattagtgtctgaccttatctcaaacaaagaattagacaaattgatcgagtatatctggtcattgacaatgatatatcactattatataattaaaatattatataattacaatcccatcaatcattaattaaatttagaatgagaaataattaatatgtgcacacataattagttaaacataaatgtgacacatgtttattgtaataagtcacttcaactaattactagtcacacttactaagttgtcatatttatatgtggtttatgtattccacatatcattactctttaacaactaatccttatcaaaacaatgaataagaattcaatgtatatatgtttttcattattaattaaaaataattaacatattaaaatatataaaatatatatatttatctgtaacatataaaatgaacgaaattataaaatattaaatttggtctatattttcttttttaaaaattatgagtttatttttctattttttattttttatttttgacttaatttcaatttgaccaaatttcgaggcaaagtcggctcaagtatatgacagtttaggtcattacacaatactttctatatttaaaggctcattttttatcatcattatatataataaatattttttgtatagtgtataatatataatataataaatattcataagaacaaatatgtacctttttttttatgaaatgtagcaaatatatacttaacacttacaaaaaaataataataaaattttgtggtcccaatacacatgatttaaaatttttacctagtaaacctgtataatttttgctcagttttatcgacggaactggcaaaaattatagtttactaacattgagttagttctgtcaatacaggccgaatgttttgatacagcacgagctcgggaggtacatgcatatgacccaacacgaaaaacaatatgagcttaagcacgatacgatacgatgctgcaaatcaacatagcacgacatgaaaaaaaaaatagacttaagcacgagacaacaagccccaaggctcaacacataagcaagaatagactagcctaaaagtacgacatgttaataataataaatatgtatttattaataattattcaaattctaatcattttaaaataattatatgtaaattattgttgaaaaattatatataaacaattgaaactataaaaatacatataatttagtgagtaacttattaattgtaagaaataacggaaatatggagtctaaaattgagctcgtacaagaaaatcgactaacccatttatgataaacgagctggctcgagtaaagtacggtacgaatctgaatacgataccaaaatatgagcttacaggccatgtcagatttactctttcaaaatataggtcgacaggacacgacccatattactcctttgcgttttaaaaatatgagtccgcccaactcaacatgtatgtatttttaactatgcattaagatcgtctcaagtttttaggagaataaaattttaaaatgaatcattttttctaaaaataataaagtttttttttgaaaaaagaattgataataaactttcaaaaattatataactgattttcttttctcccttcacatgctaaccaattaatttttatcaaagaaataaaaaattactactttcttatatatatatatatatatatatatatacatataa

SEQ ID NO: 219894 - DNA, 4796 bp, Cannabis indica
tgtaatttttttttggattatacttgagttggattgtttaggaactccatttcaactttttgagattcgcatttcatggatatgaaaattgaagtcaggacattagttttatgagaattaaactggatttatagttaaattttagtttcgtaatatttttttttgcactttttttcatgaatttgaaacaaccctatcttaattaattccaatcatcttctcaggtgtagtcgctgaaattaatggtgattctctttttacttgcattttatttcgattgtgttgggttgttgggtttgtcgatcgaaggttgtgtgcatgaggttctttatttcattctgtgcggctgaagtagtagaagaagtggtattttagtaatatttagtttatgaattgtattaatgttcatagggcccaagttgacattcccaaccaaggtttccgtttctggcatcgtcttagtgaaaatgggtcaaaacttgcattagggcattaactagacataccaaggacatatttgaggcatcaaaattagatttgaaggaagttcatttttgagcatctggtgcctaagtattagatcaacgatccaacttttgcattttctttgtattcataaaaaatggagaaatatgtactttcgaggaagaaaaagcatttcttgggtgctagaagcaaggtctagtgcctaggttgacacctagggctggcctagcacccaagttgacattttgtgaacctggcctgattctaatgattttttttaagaatcttttgagcatcttctctattttttgtaaagattaagattcaactattttaggggaaggttgacatattgtcaacctgggctacttctaaccaaattctcaaaaaagtgtttcgggcattttttccatcatcagaaataatgaaaatttatgcaaacttggggagaaaaccacaatcctgagaccctggaaacagggcccagtgcccaggttgacctggtgatgggtctagcgcccaggttgataattaacctggtgtgctagttttgattgcttaaataccaaatttgatttgaccattgaacccggaatggtcaaaatagggtaggagatctcgtcctcaagttcaagaaccttggaagtatcaaaatgacaaactgggagctcaaaaatgaagtactcagtgcctaggttgaaaaatggcctgatgcgctgggttctgcttatttgattctgattttgttttgattgtctgtctagtttttcataataactaagatccatgaagtgagagaagtcaaattcataacttctcatttccaacgtgggaaactcactctaaaatgaagagttttgagtctctcatttctgcagaacagcatctttgaaaactggtaactagctttgctaaaacatcgaaacatactaagtgatatcaaaatattacttaggaatcataaagtacatcctctcgacattttttctcttacccaacatccaagttggcgtcatatgtcaacataggcactcagatgtcaacttgagcattgggtcatgaacacactttagtaaaataaacataactcaatcaatattaatctgattgacgtgattaaccttgcgctttgaagctatttcaatgctctatcaagtcatatataacacttcaattgcaattctaaagctatcggccccaaattttacccccatgagagttacaaaaataagctccaggttactcgcggctagtcctgtcaggctccaaaaaatgactgtcaactccaaaagttaattttcaccattagatattcatctatagtcaaaaataactaacttgtattttttccctatttttgtgggcctccttcacctataaaaggagagccccgttagctcatttttcacattcaaaaaactacccacaaggtcagagcttctctctttagaaattcgagctttgacacttaacctttttctgtaataccatctcatgaaaaataaaaactcaaagtagacatagctctattactttctcaatacaaggagtgaactactataaatttgttgtatctctcatataataacttaataactatttccctcttatcaatctagcgagcgagcattgcttaaaagtctagttttgattttggagtcaaccaagttagtttaacaaactatggtattatttcgagaatggatatctagttgaagtacgtagttaccatggatcaaaagataaggagttgacttctcagttagatgatgaagaaccttcggtttttgtggaatcagtttgggattagagtcatgatctttttgttagtgaagatcaggaacctactacaggatcatgcacacctagtagttatgattgactctagcaaacccaaaacatttgggtctgtggatgtttggatagtaaagaactttctagacatgtatcctgatgagttactaggatgatccccacagtgggatattactttatcatcgattttgcacctagagcagaatcgaattctaaggcacattattgaatggctccgatagagcttacggaatgaaaaatacatcttcaagagatgcttgagttgagggttacccaactcagagtgtcaccctggggagctccggttctattcatgaaaaagaaggatggattcctttagatgtatattgactattggcaataaaataagttgacgatcaagaacaagtatccattgccaaaaattgatgatttgtttgatcaaattcaaggaaagtagttttcttcaagatggatttacactcggtttataatcagttaagaatccaagaagaagacatttcgaagattgtatttcagattagatttggttattatgagctcttggtgttgtcttttgggttaacaaatgcataatatgtcatagtgtttatcaatgacatccttgtatactcttagactcaagtggagcatgagaaacatctttgaatggttttgcaatgacatagagatcacaagttatatgtaatgtttaagaagtgcgtgctttggttattgcaagtatcttttctaggtcacattgtcgaaaaagatggaatcatggttgatccagggaaaatagaatcagttaagaattggctgagaccaaagactgtttctgaagctaaaagttttattggattagccgagtattatcaatggttttttgaaggatattccaagatctccatgccattaatatagttagctaaaaagaatcaacaatttatatggtctgataagtgtgaaactaatttctaggaaataaagcagcgactgattttggtacaagtgttagattttccatcagatcaagaaaaatttgtcgtatactgtgatggatccagatagggtttgggatgagttatgatgtaggctgacaaggtcattgcttatgcttctcgtcaattgaaggagtatgagaaatgttacccgatacatgatttggaacttgttgttgttgtgtttgccctaaagatttggtagcattatttctacaagagaaatgtgaaatctatactgaatacaagagtctcaagtacttcttttaataataagatttaaatatgagacaaagatggtagtttgagttaattaaggattgtgattgtgagattttgtatcacctcaaaaaaaaaaaaaccaatgtggtagtgaatgctttgagcagaaaagtaaccgagcaagttttcagtaccataatgatctctcctcagttagcgactgatttagtcaaggctggagttgagtttgtggttggaaaactatataacttgacaattcggtccaatgtgcaaaaagagtcaaaggtgcgcaattagaagattttgggttcattaagttttgagagggagtgttagttttttgggctaaggacttctcaatctcagatagtagaatgttacattataaaactcaagtttgtgttccgagtagtattgaaatcaagaaagaaatattggatgatgtttatattactccttattcattacatccaagtaccacaaaaatgtaccaagatttgaaactttagtaatggtggtgtgggatgaaatagttgatcatgcatctaagtgtttaacttgccagtaattttaaagcaagacatcagaaactagtagggttactacaacctttggcacttcccgagtggaaataggaagaagttggaatggacttcatggttagtttacctagaaccccatgaatgtatgattcagtttggattgttgtgaatcatttcacaaaaatcagcgtactttttgccagtaaaaataacttatacagtgtatcaatatgcggagttgtatgtgctagagatagtttgtctccatggagctctaaaatctattgttttggagagggattcaaaattcacttctaagtttggaaaattcttcagagcgccatgggcaaaaagctgaagtttggtacaacttttcaccctcaaatagatggtcagtccgagaggacaagtcagatattagaagatttgttacgagtctatgttatagactttgagggttcatggagtagataaattcccctgatagagttttcctatagcaacaactatcagagtataataaggatggctccttatgagatgttgtatggtaggaaatgtcattttctaattcattgggatgagaccatagaaaagaaatatttagaccatgagttagtatagggaaccagtggggcaatagagaaaaatcaaggcttggaggctttcttcgcaaagcaagcgcaaagacatagagtttcaggtagga

SEQ ID NO: 219895 - DNA, 2534 bp, Cannabis indica
agcttagttcttttttttttttttttattaaaggccttcaaagcagtcacacagcaacaacaagaacaaacaacaaactaaaccagaatccaagctacaaacaacaagcagtacgcaacaaactaacaaaaaactaagaaaagacaataacaaacaagaaaaacagaacatagaagccagccatccaccctcacaccaggtgggaaactgaaaaaattagacgcatcaaaactcccaaacagtcgagatttaagtgtcctttgagccacaccattgtgcatcctggggatccagctaacctcccagaggtcaaatttagcaactaaaccgtggaacttgatgacaatatcctgaatgttgtggttcaagtccttgatttcttggttttccttcagaattgcagcagtcgctccaactgagtcgtactgaaggattacgtttatatggccaagtcgaatagcgtttttggctccctaggacaaggaagcaagttcccccgccaaaggctcacaatagtgaatttgagtcgtgtgaatgctagtgatttcccctttatcgtttctgaaaattgctgcattagccgagtgatgatggccaattgccacatcagtattgcagatggtccagccagctggaggacggagccattgtggcattggggaagagtccaaaagttgtgcgttgagagcttccttaagacagttgttgatcaactaagtgagaatctttgttggggtaccatgaccattatgaacaatcttgtttctctccctccatatcttctcaaaaattatggcaacttcctcaagaaaagcatggaaactcacctatttcggcctatggtcattgtgcttgaaccaacttatccattcatcccaattagtgaaattgaaggaacaagtcttaatgtgccaaaagcatccaaaccaaactatgtaaatgagcctttgccttaagaatcgtcttccaaagtatggagtccaatttcctgggattccaggtcgaggaaattgtggttcttaaggtattttgcctccattacgtgcttccataaactagcttcactagtcataaatttccaggcccatttcataaggaaagcttgattagttgcctcagtcgttctgaaacccaagcccccgtgggtcttgggtttgcacagtttctcccacgcaacacaatgaagcactcttttctcttccgtatctccccaccaaatgactctaaaagctttatcgatattgttcgtcgtagaggtgggaatgacatcagaggaggcaatgtaattggacagtgttgatcccactaacttgataaggcaagcccttcccacactagatagaagcttggccttccaacctttaatacgcgtcaacacacggtccaccaggtgattgaaatcacccattcttcttggggttttgaatagaggcagacccaaataggaggcattagcattcattttcttcattcccaggagttgggtgattgcttgaatcctcccccgtggcactccacatgaaaagaaaaccgatgatttttgtgagttgattgactaaccagagcattcgcaataggtggcaatgcagtcctggaaagccttagcttctttaagagaagcttgcccaaagagcattatatcattgccaaacataaggtgatggacaaccggtccatgtctcccaatcttgaagcctttaatcaaacctttcctttccttatcgataagtagacgggatagcgtctccacagcaagaatgaacaaagaaggggatatcggatctccttgtcgaagtccccgttcaggcttgactttacccacaatggaaccgttaagcaggaccttaatttcttgcactgagatgcagactcgtatccatcctaggaacggattagtgaaccccatgtgagtgagcaccgcaaggataaagtcccaatccatttttccgtaggctttctccaagtcgattttgatcatcatgaatcccctgcttcctcttctttttttcatggaatggactatttctctagcaatcatcaaattctccacaatacttctgtctttgacaaaaaccgcttggttcagggagataattttttggattatccctcgtagtcttgtggcaatgatcttaaaaataattttgtagaatacattgcaaagtgcgatggggcggtagtccttggtaaacatcgaagcatcgttctttgggatgaggaccaaagaagtatcattgataaagtgaggcagctctaggtgggtgaagaaatgaccaaccatctcaatacatcaacttttataatttcccaatggtgagaataaaagctcaggggaagaccttcagggctccgggccttatctttgcccatctcattgatggtcgcaacaatttcatccaaggtgggggttacattaagatttgagacctcaaattcggataactcctggttgggaaacacttcattcagccgagacggatgcaaaatctgttgctttgagaacaggtctttataatgatttaggaagcatttag

SEQ ID NO: 219896 - DNA, 3471 bp, Cannabis indica
aaaaaaaaaaatcaaaactatttttttttaaaaccctaaaaccaaactatttatttctctctctgtttctctcccaatatttgtccagttctatccttcgattttggattttaggaaaaaggcaaaatacaaatctcagctcatttgtgggtatgagctagagtattctatttataatagattgcaaagtataagaaggagtcgttaggcatgatacctggcagtaattacacaaataaaactctacaatattctgccaaaatattcccattacacaattacaaggcataacagaatttcatgaggacaaattacacaataaaatacacaaaattctgttagaggcaggggaccatcaggttgtgtatgctgcaatgaatattgactggtgtagaagtgctagtatagaaatgatattccttgacatcccctcttaaacaaaagggtgagttctgcacaccaagtttgtcacaaggaaggcaaatcgagaaggtgataatcctttatttaaacaatcagctatttgatcatgtgaaggaatgtatcgaaagttgtttttgcagcactttatcacgaacatagtgtgcatcaatttcaatatgcttcgttcaagcgtgaaagatgggatcgattgcaagagcactagcactgaggttgtcacaccatgtcacagacggacttggaaaaggaaaatgaagttctttcaagagtgactcaatccatgagatttctgcagagacatgagctaaagcacaatactccgattcagtgcttgatctcgaaactacgacctgctttttagatgaccatgattcaagagtgtctcccaaataaacacaataactggcaatggatcttctgtcatttgggcaacaagcctagtcagcatctgaaaaacctgtaatgctaagtctgtcactgcagctgatgtaaagcccttttgttttggtatcctgcaagtatcgcaatacttgttttacctcgctctagtgagtgtcggttggagcttgcaagaattgacttaatttgttcacagcataggcaatatcaggcctcttgtgacataaatattgaagtgctcaaactgtgctcctgtatagtgttggattttccatttgcttaccatcagtgagcgacataggcttgccaatagtcattggtgttggacaggtctttaacttagtcacgttgactctatttagaacatcttcaatgtatcttgtttgtgtcaggtagaggcttgaagcatcacgataggcctcaatgccaagaaagtattgtaatggtccaatatctttcaaggtgaacttcctgtttagctcagtaatgaagctttgcaacttacttctatcattcccagtaataataatatcatcaacatagattaaggcaagtatgattacattttcatttctgtagaagaataatgaattatcagctttagaattgtggaacttccagtcagtcaaggtctcttttagttcgtcaaaccaagctcttggagcttgttttaaaccatagattgatttttgcaacttgcaaacaaagttttccttccctttttcttcaaagccttgaggttatgccatgtaaacctcttcttctaactctctatttaagaaagcattttaatatcaagttgcctcatctccaaacctttagagacaataatggtgagtataattcgcacggttgctgccttgatgacagggttgaaagtctcaccataagcaattccaggcctttgatggaatccatttgccacaaaccttgctttgagtcgattgacagtaccatcagcattcaacttaattctataaacccatttattgccaattaagttgtatgcattcgagggtggtacaagaatccatgttcttttagctttgagagcatgaattctacattcatagttttgaaccaaccaggatgtttgatggcttcagcaatactaattagttcagtaataactaattcgaattgcacttgactcgcaaaggtccgaggcttgaatatacctactttacctcttatgatcataggatgagaaggtaagggaacaagaggttcagcatgtgtatttgggacaggtggagcagcagcagtaggttcaacaaaatctgctgaaagttgcaattgtaggttatgttcatgttgcaggtcatgttgttgttggttattttccctatcagcacctgaaacagaactggatgagtcatagttagcaactggagaatgaactcgaaggctgctagaagatgttgcatgagagacctcaggtgatgtatcagcaggggaagaagataaggcacctggtgagggcaaaagggaattaacaggaagtgtagaccatgacgtggagtgaatgataacaggtggtggtgtgttgtaattgttcaaaaaactggttttgaaaggaaattccaattcattaaacaatatatatatatatatatataaaaatttattgagtagatatatattaaaattagaaagagatgttcaatcttagttacaaaaaaatatgagttattgataattttatctcaaattcatttggttaagttatatataactttgagatattttaggttacatcctccgatgggggtggtgcatcaattttttttttttttgatagttttaatattaatttttatatttgacaatatacgttgtagttatttaaaatattatgtaaattttttgagaaattaaaagttcaaatattttattgtacacatatttcttttattttatacgtgtctaaaatagaatatttgagctatgctttatttattgtaaattatttcaaatttttcaaaaaatttacaacttaaaatactttaaataactataatatatattattatataataaattgaatttgcaactatttatatatcaaaaaatacaaaaggggaatgcacttcttttaaagagtgcaccgtgaaaacactcaataactcataatcaattttcaatttcaatgttcatggaagacatttcaaatagttagggatgtatctttttaaagaaaaaaatgttaagaatatttccaacactcaacgacagagttagaggtaggtggttttagtacatgtggaaaataaaaaaagacactcttatgctaattctatataaatatatgagtcatatataaatgattattgaataattacattaaaaatataattatgatgatttttttttttataacatgctataacatattgctaatcggtaaaaatttataaatttagacttaaattaattataataaactgtatatttaaaatatttgataagatcttgacctttataactattaatatttaagaattattacatagaaaatataaattgacactttatttacaaaaatacttctataaggtgtagacaacattttatatcttttatatgattttaaatttttaattaccaaaataccacttacactatcactta

SEQ ID NO: 219897 - DNA, 5374 bp, Cannabis indica
acaaaaatatatacataaaaatatattattttatttgataaataaatatttaaatagtaataaaaatttcacaaatatatttttatagtaattaataaaccataatgaaattaaataaatttacaaaaagcgattataatttttatatatataattataataacataatatttatctaattataatttttacttaatattgacacaaatacttattttattataagtagactctacgtagtaaaaaattcggggtcattagttgtagaagcttgacagtagcaagattagaaagatatggtaaaaaatcagagaaagcaagatagttagaaccaaaaaaagcaagaggaaaaagagagaaagattcaatagtaaaacttatctctcgttaatgagagattctttatttataagcagaaagttaatataagtggacaaaataaggagctaaatatagctctaccaaaacaaaaacaaaaaaaaatagaattataaggtaaacaattaattaacttctaactaataactaactaaactaactgaaggttatgttagctagcatccctcttcaaacgaaaaggagtgaaagacatttgaagtttgcccgcgaaatagagaaaatagtctattgagagaggtttagttagaatatcgacagcatgatcaattgaagggacaaatctgaccgagagtgttttgttcaaaatctaatctctcacaaagtgaagatcaatttcaatgtacaacatgtttctacagtgtttgtagcaagtgcggctacactttaattacctacccaaataattggtgcttcaagaagagaaacatgaagctcatgcagcaagtggacaagccatttaagttctgcaattatattttcaagtgatctgaattcactttcagttctagaccgtgcaataacttgttacttttggcaaaccatgagatgagattctcaccaagataaacgacatagtcaccggtagatctcctatcatctacacaactggcctgatcagtatcagagtaagcatacaattgaagattggcagcaggtttgagtagaagaccatctgagattatgccctttagatacctcaacaacctcttacaagcttctcaatgtacctttgttgaagcatggataaattaacccaattttttgatgatgaaagcaacatctagtcttgtaagattcaaatattgaagagctcccaaagtgcttctacatagagtaggatctagaaaagggggcccttttgttaaagacaatttttgagcaaaacttgtagggtttgaacaaattttagcaccttcaatgtgtaacttgacaagaaaatctgtgacatacttgctttggaaaagatacatcccactggaatctctatatatttcaacaccaaggaaataatgcactggtccaagatcttttaaggaaaaggaatgattcaaatcctcaataagtttagaaataagttgtgaattgagataagttataagtatgtcatcaacacacaccaataaaatgatctacattgacctaaaccagaaagaaacaaagaggaatctaacctagatgtagagaacccctagtcttgtaaagtctggttgagcttgtcattccatgctcgaggagcttgcttcaatccatataaggctttatgcaaatgacatacatgtgtaggtttctcaggatcaacaaaaccttgaggctaatgcatgtaaactatttcttgaagctatccatgtaagaaagcattactgacatttaattgtgtaacctgctagttgaaggtaacagcaagagagaacaattcgaattgctgttggttttactacaggactaaacttttctgcataatcaattaccggtgtttgcaagtaaccctttgcaactaaccttgatttgtatctgtccaaggttccatctacttttaacttgattctatgcacccagtttttatcaataacaattattcgtggctgatatgacaccaaggtccatgtattgtttttgatgagtgcattgttctcttaattgctgcattgaagcgtaccctttaggatcaagaagagtagcttttacaaatctagtgttggcaataatgattttggaagtggatgtgttgttgacaagtaaatcttggatttggagagatgctactttgagacgtggttctcattagatgagttctaggaggtgtagtaacatcttttttattttttggatcattagtactagtttcaggtaacgcattgggtatagtattttgtgcattatctgggacagtaggtgatatagtaggtaagtactaggtgcatgatgtgggaatagagacaggttgcagggtggtttctagtatagtattggacatgttaggtaaatgttagttgcagtgtataggatttgataaaggagacatatgatctctagtggaatgagacagtgtatttgggataagtggtggaattataggaggagcaaggtgcacggtttgggtttctagagaaggttgtgtaacatgagatgtgtttgggataacaggctacaatgtaggctgagaaaaagatctcaagtaaaacattagatgacaacaaagaaccagcaactggattagtgtattgatgatcaggtatagttgacaaaatagtagcaggaaaacatggttgagaagtgttgtttacctgagagggagctgtagcagtggtagcggaaaatgatgttcattaaaaatcacattcctagcaatgtagatcttgccttcagagttctcacagatgtaccctttgtgattaggagaataactaaggaacaaacactgctcagatctgaaatcaagtgtgtaaagcaagcacatccaatgggttttagaattctcataatcagatttggtaccaaatagagtttcataagagcacaagtaatcaaatacagttgtggaaagcctgattatggtgaacactgcactctgaaaagccaactatcaacatgaaaaatccaaacctgattgagccaaaagagtaagtccattttctgttgcttttgttctactcttccattttgttcatgatcatgagggcatggatgagtaaacttgatcccttgatcctttgagaaccttacaaaggtctatattcaccccagtcagcttgaacacctttaatggggaggttgaactgatttttaaccatactcttgaacttgaaaaacacatcaaatgcttgagatttaagggtaagagggaatatccatgtatatgtactatagtcatccataaagtgaacatagtatttaaaaccttctttggagacctcatgagtaggccctcaaagatctgtatgaattaattcaagaggctaagtggcatgatttgtggatgaagagtatggttgtttgtggctttttcctagtttacaagctacacaaaattgaagatctttgagggaactagtgtgaggaacaagttttaaaattctatacagtgtagcaggtccagggtgtcccaatttattatgccatgtgttaatgtcattttgtaattaagaaatgaaaacttgagagcaagattctggaaagtattcaaaagaagaatctttatacatagtaatcaagttacaagatttcattttattatagcaagaacggaaagatggatcggtaactgttgtaagataacactcaaaagcattaggaactttgcttgaaccatcatctggaagcatgtatagaccttccttgagccttcctttaagaagaactttccccgtgtcattgtccttgacaaaacaacaattctttaaaactcaagaaaaatatcattgtcattagtgagcttatagacatacttataagattctttttcatctcaggcacttgaagaacaaaatttaactgtaataaattattagaggaagatggtaatgttgcagaaccaatgtgagtaatgagcaaacctttaccatttcccactactatagtttatgttccagagtaagcagttgtagaatctaagttgtcatgcccattggagagatgtgatttgtggctcttgtgtcaagaagacaagcataatcattgccaaaatcaggaatagaggtaaaggcatatacttgaggatcataatcacaatcagtttcagttaagtaggatcatggggatgctccattaggtttgggagtaacccagttcctgtcaaaatgatagtgacacataggattggtgtgaccaaatcgaagacaaacttgacagatgagtcatggattttccattagataaccacgagaagtaccacaaccagttggtcttgggctatcttgggaattttctcgagcagaagggggtttatagtttccatttcttgaagaaccaaaacaaggttggcttgcatcttgacagtaaggtttgtcatagcattatgatgctcaagacgactttcatgagacaagagtaaagcttgaacctcttcaatggataaagaaccactctaagatgttgtacgagacacaacagagtcaaattcagggcctagaccattgagaagttaaagaacaatgtcttgactttttaaagaagatcaagcactggcaagagaatcagctaaatattgaaccttatcaacatagtcaaagattgatgagtttcccttctgtacatgagagaattggcctttaagttgaagcagtcgagctcgagtttgactggtaaacttctgctccaaagctctctaaacaacgaaggaggtgaagtgatttgtaaatgaggccaagatccatttggacatagacgatcaaagccaagaaagtaacaattgatctcgtttcttccattgattgtagatcaggttgatttcacgagaaaaaaagatgttgaataggaagaacaccacttaacaagatctcatccaacttgtgaccaataacaactggcacaacctaagactttcatgcaagatagttaacaacacgatttaattttatggtgagagaagaggagtcggagctggagaatggattccaattgggcagggatggagcaggcgcaaacaaaggagcagcggtatgactaatttgagtagtaggatcgaaggaagtggaggtatgaacgaggactccattggaggcgactgatatcatgtataagcttggctgcagcaagattagaaagatggtaaaaaccagagaaagcaaatggtaagaaccaaaaaaagcaagagtaagaagagagaaagatttgactgaaaagcttatctctcattaatgaaagattctttatttataagcacaaagttaatacaagtggacaaagaaaggagctaaacaaagctctaccaaaaaaaaaaaaaaaatagaattgtaaagtaaacaattaactaact

SEQ ID NO: 219898 - DNA, 1933 bp, Cannabis indica
atcttataatttacatgtatttggatttagtgggagttctagagtctttacctaagatttcattcggatttatcttagttagaatataaataaaagaggattttgtaaagaaatgataataagtttaaacaagactctttctctctctttctttctcttctttttttttttttggcccaagaaacccaaggaaaaatagggacaaatccaacattttccaaccaattcaaatttaattcagcagaattttcagtagctaataaagagatttgccaaggtaagccttaagttcattttctctttgaatttttaagaaaagtttagtttgagcatgcaattttgagctttagattctatttgaacttggaatatttaggggttgttacgtgaggttattttgagttgtttgggtttggtttagttggcttttttttttttttttttttgtgtggcgtgttgagcaagtttgagtttttgaaactcaaagcttgctcaacaatgacaagttttgatttagttcattgatgttgcatttttcagttgaaatatgtttattatgttgtttctaggtgttctggaggttttggttctatttggggtagaattgaacttggagttgtgttttttgtgtttttctgcaaaaacaaaaagtgaaccattttctcagaaagaatcccaaaaaatgatccaccattttgagaatccggttcaccggttggggcagttttgggagcctcgattttcacgttttatccatatgtagggtattgtcacgctatttatcgatagagaaacttttaattttgaatttaagtccccaaaagtgaattagtgagtcacttactagttttaagtaaattgtgacttatgacctttaaatcctcgagtagaagtttctacttaggttgatcgataaacttgaaatcataatcaaggtaagattagtataatgatacatgcatacatgtttagcttacatgtttagaaaatcttatgtttattcttagctcaaatctggtgataaaaaatcatcctattttcataaaagtgtttctcatatgaagaagaaaaatcttattagagggatttttgatgaaaattcaaattggattgagactccaagaggtattgctactgtgtttgaagattattttggctccctcttctcaagtcatgggccttctatggatgatatgaatgttagttttatgctactaaattaggtacgcaacggaagagtttcgtattatctgattatcatcatactataacccataggatctctatatgtgtgtacattaaatcaaaataataaaagatataagttagagtatacctcttgaagcctatcagggtatccttgaaacttcttgtatgttgtatcccttaatgcaattgatgaggaattaacaattcggactcacaccaatatctttcaaattgatcaaccacacataaggaatagtgtaggctattaggctaaagtgtatacctttgttcttgttgagttctcaacacatgagcaaggacaatagagagaaaaataaattttattttttctctatagaatttgaaaatagcagtgtgaaaaagtatgttcttatttctcaaattagatttagactcatatttatagtagttaaatccctttaattaaattattatttaaatgtttaaataaatgaatatttataactaaattcggttactgatatttatgatggaatctctcaactacatgaaagaatatctcaacaaccttgaaatatctttaacttattttcaaattagatatttatctaattgaattaattaacccaaaaagacaaatctaatagggacaggaacaaggcgcctaccatcgtcttttaggacaaggttgatattttttgttctaataacttttgtcttgacaaatcttgtctcaacaaat

SEQ ID NO: 219899 - DNA, 1807 bp, Cannabis indica
tcttttttcacaggttcttatatagattttttattaaatgggaatatataaaaactaaaaatatagttattacctaccatataaacaaaaaaaaaaaaaaaaaaacttgttcagcggatggttctttcaccttgaagatttggcgtagctgagtgtgactaagatatagctcaaaatcaaatatcttccattttgatgtacatattcaatagtccttccttcttttgtttattttcttttgaacatacataacatgcaactttacccttgcatgcatttatataccaatagaaagttacaaaaaaacagaattttgttcagattttatcattaatttctaatccttggacttaaaacagagcattaaaccattgttattgaacaatgtccaccaatactattgtttgattcgatattaaataatgttaattactaattatctaataatcatgatgttcagtcaatatacttaatagcatcttttactgttagctatttaccttaaattgcggttctttttcctcaccgtacaggtacaggaaaaaagtgagaaagttgtcatatccacgtgaagtttagaatcatttttaaagctttcttcctctgaagcaagaataataattgtgtggtaacatttttgtccaaaagaaatttatatagattacaccaatccaacaaggctgttgggtggcattttagtaatagcaggatttcttacaattttatattttctttgaaaataaaaatcaaataatttggatactaataacgaatggtcaaaagtatatattagagagtaatactagtttttcaaatgaaacttctacacttcaccttattttatttttgactatttaaattctaatttcaactattaattataaaaaaaaataaaacagatgataaaaatctgtcgtaacacaaaattctgtaattatcgattaaaaacagaagtacatttctaggcgtagttgtcatcattgttataacttataataatgattttcataattagtcagctctgaatgtacggacagaattaacgtctccgtcaagttagttaacgataacggtgtttaattagataataaaaatagcccatcagagtagtaactagtaagtacgtaaaagaagcccaaaacccaatgtagttagttgtactttcctgcaaatcctttattagtttagtctaactaacctaacatttcttcttttctcttttaaatgagtagagtcacactctgatgatctgaatctgatctggtccattaaaagttaaaaaacccaactcacctaatgggccatgggcccattatagggcccacaccacaccacaccaccctccatccaccaccgccgccactaccaccaccaccaccttcctcatccactcccattcccaactaacacaactcttttcctttatataaaaaccttttcttttttaggtttttctcaaatcccaaatctgaaactccttcccattaatggcgactgcaacaacaacaacaactcctcctccaccaacacccggcaagaagccccaaccaatcccatggacacacccagagacggtccacctaatccaagcctacgaggagaaatggtactcgctcaaacgaggacctctaaaatcaagccaatgggaggaagtcgcggtcaccgtcgccgccagatgcggttacgattacactgaaccttccaaaactgctatacagtgccgacataagatggagaagcttcgacagagataccgatctgaaaagaatcgagtcaatctcgttggagtctccgtttggccctattt

SEQ ID NO: 219900 - DNA, 2933 bp, Cannabis indica
gaaaacacagtaaactgtgtaaatttcccaaatattaatactctgcaatatcaacatcaaccatacaaagcaacaaacaaactatattacaaaattattaatggcaaacaaatcaaatataattgcagattttttttaataagttattagcaattgtgtcatcctaacaaacaaatatttgttaccaagtattgtgtggctagtggtaagaatatttttattgatatttttttacgatttaagaactcttgaaatacataccaataatttaattaaaagaaaataaagtataaaattcttataattagcacatgtaaagaaaaataaggtataaattctttaccggcattatctctggctatacatcccaatccaaaacgtccttcttgagtaaacaaagccccatctacattcaccttgatcttattcccattgggtctctcccattgctcagttttaaccccatctgtagcaagatgagaaagagaaaaacctctccgttcttgagcaattttatattgatctaggcatgatctagcagatgcgactatacttactgcattagagactttttgttgccaaaccacttcgttacgggctcgccaaatagcccacgccaccattgctagttcctccaattcggaagtccttccacggtttacagcccccagtagccaagtgtaaaaatcaacatcaaaaacattaccagcattcactgaagatctgttccagcaagatctcgcaacagggcaagccacaagtgcatgaaaaatagtctcatcttcccctttgcaaactggacagataggactaagagggatatgtctcttgagaagttgaacacatgtcggcaaacaaccagaagcagccctccacaagaaattacaaactttaggaggcactttaagatcccagatagatctccataaattcgaaggttgaacagtaggccaagcccccttaagcacttgaagatttctataagcacttttgaccgtgtaatccccatgtttctcaaatttccaacaccaccgatcctccatagcattatcacttagctgaatagaaagaatgagatcctgatctctatcctgaaacagatcacgaatgatctcttcatcccactccctagagtcgatacgcataaggctgctaacggactggtttaaaagtgcaggatgtcttgagataacaaatgagttttcagctgggagccaagggtcgtctaatatagagacagattccccagttccaattgatcttccaacaccagaaaccaacaaatccttagcctcaactatacttcgccacacaaaacttgggttgtcgcctaattcagcttttaaaaaagttgttgcagggtaatatttggctttaaagacccgactcaccaatgaagaatcatgagtaagcaacctccagccttgcttaccaagaagagccaaattgaaatcgcgtaaatcccggaagcctaaacccccagcatgtttatggcgacacatacgattccaactcatccagcttgtgccttttgtttgagatgaacccgtactccaccaaaacttggccattaatcgctcaagctctttacaggtttcaacagggagcaaaaacacattcatagcataactaggaagtgcttgtgcaacagattttaataaaacctctttaccagcccttgacaacatccttccttcccaaccattaattctctttctaagtttatctttaagaaaaccaagaattgcattcttgttttttccaattgaatacggcagacccaagtatgaaccattttcatcagcttcaaaaacccccaacatatcacagatggtatctcgcaaccccacatcagtattgcagctgtagaaaacggaggatttctggaaattgatcttttggccagatgccatttcgaaagtgtggagcagttccttgatgttataagcttcttcctcagtcgctttacaatatatgtagctatcatctgcgaataacatgtgagatataatgggagcatggcgagcaatcctgcaccccgtaatcagaccactttgctcataactacgcaaaagagatgagaatccttccgcacagagaatgaacaaataaggggataatggatctccttgtctaattcctcgagaagccacaatcgggcccatttcatggcctccatgaacaatagaaaaggacacagagctaacgcaaaacatcaccaaattaatccacctgctgtcaaaacccatcctttctaacatggctctaatgaatccccattccagcctatcgtaggctttactcatgtctaatttaagggccataaaaccttcctttcctcttcgctttcttttcaaataatgcataatctcatatgagatcatgatattatctgaaattaaacgaccttgcaaaaaagcactttgcgtctctgaaactatggatgggagaacttttttgagtctattggcgatcaccttagatatgatcttataaagaacattacaaagagctatcggacgaaagtacttgaagcttttactctaggtaggacaggtttggtccaacccgaaatggcggagattatcggtatcaaggaggctttgagctggattgatagacatgattggcaaaatgttgttctcgaaactgacagtctattgtgtgttcaagcaattaagagtaacactcctatgttatctcaatttggtctgttagttattgatgtgcgtaagtttttattgtctaagaattatattgaaatttgttttgttaaacgatctgcaaacaaagcagctcactgtcttgccaggagctcttgtttctcttcaggtcgtgcacttcagcttgaggactgttctgctgaagtgcgttcaattgttatgaatgattgctatcattaataaaagttttactactttattcaaaaaaaa

SEQ ID NO: 219901 - DNA, 2704 bp, Cannabis indica
ttttttttttttgagtaaatagtattacttttatgtatgaactactctatggcacgtgctttgcacacgtcactaaatatttatatatatatatatttatatatataaatcattttcgtaatatgaattaaaaaggaaaatacaattattaattttgacttcatttatataaaatttctaattaatttaagaaaaaataaaaataaaaataacaattaacttaagtattgctgtaagtgccctgttcgggtctgtagctgttatttttctttccaactgtttttttttttcattttaactgttctttccttcaattttcttttaaatttgaagcagcaaccgttcctcccttttcttctccaccatttttcttcaccgcctgcgacttcacacctgcatactgtctcccttttatcgtttctttagctagaaaattcaagagaatacaaaagaacaaaacctcaatcttctctctctctctcttgtactctgctccaaggaagaatcagaagtggagcagccaatttcaatgaatttcttgaagttttagctaggtcttgaagtagtttgaagtggaggtaaacttagaaaccgtattcttagtatattgatggtattgttaggtttagagctaaaatttgggaaatagggtactgtttagttgaatttggtttagggatgtctttaacagatttaaattgatgatatagacttgtttgcgctatggttgttgattgattttgggtttgagcaagtttgagttcttcttggaatttaaacttggctcaactatggtagaatttgtaatttcaagttatgcttggttttgttgcttggttttggtctattttgatgattctaggtattctagagcatttggtgaagtttacggttgatttggttcaattgggggccttattttgtttctgtagtaaaaaatagtaggtcatgcagaaacgccctattattttttctggtgatgaaccaagaaaaacttttgggtaggttttcccgttttaggattttttttttgtattttcttgatatttaggacttcgttatgccttttatcgatagggagacttttagtttttagtttagatcatcgaaaaggttttagaaagttatttatcggtttattcaattgtgacatagggcctccgtttagtgagtgagtttccattcaggtcgaccgacatgcttgaatctggtaacgagataagattaacataaattatgtatatatgtgagtgtatggatgtaatgtgcatggaattatatattttataagctacaaacactagtataataatggtactgagtgcatgtggtacaacctaagagtgcaattcggtattaccaacactagtacagctggatactgagagcatatggtacgatacttagtggcactcgaggtacaaattatatcctactaacactagtacagcaatggtacagagtgcatgtggtacagcggtcgtatcttagttaagaacgttcttgactatttgttaataagctttgtaaatatacgcttgggagcctaattacaggacgacattataatgtatatattatgcatatcttactgagtctgttgactcaccagtgtgctatatgtataggttaagagaaagctaaggcggaggagcagtgagtttgaagctcagtagtgatagtacatattgtggcagtgcaacatggaggatttcgggcgaacattttgagtcaacttttgtggtcactgtgtgacatgtaaaaaaaactatttgtgttattttatgtcaagaaactacttttaaaattagtatcccgacttctgttaatatataagtatatatatatttaacttttatggtgtgaatttatatgtttttcatattcggcgttacaataatctatttccctcccaataaaatagttgtccaataaaattaaaattataaatacaaatggttagtgagaatatcataaagtcatcttggacttaatgagatagacataacatatatagagtacaaaaggatgaactactggaaatggtaaataatgagttctttaaagagcttacaactcattgatccacatacttaaagagtatgttgcaagactaagggaaatgagcaaagtacggcccatctaggaatgcacatagacatcacaaaatgattgacccaaacggatatgaaagatacaatcttaaaggttgtctcaagatttgtcataaatagcaaaagaaagaaaaatatcttaactagtgtctcgcagaatacatctagtcatttccaaatatttttaaagaatacgagctatattttgaatatattatcttgataaagaaaatactttctgataaggacaagaagcgattatcaactgttaattttttttttgtcacacatattgtaattatgaaacgtgaagattattcacgtttcgtgaatggttacctagataagattaaaggagattaattgtcaatcctgaaaaatcttataaatatgtatagaacctagggtgcagggaacaaacaatcgtttgggatgaataaaactgagagaataagtatagaaaatatccaaaaatactatcatgtatccaaacacactataaaagaataatattgactcgtagagtatgtagattttaactacaataccatgtaaaagtctctttattttatttggatttggtcatattt

SEQ ID NO: 219902 - DNA, 3209 bp, Cannabis indica
ctaaataaaaaaaaataaaaaaaaaaggtaatggcacaatattatgtgtacttctctatgagatttgtgagggtataatattgctcttggacaaatctcaatcagccaaatggttactcatattaattaatttttcttaatagttttatagaatatttattaaaataaaataaatgggacctattattaattgcacaaataacgatattacaccttataaaagtgttaggtatcatgattgccttttagtatttctcataaaaattgtttagggtttgtgaggaataaaaatataggaatgggaatgggaatgggaatggaatgaaaataaagtctttcattctcattctcatcacgtctaattactcgtgagagcttacgaagaatcctgtcggggttcgatcgttgggcacaattcccaaccctttctagttctagttttagttggaggctttaatgagttatgcaaaatgacacacaaaagaaaggtatttggtatccatttaatctttactaataactccaatgagtcatagatagtcaataatacctatttggttactttaggctagttaatacttaataccttattaaatatagtgggagtgtaactaaagtactactccatttttttttaatatgaatttatatagcggttactccaatgattttaaatgttttttttcacatacaaaaacatagtataatgtattgtgtattataaaacagagaactagaagaaaatagtgaatagattgtattgaattgatcaaaagagattacaaaagagtgagccttatataactcaagctctagtccaatataatatcaagagtttgaagttagttagagaaggtaatttaattagtgacgtcacattaataataatacgaaaacttacaaaattactgaaatttgagttaagttttacaaaaatactgtctcacagaaaaattttcaaaaattctatatttttataaaacagtagtagaacacaaaacagaacaactcaaaataacagtagactaactaaaaaatacgagtagaacacctgtgaaaacttaagatagtatactgctgtataaaacttataaaaaaaatacagtaaaaaagtaaaaaatacctctaatagtaaaattagtatatcatctaaatttcccaaatagtattattattgtatataagatgaaaagaaaatgtatattattataaacttcgtttataaattttgcttgtgttccggtctaatgggcccaataaaagcccaaataattcctcaagccattattaacgtcggcaaggcccagtaaattttagacatccaattccaaaacgatgacagatttgatactacaaataatagccacgtgtttatgacggttacctaatcgacacgtgtcagacattccaacaatcaaaacgacaccgtatcatcaccgctctctgttcaagtcaaggatcgatccattacaagcggcttcttctctttttttcctttgtagctaagcaaagcatctcaatttcagataataaaaataaaaaataaaaataaaataaaattcaaagagaaagagagagagatctagggttttgattttgaatctacagaccaaaaatggcgttggaatgggttgtgttaggctacgccgcggctgcagaggcaatcatggtcctcctcctcaccatccccggtctcgatggtcttcgcaaaggtctcgtcgccgtaacacgtaatcttctcaaaccgttcctttcgattgttcccttttgtcttttcttactcatggatatttactggaagtacgagactcgtccgagttgcgaagctgattcctgtactccatcggagtttctccgtcatcagaaatcaatcatgaagagtcaacgtaacgctctgttgatcgcctcggctttgatcttttactggcttctttactccgtaactcatcttgttgttaggattgagcagcttaatcagcgcgttgagcggttgaagagagattgagtttctggtgagagcttaaaccgttgattttaatgaaaggggtttatgatttgatcttgatcgtagggagtgggtaaacttttgtttagtattttgtgcttttgaattgccttaatgatgattaagtttgttttttttttctgtcggagtattagtattttgttgtactgcatttgctttccctaatcattttgaattgaatttgtcacaagtttcatttgaaaaattgctttggattggtgggattggggtcttgaattcgatttcgatttcgatttatccaatgcaagaattcaaagtgggtttggcccttgtattctatttctttcgaaatgatttggctttaacactatcataactttgattgattgtgttacttgataatgcttgataaaatttctttgaaatatgaattggtttgagttgtttgctacacttagattagattagacatgttcaagattcaagttttgcctgaattggataaacaccttatttatttggcttcaacagattctgtaagaagagagtttagccataatatcaaaaagataatttgggttacatattttatctagtcagagttgattggttagtttcaaaatatatgaaccttaattaggttagtcttgagctttgttttgttcaagtgattggggtctatgcctaatggtatcattggtggagattaattgttttgttttcatgtatacaatactttgttctccttagtttctgaattaagaatttctaagtgacaacatataaataatcgaactgtgttttcatgtatacaatactttaaataaattacatttgcatatgcttgattaactaaagcaacacttcaagctgtttgttagaacagaacctgaaattggtttttcaggcataagatgtgtatatttatttggagttttgaataatgaaaaattggttgttaaataattgtagcaaaaaagagtgaggttggggcctattctatttgacattcctataatgaacatgtggactatgaaattaggcagattagaaaggtgaggctagcactataactagaggagcctcctttctttttttcaagagaaatgccattccgtacaatggtgcctagcatctgatgattcaagggtttatagctaatagcaatgagataatgttatgttgtcatcactatcaatctaatttatatagggaaatttga

SEQ ID NO: 219903 - DNA, 3977 bp, Cannabis indica
tgacgtactcgtgtataagagccattccgtccgtgggtgtaagggcccaatggaggcttgaagcggggacgttacagaacatttctcgtgctcaaaagaaggtgagggacctgaacaatgagagtgatcaaaccccaaatgctatccaagaactgaagcatcatgaaaatgtgttagatgatttgttggcttaggaagaaacctattggcagcagcgatcccgtgtggattggttgcaaaatggagatcaaaacacaaaatttttccatgcttatgcttcatcaagaaggcaacacaacaccatcaagtctttaatggatgtccgaggcaatactgtccattccaagaatggcataactaatattataacatcctattttggagacttattcaaggctactgatgttgatcctgatgctttaaaccacacagttgcagcaattccaactacagttactgctgccatgaatgaatcattaatttaacctttcacaagtgaagaaatatacaatgctctcaagactatcaaccctgacaaaagcccaggtagtgatggtatgtcagctatgttctatcacaagtactggtctattgtaggagatgtggttaccaaagttgttttgggtgttttgaatgatggacatggtttggaaacaattaatcattcactcatcactctaatccctaagacaaagactcctagtagtatgggagacttcagacccattagcctgtgtaatgtcatatacaaaatcatctccaagactcttgctatccgattcaaggaaatcctcccagctgtaatctctgaaactcaaagtgattttctctcaaacagacttatcactgacaatatcattgtggcttttgagttaatccatcacttgaaacataagataagggggggtaggagctattcaacgctcaaattagatatgagcaaagcttttgacagggtagaatggcactacattcaagaggttatgcgtaaaatgggtttccacaacaaatggatttctttgatcatgggttgtctcaattccacaagtttctcttttatgcttaatggtgaagaagtgggatttgtacaacctactaggggccttcggcaaggtgatcctttatcaccttatttatttttgatttgttcagaggggctatccaggctactatagagtgaagaatcgctacagaaccctaaaggcttacgtttaacgcgtcatgcaccttcagtttaacatattctctttgcagatgatagtctcctactttgtgaggcagcaaataattcggcaagagcgataaagaaggtacttgacatctacaacaaggcttctggtcaattactgaacacaacaaagtctgttatgtctttctcgcccaatacctcacaagcaactaaagactactttcaataaactttaggcatgcctatcagtgaatatcatgaacggtacctgggtcttcctgctttttctgagtgtgataaaaaggaaatgtttagtgatgtgaaagaacgaatatggcaaaagcctaatgcttggaatgagaaacttttttcagttggggaaaggaagttcttttgaaagcggtggtccaatcaattcacacatatgctatgagctgttttcgtttgccaacgactttttgtaaccaacttgatcaatgatggcaaatttttggttgggttctaacaaggatggttcaaagattcattggagaagttggaaattgttatgtaagtcaaagtttgaaagtggaatgggtttccgttcttttgtgcactttaacaaggctctccttgcaaagcaagcatggcgaatctttgaaatgcctaattctttgctcagtcgattgctcaaacacagatacttttccaacaataactttttggaagctagacttggccattccccatctcttacttggcaaggtatacattggggacgtgaattattggtagaaggtttgcgccacaagattggtaatggattcaatgtcttggctggttttgacaaatggattcctggtcacaatgacttcaagcctatcaactatactggtcttgcaactctcaccgttgcaaacttaatcactgacaaaagagaatggaacatacaactcttaaatgaatacttcctgcctattgatgttgatagaattgtcacgattcctcttagttttttcccttccaatgatcgtctcatttggcatcacacaatgacgggttgttacacaatcaattctggttttcacttggctgaagtaagggaaactagtggctctaacaatcatacgaattggtggaaaatgttttggagtttgagcttgccatcaaaggtaaaaaaatttgcttggagggttatgcaagatgcactgcctgtagctactggtttatgcagaaggaaagttatagattctgctacaagttctctatgtcataatgcatgggaatcggtgggtcatgccttgtttaattgcatcaaagctagaaaggtttggagagaaactaagttcatccttgaccattcacatgctaacaatatgtataagggtgattatttaattcatttgtccacacttcattccaagcaagattttgagtaattgtatgtactatgtgggctatatggcatgaaagaaataaagtcattcatggaggtgtttcgaaaccaagccgtgatattactgtttttgccaatcaacaccttgacaaattccatcgttcaagtaggaaaaaccagcagcagtatacggtctgcaatacttcaacgagccctgtcgatgttcaagctacaatccagcaacatagcaccacagtttcatggactccaccaacactttcaggccttaaacttaatgtcgatgctgcattaaaccaggaacaaaaaattttgggggttggagctattattaggaacaagaatggcaatgttatagctgctttatcaaagcctgttcagggatgctttcggtctgacgaattggaggccaaagctttatttcatagtcttaattgggctagacaattgcagcttcgaattacacatgtggaaaccgatgccttacgtgtttcttcagccattaattctccatttaaaaatctttctagttttgatgacttaattatggatgtttgttatcttttattttttttctcgggagtaacagtttctcatgttaagagaaacgctaaccaggctgctcatggtttagctaggtatgctcttgagttggatgaagatgtttgttggatgggtgaaatcccgaatcctattttctctgttgttgtaaacgattatcagttttaataacagtgaaatttctcaatatatatatattttattacatatatatatataaaaacatttaaaaaaagcaaaaccctaaataacctgacccttctctctcatctcatctcagccctcattgaagccgcctcacccctcattgaagccgccaaacctgcccactgcgcagagagtgacgatggtgactcgcttcacagcaatttgacgatgacggagacgaccacatcttcttccctacccgctgacaacgacggccatctcctccctaagttgccgacagcatcttcaccaacgacagaagcgacacaactcctccctcccccaacgacaacacagctcctccctccccaacaacgacacatcttctccctcgcaaacgacacatattttgtgaaattggcagaattggagcaattcatcactcgctgcaaatcaaacccttctctcgcttcctacaaatcttatcttcagaggtataaagtttacttttttcttctttttttctggtcattattacatgcccatttcatgtaatttcttttcgttttccttaattgcatacggtaagactttttcaggttcaatcgtatatatatttatatatttgggatagtaatttgttaatatgaggttgtttcacatgtttcttagcttcctccatctata

SEQ ID NO: 219904 - DNA, 2251 bp, Cannabis indica
agataacaagcgtaaaaatgctccaaacaatagaccatgtcattaactctaaaaattctttggtctcatcacaaataatttgattaggcttagttagagtttggaattacatattagattcaagaaactattaaataatgttgacagattatgtacttgtataaattgatcatatataattgaaaatatgagtattgttattagagcatctctaatggttaaattttttgaagacatttgcttattgttaatttagaaaaatataagagagatataccattagagatatataggtgcattctaaaaaattgtaatgctgtcactatttggcagtgagactatatttttttttttttgaaaataaaaaattgtacataaatcaaatttagagtcaatgactttttttcttttttttgtaagagatattttagacttttttttaggagacatgttggacgtcaaagagtgttagatttattaagttgtatttatataggtttgacgtatattttgttggagatttatttttaattggagttaattaaagttgagtctttgcactttggagtgtaagataaatattatatatattcaatttaaattttacctttgcaagcttatttgtttttttcccttaattttttgttctttttttccctataaaagttcattaacaatcatttatttctcacatcaattcttttttataattttttatttatttatattaatatataatttttaaaatttagtatgaaaatatttataattaaaataaataacacattctcaaaatcggagacctcattgaaattcacccctctccttgtttgaaagcttcggtccttatctcaaaatcacagtctttatcgatgtcaccaagcctcttaggcgaggtaagaacatcgagttctgtaacattgccaaaaccaaatggctttactttaagtacaaggctttgcaaaatttttgctatttctgcagtatgctcgaccacgcttacaataaatgtgggaaatacctcatgagatgcaacaatttttcagtccctcctgagcttggctataaggacaccctccgtgctcctactaaaactcatgtcaagaaaaacccctttgatctctccaactccattcccattgaagaatacttaagtcatggaagcaactctgaccaaggcttacaacaaaccattgaccaatttctgagtactggctctaatttcatggtcccaaccattgaccaagtgagcacaactacccctactgaacttcgtaccccaccaccaggtttgaatatggctttctcaaccctctcaccctcccctattatggccacctctgtgatcacacacactaagaaggggaagggcatagccctttctgaagcccctcctccaccaattttagttgcctccaggcctcttaacagaggcaccattatccaggaaccaagcatggccgccaccatatggggagttctcaggcatttcgaaatctctccttattggtgaagcaacaccaacctattttgttttttgtgatggaaaccaagcttagccctgaccatggaacttgtatcaagaacaaattaggttttgataatgtctttgaagttccctaggtggggttggggaaggtcttttacttttgtggaacaatattattaatgttaatattcttacttcctcccttagtcatatagattatattattaatattaataatgatatgaatattcttagaagaaccctagcaaaaattttgaatccttagtaagagagaagggtaagcgaagtgtgtagaagaggaattagagtttgaaaaacttaccttatatttatcttttatactagggttagtattaggattttctttatgaggaaattacattatatacccattttactttacatattttaatttttaccttcattttcatattctttaagatatacttacttttataaatgatgtccctattataccctttaggttaatgtaaattatatgctagacttaagtaaaaagtgagtgtatattggacaaccctctcacaaaagtgggtatgtttcaatgaaatataatataagggtattttagattaaaggatacaaaaaagaggtattcctcaacttatcccaatagtcttgggccaaaccattgttggatttttgtgagtaagttttgcttgttgttgggttgagctggattgcttgagtgttttggaaaataccatcttttctatggac

SEQ ID NO: 219905 - DNA, 3413 bp, Cannabis indica
tgaatatacatcactatttatagggctagtaagcttggagaggaagagtttcccctctcgttacaatgcgtataacgtgggatcaatgctgaatacaaggatcgtgggattgaggctgaatacactgatagtgggatcgtgtgtatgccatatccacgtaaactgatccctaagttataaggattgtgctgatgactcatgatgtgaaagctgaattcgctaagtgttgattgctctgcacggattgctgaatactttgctctgagtgtgccagcgatatgttttgctcggactatgcttcctgggcaaatattccaagtggattccacgtgtcatcattcatgtgatgccacgtcagagtgcgaaaattgggataacatcataaatactgatttgtttaagtctcattcattttatcattaacttactcgaggacgagcaagagtcaagtgtgggagaatttaatgagtccatatttgtcttataaatatgatcaatttatgtattaataattttaaattaaatttttaaattattgattagtggaataattataataggccattttaaagactattcagcatttagagtcttttggagggattttggcatatttttgtagaaaatagtagaagtcggcgagctcggttttacaaggcaaagcttaattgaaaatttagatgatcttagaagcagaattagacttggagctcaacatggaagttttagatcttgtttttagcttttcagaacatcttgaatccttcaattctgagcaatatcgatagtgttatgactaaaatagtatcagtcgtagtaggaaatttttgaaaaaaaaaaagataaaagatagcaaaaaaaaaaaagaagcttttcaagtagagttgggattttatttttttaagttaaattttaaatatttttagtatcttttaattaactttgttagcctatataaacaagttattattagtatttttagaaggttttcagaacaaaaaaattgaaaaactcttaattagcaaaggattccaaagctacaaaatagagaaactaggagggagagcaaggaagagaaggagatcgcagcttcgaagagttctttattctagttcttttcttctccttgaactcttattaaatataatgattttagttaataatgtctagtttagagtagtttgagtagttttattttagttaagggttatttcaaaactcgaggcatgaattcttagtttcattaatgaatgttaatttttagtttccattatatcaaattggttcttctcttctatatttaatgtcatgagacgactgctaaattaggttttattttaatctatcgtcatcttagaattactattcacctaatagtctaggattctaagtgtttgtgacaaattacaattttaattgtgatgaagaatagaacctaagctaaatgaattatatgcttcttaatttgttgcttagattagtctatctctataaaacttaaagctttatctaacttaaataaattgcgattttcgctacgcatcaaaatcataaagatcattggaatgcatacttactgaggactgcgaggaaaacagaaatgacagacagctccaattaacttcatccttcttcatagaagggctcattattataaatattacttattaggtgaaccccctcgccctacgcctctgcacttttaaagactttttggggcacatcccccaataacaaagagaattcctaagttctaactcctatatcggtatgctctgctctgctctgcccttatcatttatttattgttttaatgtctaaataatatctttaacttgtcccaccatgcatcaaataaaatcctttaattgtttacacttatttctctctctaccatccaaatatttttatacgttttagtacatacacttttcctgggcattgttgtaaaatgatatagattctctctgttctctatgctatttaagtattgcaattatatccttacaaaaaaaaaaaaaaagcattgcattcatatccttaccaaaaaaaaaaagtattgcatttatattttatctcaaaaaagaaagcattaaatttgtataatcatctgactattagcatcctgcattaaatacgaatcatggtattttttaaggataattctacaaaaagacatactaaactctttataaggtttttcacaaatcagccccttaaatttaaaatggtttagcaaatttgtaccaaaattataaaatattaacaatttggtccctgaactatttatcgaaaaaaaggctctcaactcattgaacagtaactactattaagtcttttatatgattccttgactaatttcttttcataggaaagattgcatagttttaccaaaatatctcacactatttttttaatagcaaagattcaaagaatgatataaaataaagattttggtattaaattgtgacatcataaccgaattggtaaatttaaattctctatttctcagaattatggagaatttttattaagtggaggctttattgttatacatataaaagaatatttgggtatgcattaagaaaaacttaatttttataaatgtatatatgtggctttattattacataaaataataaataaataaataattatttataccccgcacttgtataggcctgtcccttactgaatatgataaaatacttatctagctcaattcctttatggcatgtttggtttgttgcaatgagaattgtaatggaatcaaattatccattacaatgtttgttttgattttaaaaatgatgtaatgggattacattgtaatcataattacattatacaatagaatcctcattacactagaaaagctatgtaatgaggattacattacaaaaaactaaataaagtaaagctaaaatgactctactacccttttttgtataaatataaaaattaaagtgaggaataattttgtcaatttatcatttattttaatattcattccaataacaaaccaaatatcttaatcaattcccattactattcttatttcattacattactattaccattaatattacattccaccaaaccaaacatcaccttagttcttgattggataattgatgtgcaatattccatttaaattttaattagttctcttttatagttcaccaactatatatatataaatatattagagaaaaatagaaattttaatatgaaaaaaataaatctgacagagttcattacataataatattgttcatatagtagaatgaaaaaaaataggcaaactatatcgtttaaaataaaaataaaaaaaaaatcctaataactttgtcaactaaaagatcaaaagtcgtataggtaaaaaataggcaaactatgttgtttacaaccca

SEQ ID NO: 219906 - DNA, 4082 bp, Cannabis indica
tgtgacagtatttttgtaaaaattaactcaaattctagtatttttgtaagttttccttttgcatcatgctatattgtaatctaaatttagatcactttttgttatgtgagatatttgcatcaaaagttagcacaccattatagtagacttttaacaaaataagctacgttttttatttatatcacttatttgtatgtttattagaaattctctaaaatagactaattaataaaatataaagtattgaaagtcttctatattacttttttcatttttatttatacggattaaacatattgcacataaattatgtgctaatcaatcaataaattaaatattcattaattagtgtggaaaggatataggatggactgcaactatacaaatatgccatattatcatcattttgagatggaattttctttaggcaaattgggaacgttaagcactcttgtctttcccaagagatattggctaataataataattgctatgttaattggttaaaagttacatgtcgtttcaatgtgctgaacataataagcaaatatttcaaattaacccttttgtttgttatcttaaaaactatgaatattgaatgagtaaagcataaccaatcactactgaagtgttcgaaaaccttttttttttaagtgttcgaaaacttttagattgaaagttatttgattgattttgaagtcaaaattgtggtacttaatgaaccatcttttaaggtaataaatatggtacactcttcaccaataggattttcttataaagttgctctctctatttcatactcgagagagagagaaataggtgacagttgttgccttcccggttcttctgctagatgtttatggcttaaaattataatgcaaagatgattatctcttttattcaaactcaactaatgataataatgattaggtcttccatcaaaacagtctcattcctaaagaatctttatacaaagagcccttttgaggcactaataaggaaaccttacccaatttgagaatgacaatgtagcccataaaggagacccaaaatgagcactgcttttcagtaaaagaagaatgtcctttggacaaagccaaaaagaatttcctaacacccttaccacaagatgcctataaaaacaaaatctatttttactttgtgaacaaacaaaagaagcatatttctaagttatttattagaatactattagtttagggagaaaaaacctttagacaaatattagtgaaaaaaaaaattaaaactaaaccttaaaaagaataataataataatccttaattagtgagcactatgacaggcttgggatcttcatgtggagcatgcaagtttctgaggcgaaaatgcagcagtgaatgcatttttgctccttacttcggctacgacggggctgcaagccattttgcggcggtgcacaaggtgttcggagctagcaatgtttcaaagctgttattacacttgccacaacacaaccggagtgatgctgcaacctctatctcatatgaagctcttgctcggatgagagaccccatttatggttgtgttgctcatatctttgctctccaacaacaggtagaaaattataactcctttgatagtatatgttttaaacacaaaaaagaataatgatgaaaaagtaatctcttatgtaacttatgtcaagataatttgacttatttgcttaaaagaaaagaaaccaaacgtagtaccaaacaagccttagacaagtttaaataagttgaattttgtgcccaggttgcctacctgcaggaggagatagagattcttgggaaccaaatagctcataatgtcacagctggttttgcaagttctgggagttcttctgaaggaactaataattatagtgatcataatactcataataataccttagattccagttctcaactcttttcacataatggagctatgaactgtcagtattatcagaatcaacaggaagttctaccctcccagaaccagaattcaactggaaatagtagtaacatagttgttggtgggcaggtgggttttcatcttcatcaaaatccatatagttggggagaagagaacatggtttgtaactctctctcagatcctttagacaaactatttgaggggatagaacaagaaagcttagggaatagtccatggttggatgaaatacccaatgtcgaaaactttataggtccacaatctgggactgagcccagcttttggtaatgaagaaaaatactttggtggtgtgtgagcctttcactttgaatgaaggaaataaacttcgtaccaattgccaatttgatactatggttgatcttttttcttcttaaaacaaaatcccaaatatggtttattctaaattggcatagagctgtagaagccaacatactgctgcatgtcaaagcaggggactctgctcctccctacactggattcgacaatgtgtacattattatattaccagtccacgtagtggttttaagaaccaattgtaatatttcattttgtactatgttttcagttagattttcttaaatgacttcatattttaattttcatacatgaacttaaaatctattaagagttagtcccatattgttaatgtgtaaaaataaattgtgatatataagatgaatatgctactcttcccattctcaattgattttgagatgaaactccattcacattatctcaaattctaccaaaatcacctcccataaattggttccttaattctagttttttttttaataaaaaaataaataacaaaaaaaaaaaaaaaaaactcctaatggctatgaaatatagaaaacggctttcattaaaatatgtgaatattattgcaatgtcactttctgaattcagacacggtttttagattaactttagactatacaaaagtaaaagaatgctaattacaattttttagattatttttgagctgtaattatatgttagaattttttttaaatttttttttatattagtattcattatatttactattttaatttccagtaaaaattttaaaaattctgaattgtttacaatactaaaaatagaattcttagtttaccatacctgttaaaaaaatttcaaacttatttttgacacggtaaactattaaaatttttttaaaaatttataagaataatattgtaaatataacaaagaccgatataaaaaaattaaaaaaaaaatattctgacatatgtttaagtgcacgaagattaataaaaaattgtaatagaagattgatagtaccactacaaatattttttaaaaagtaaaagcgtcatctcctcttcaaatatatatatatcattatataatacacatggattcaaacaagcccaatgaatgaacaataacaaatattaaaaagaaaatttgataatctatgctaaaaaattaattatggtatttaattaaatccaattattacacataggaaagatattccaatctgtcaatttccttccaaaattacccatttttgcaactctccccattctctctaactccattctctctcttctttcgctctcccaaactcacagtgaccattcaagcccaccgcacaaacccatcccctctagaaccgaacccaccaatcaaccattcaaacccattagacccacgacgacccaggaaaccactccacccaagcgacctaggaaacccacgagatcccccaacgacagacgagacccacgagacctacgagacacctcagcaacccacgagacaaagctccatccagtctccgatcaccttccccgcctccgtccacgagaccaactccaacccaggttttgttttttttttctttaattgctactttaaattcgcaatctgtgattaaattgaaatgtggtgactaaactttcgatttataaatttttgtgtttggggaagaatctgggtttcgagatataactttttttggggttttctttatttgtgtgacattaggcgatgtttatgcaatttttgtgcaattaatattgcaaatttgaagagattttgtgtgctcatgttggttggtatttgttgacttcgc

SEQ ID NO: 219907 - DNA, 2060 bp, Cannabis indica
catagttttcataatcacctcggcgcacggttctgatctcaaagctcgtcttaccccgaacgacgcgttttccaagaaagcttcaagctcatcaagaagatcaagggaaagtagttatgacgtcacagcaagattctaaacagcaggtccaccaccacaagccctgcgacgctttttctcacgaaaagtctcgttcattatgcaaccactttcacagcaacgacttcacgagccgcggtgcaagacccaccccacctccgacgccgtccggtagactcggaagtagtactagcgatccaagatacggtgttgagaagagactggtcccctccggacccaaccctctccacaactgatggtcatgatcacatctcaccctcatcctaatatattatacatatatatatatatatataaatagaatagtgagaaccagttctcttggggttatttcgcttttcttggtttctttttgtggggtttctctcttctttttttttttttttatttggatccaagatgtgaatatgaagaagatactcaaatcgcttgcattattcatgaagaaaggttttctttcttattgattgaaaatggatcaaagctattactaatttagctaatggtgatcaccccgtcgagcttgaagaggcaagtaattattaattactgtattagcggaaactagtttaagaggtttccttttaattagagttatatatattttgttgtagtctcatagaaaatgtcaccatttccacgcttgtttttgaattcctacttcatgtaaacttcttaggttattaattaaattgttcaaaaaggtgtcaatcagtgaagatgagaagaagaagaagaaaaaatgattcttttttggagcggcgaaaacaagcatggaaatgggattcagccattttttttttaagaaaaaaaatacttagtaaagtaatttgatatattttgcatttccatatattattttccttgtattttattgaagggtgttagggaattcaaaggaaacccatgagtttcataaatttgtagccaagagcagttaatgtaagggtgccattgccaaacaacattcaatatgaggttatttaaattaattagagatctttttcttttatatttttggtgggggacaaagtagacttttccaataagttctcgtgtgtgttcagttgttgatctgcattaaatatagtcatgtataacattatgtaatagtactagaactattagtggtcatgatgctttaaattacaagttatttaaattaatttgcttaagtatataatatatattaatttgtatatagtcttgtttttgtctggttaaatttttctctggtacgttgtgtagtcaattcctttatccgtttcctttacctcttttactcatctttcatgtatgttgaacatcatttatggaagaagaagcattgcagcttctaaaaatagtatattgaaaaggaaaattgatcagagcatatattatgtaatacatacatttaaacccagcttcacacgtataagtgagaaaattaataaatgtagcaacacacatttcaagtaatgactaataatatttgattatgtagattttttttaagaaagagaatttatatataaatttaaataatactgtgatttaaaagctagcttgggacaacttttgtcaaaaaatcaaaacgaaataagcaagggacaattaaaaagaaaaaaaaaccaaagacttactgtgatttaagtaatttttttaattaggaccatttaataattagcattaatgatgtgttaattgtgcaaatgaaattataatacacgcaaatgaaactggttggatggataatgaaatgatagaaaccactcagaccagcttggtaattaatgaaatcaaattgttattttaattttgaaagggagcacacttcattcaacaaaaggcaaacattacaaaggaataggctgatcagccataactgttgaacttgcaacaagatgcatataaaatttaggaataattatataatgcaccatttttttttgggtaaa

SEQ ID NO: 219908 - DNA, 3668 bp, Cannabis indica
gtagtccaaagccttacaggtaagtcgttgcacaaaatcgctttacatcacattcctctgataagtgtaaagaatttttttagatttttaaaggaaataaaaagtttcaatggactaataagtgtgaagaggctttcaggccctaaaaacgcacttggggcaacccccaatactatccaagctgatgcctagagaatttttgtcaatctacctcgcgatgtttgaatacgcaattagttcggtactaatctgcgaagaccaaggtagacaacatccagtatactatgtgagcaagtgtctcttggacgctgaaacctgttatccataaatggaatgactagcatttttgtgatcgcttcaagaaagttgcgaccttattttcaagcacacaacattgaagttttaataaactatcccttgcgacaagttttggcaaaactagaggcatcagggagactactcaaatggtcaatagaactaagccagtttgacatcaggtacaagccgaggttggtaatcaaaggacaatcccttactgatttaatacttgagtttccaaacgattaggtggccataatcttggaagagcgagtcgaccacgatgtaccaacgggcgagcggtggactttgtatgttgacggggcatccaacagtgaaggatcaaagggtggactaatcctcataagttgcaacaaattcaaacacgcgacccttagatttgaatttcctgcatctaataacaaagccaaatatgaggctttagtcgcatgattaaagctcactctggaaatgaaagtcgagtacctccaagcagtcaatggggaatatctagccagaggaggacatttggccaaatacctttcttatagttgtgagttatacaaaaattcaaaaagataattgttagtagaatacctcatgcttacgattcccatgcagatgattttgcccgactggcctcaataagagaaaatgaattacttgacgtaatttatatcgatgtattcacccatccaattattaatcaagataagatgatggaggctgataccgtcaaaaagatcacctggatgagcccaatcattgaatacttgaaaataggagttctctctggcgataagactgaagccaaaaaactgtgatatcaagccgcccaatgtgtcatttatgacgacaagctctatcgcaaaagttttagccagccattgcttaaatatatcgatggttttgaatgcaactacatactctgagaagtacatggtggaatctgcgataaccatgctggtaattcccttgctctaaatattatgagataaggatattactcgccaacattgtgggcacatgaaactagctacaccaaaagatgcgacaagtgtcagtgaatagcaacttatgtaaataggccactgatcactagtccttggccatttgtggtttggggcatagacttaattggtgaactgccaaaaggaaaaggaggagtaaagtatgttgtagttgtcatcgattacttcacaaaattggctgaggccaaacatcttgtgacaataacagcctccaaattacgcgatttttcctatagcgctatcatctgcaggtttggcatcttttacatgttaatttctgacaatggtaagtaatttgattgtaaggagatgcatcaactgtgcaatgaattggggattcaaaaatcttttcagcggtcacctatcctcaaagtaatggacaaacaaaagcagttaacaagatcataaagcataccataagaggtaagcttgaagaaaggaagggtacacggaaagaggaacttcgacatgttctatggtcatacaatgcaactcctcgctaaatgactggtgaaaccctcttctcgctttcttatggatgcaaacccatggtacaagtcgaggttggagcaggatcattgaggagagatgtcttcaacgtcaacaaaaatatagaaaattagttgttacaactcgatcttttggaagagaaacacgatcaggctcatttgaaaaatgcagcctatcagcagcgaacaactcgttatttcaactcgaagggtcaaagaacgaagcctgtgagtaggagatttggtgctgcccaaggttatgcctaatatgcataactcagcacatggagttgttggcaatatttgggaaggaccagacctaatcgcttaaaaatcagtaatgtgatttactgattatttgacggcgatggtttcgcgatcaaaagagcttggaatggagaaagcttaaaatattaaaatcaatagtactcgcatgtatttatactaagtcaatttatttcaataaatgtactaagtataggtggtgtaaccgaataatgtactgttgattatattaatgaaatattcaaagttttaagaatttttaatgttttttgcacgtttttatattctaagatatcacaccaagctgtgatgacattgataaagaatattacgaagataaaaagcaaaaacaataattaaaagtgcagcttaaaaaatgcgagtacccgtgtaccgctaaataagtatgcaaaagtaaaatatcctcgaagggatatattgttcgataacaaaagaaatataatttattcaaagtacaaagcgcgagtacccatgtactgctaacaaaagagatagaagttcgacaatagacttagaaaaattaagaagctagggtgctaggatcgtctgcgaccttgcttgcagcaccatctgcgacttcctctgcattcgcgtagtcaacatcctcatgttgagcaatgttaccaacagcgcctgtgccagtggtgggtaaccatgggtttattgtcgtatagagattctgtgtttgaatggtttgtgaagctggaacctcaaacttttctgggaggtactgacataattaaagctgagtagtggatgagtacaatcacccgtatcctggataatatgggagtgactcgaagagagagagtgaattgtgcaggtttcatgttatgagatcattcccgcgtctggtgggatattgtgggacagactcgtgacgtcaatgtaaggatttgggatgagtttaagaatttgtttgaagaaattttttataatattattgtgaggacttcacatatggaagattttgtgaagctaactcaggggaaaatgtttatggccgagtacactctggagtttgatcggctgtccaaagtttctggtgatctggtgcccatagatttcaccaagaaacagaaatatgtgagaggactgaatgccataataagtcgggacttgaaaattaccactgcacttgacactttgtacaagaaagtggtagagctagacttaattgctgaataggctgagcagcatgtaacaaaagagcagactacaaaggatgccgccatggcatcgaatcctcctgctagtggtaatgtcagtaagaggactgacggtggtaaccctgatgacaaacagaaggttgatgcttcccgaacatcaaggggtaacagaaagtttcgaggaaacagaggtggcggtcagggccgtagatcttcattccgatcttatcctgagtatcccaaatgcaagaaacaccattagggtgaatgttagaccaagacttgtttccagtgtggcatggtgggccacttcatcagagattgtcctcaagcca

SEQ ID NO: 219909 - DNA, 5632 bp, Cannabis indica
aaaaataaaaaaataaaaaagtacactgaacatgcctctctctctctcgatttatttttatatattttttttatttgccgatgataaatatgcaggtatataatcatcatattccccaataacaatttttccataagattataatatattctgtttttaattggtttttattatatgcttattttaagcaggttgcataggctttaatgtggtcctaatttctttaacgctggttttacggattccttttcaaagtaataatattttaatatttgtttggcttttgttcttattttatattaatcaacttgatctaataatttcatttcttatatttaaatcttcggtgggttccaatatcagcatcagtgtgttgcttttataaaattagaatcatgttgtaggcatttcattaactataactgaataataataataatatttattaatatatatgatgatatatatgcatgcatatatatacaattaacattctaattaaagtgcttaataccacttcatagaggatattgatcgtgactagtgtaattaatagtaattagtaaattttagatgtaaaaaagaattcaatattaaattaccctaataataacataatctctgatggtgatatagttcaaagaatgcacaataaatacaatattataaatattaacttatagcaatgacatgtgaatccatgtgaagagggtcctcctttgttgctacaactctatatatactactctctacatttaaatatttttatatccttttgagtgaaaacatccttttgagggcacaccaaatctgtattagatagtcataaagtaatatttgtagagctagctaattactttttatcattttatattaaattttgttccgaatcgcgacaaaaacatattattaaactatattgctacagccttttaaaaaaaaaaaaaaataatttaacaataataaataaataagaaataaaataaaaaaattatatcgctacaggtgggaaaagaaataatataaaatatccttattcatttcaagcaagattgatccttttttaacgttccataatcgagctttgttaagttttgagtccccgtcccttataccgttttcaccgaggaaaagaaaaaaaaaaggtgatgatgatatatatcacataatcaggtgcttaaaaaaaaactcatctgtcacatatttggtacaataaaatttataatggcgtttcacaacactattttaatcaattttctgtttttaagagtgaataagtgaaaatattttccaaaaacatattctataaaactattttatttgagaatcaaaattttaaaaataaaaaaaaatcattttcaatatttttttaaatagttttttttttcttaatcatattttagacttcgatcagactcggatctaaatccctccacggtcctggcgttaaacctgacctttgacctgaacccaaatctgagcccgaacttagacccgacataaataaaatcaaaaaatgaatataaaaacgaattttacaaaacacatttttgttttctatttttaaaattgaaatacaaaagtagttacagaacatatttttgttttttaaaaacaaaaaatttattttcattttgtgtaaaaaattagaaaacaaaagtgttacgaaacgacacctatattaatttatttgaacttagagtaagattaacaccagtttaactaattatcaaagaaatttgaactagctaaagcagaattatgaaaaagaatattaatatagatctagctcaactattttttttcaatcacttgtaataagtagcgattacatttaataaaccaccacacaactcccataaatctatttaaatataatatatatatttatatatatatatatatgcatataagaaaattctataataagaacaatttatattttttctcatagaataataatattttattagttattgattatgttgactttttaaaatttacactatttattatggaataacatgtacattatataaattggaaaagtgtttgattaatattgtctttttttaaaaaatgtaagagatattagactccatattgagcatgtggcactcaactagcacctcattattaaaaaaagcaaatagttatttacaaaaaaaaataataataataataataactctagtaatgtaatttcttatgttattttttataaataatttttttataaaaaatacattattatttcttaaaggagttattctacatattattttttctagtaatgtaatttttttttaaaaaaaatacatttatgtatctataataaaaaaaaattcttacaaaaaaaatatttatatactaatcaaatatatatattaaatcattatttttttttccaattttattgaaaagtaatcttttgatttctaaaataaaaattatatatattataatattttatttattattattcaattaaaaaaaaaacgtaaacatattagtaataaatttgtattaatataatgtacattttaataaaaaaaaataaagtaatggcaaaagtgttattgatgtagtacttttctaggtgtcatattggtattggcgtaattaagtatcatgtcttatataatttgattaataatttttagagagtatcactaactaatcataggatttacacatctagatagtgataagccccactaatgcttaataacaatgctatataacaaaatgtaagtagaaaataaataaagtataaaatgaatgcttaatacttaatatatattttctatcttatcaacaaaatatataactattttcttataatttttaactagcacataaataataataatagactatttatgatttttaaccccaacattgacttgtaccaaattatactcaaacttttcaagccattaaaagttccctttgaactattgagatcgttggactcaaggattttgttcaattttactaacggaaatcgaacgtggataaaagtttagaaggcacaatttgatacatgtgaaagttttgagggaacactatttggtacatgtcaaacttcaagaggcacaatttagtacatagacaattgttggcttaaaattgaaagaaatttgacaaaattcgttgaatccaacactcactagttcgggaaaattttttaatgacctgaaaagtttgagagacatgatttggtatatgtcaaagtttacagagcaaaaattctaattagcctaaacaataataatacaaactttaaaaaaaatatataattaaattttaaataagaaaaattattttaaagttataatttttggctaagaattttaaggaaacaactacatataattatttttattaactcaaaatttcgttaataataaggcctttttatgaatttaataaaataatttctataaatcttttgaagaataatcaataatataataataaacacaagatatatatttacgtggctttatagttaaatctacatagatcacaaatttgtcttatttcaaatatttttagttatatagtatagaatgaaaagaactacaaagaatcaaagattaatttattttaaagtgattatttgtttgaaagaaaactaagttcattaagacaaggaaaagtaactgggaattacagggggaattccctccccttgaaaaatacctgactcatggctagacaatctagcacttttggccaagccatccgcaacagcgttagagtttctatgaacaaaaaagaaactacaatccgaaattacatttaacaaatctaaaactaacagtgatacattaaggaatctccaatcaggagggggagagcgctgctccagggcattcacaaggaccctgcaatcagactgtatgtgaattcttgtccaggaattctgaactgctaattctagggcagaaagaatagcccgggtttctgcctccagagggcacgaagctgcacacgactccaatttatagatccaagaattagtagaacgattgatagcaaccactgcaaaacctccgaaaccatccttccaagatgaatcggtgaaaaggatgtggtctgcaatatcactttgcactaacaggttatcgaaaggaacataccaatctacactaagatcttcgacactacaatccgagtactctacaaaggcactgcaacttctttgataacacaattaacatcaaaactgctaccctttatccgaaccagattcctgcttctccaaatagattgaaacatacaacctatatagatgatgaactcttttcttaaagcagcagagagaggagatagcaacgcttcaacaaaatcaatcatggtgttatggttcatcaaatccaccctcactggaaaatgtcccgtataccagattgctttcacaaaagcacattccttgaacaaatgaatgctatcttctaggtcacggtcacaaaaacagcaaccaaactgtgtaatgacagaaattctagccacagtaggcagagcatcgttcaaaactttccacaacatcaaagagatcctcggatgaatcccaggttcccatatccatttccatatgtccttccttaaaccaaatttgtacccttgatcgagaacataggcatccttcacagaaaagttgccatgatttctcgctttccacaccaccctatctttatagccgccaggaattctagggatagtgacgattcttctccctaaatcttccccaaagatctgtaacaagagctcctcattccagttctgaccaatggaaacatcagctaatgatctagctgtgaatctctgagtcctcagactactcattaaatcatcaaattccaatgggttgagccacgggatccagggttgacgccagaagtcaatggactcgcccgaagcacaaatagccatagacccagcacgaaccaaatctctagttcccaggaaattcttccacagggccgaatcactatcctttggcttcaccctccaaaaattctcagtgctgcaatatttcttgagcagataagttacccatggtttatcagacctgcacgccaaaaaccaacccaacttggccgaaagagccttgttaatgtcttcaaaccttcttaaacccaaaccacccgaggcttttggctgacaaatactatcccatgatcgaagagccataaatctatccttttcagcatttccaagccaccaaaactttctaattatcgcatccaattcgcgacaagtagtcaccggaatcttatttgttgacatagcgtaaattggcattgaagcagataccgacttgatcaaagttaatcttccagcataggatagcaatttcattttccacccttcgattctcttcctcatactctgtttcaaactctcatattcctcccttctccttctcttgaaagcaaaaggattaccaagatgtctttcttcgccattgacttgattaaccttgagatgcttcaaaagagatactttcctgctgctattcaaattaggctaattaggatttttgcccccttaactttgacatgtaccaaattatgccccctgaacttttaacgccattgaaaatgccccatgaactattgag

SEQ ID NO: 219910 - DNA, 2700 bp, Cannabis indica
ttcgagatttaatagaatttatatattaaacatataattgtagagggtgaaatctataattatggaattcgagcaccagcaaccgtcaagaacaaagagagagacaaaagttcaattgggagcactagtggggtaccaaccaaagggactctgatgctcaagtcagtcgattgtaataaaaataataataacagaaataaatgatacgtaatggtattcggatggatgagtggacgagtagacagactgactgaatgaacaaatatggtggtaaagcttaagggaaaagtttagaaaggatgactatctgcttgagcaagtgagtagtaggagtatcgaatgttcgattccctgcttatgccgtatagtttcttttatcgtgttctctcagtgtcgttgccctccatccacatcacccattggactcgttcaagttgattgctttcctaattttatgggagcggtaaccgtctttctaactggttcaatatctacttggttccactcgttttgctaactggccagactcaaactcgattatggggttaactggctcatgacccataagctcacctatttgtctattttaaagctcagtgagtttgtctggctatcttatttggcctaataatattaggttcattactaatgggcccgtctgacttgtatattggatttctcaaacatgttctaaatattaagtaactttttacctttacaatttgcccctccctctctaaagagttaataatatcaaattaggtgctactattgaataacctgggtgctagccaagtggtctacctgcctaagtcaagcggtgtacccatatcttgctgtttgagacaagaaagttgcttgaatggttcaagcatggtggttaagtggtccttgccgcatgcgtgtatgtggctgtcttggctgagtaatgtttatgtgaacaattagttcttcaagaggactcttatctaggctaaatcgtcttgttggtttaaccagttagacatatgtttgaatataaattgcttataaaagccatatgttgggccaaataaaaatatttggctatctatctcaaaatatgagatgagaagagtagatagacatacatatatatatatatatatatatatgtggtataagaaaatatacatttagttgcgtaaggatatagatatatatatgttgtgaggagatagacatatatattgtaaggagatagatatacatatatatgtagtgtaaggagatggatatgtagataaatattgagaggaaatagatatacattttatatatctatgaataatgggaggagataaaaatatatgtaaataatagaaggagataaacatgtatgtaaataattagtggagatagacatgtatgtaaatctctaaagttgaagtgatgtgtgcttcttgtcccttttgtctaattgttgtttgaagacacatatttgactaccatatatatatatatataaaaaaaaaataagtcactctatctaaatgtacatttacattcaaaaggtagttaggtggaccgtggagtaaaagtagcattgagtatgcttttcttcacttggtccgaatatatgtatatatgagtctcatgttttctattcaagtgacatatatgtgagtagaccatccaaccttactgtgtatatgtaatatgaaggcaagaggccatcgtagagagtaccattatttatatatatgttgagtgtgatgttcgtctatctaactcacattacatgtttactacttgagcatcataactttactgataaacaaattatatattattatgactaaatgagcaccataaaatgtgtgttttgtgaacatatatattatttaaatatatatatatgtatgaacttaccatcatgtaattaaagatagtattttgtacccaatagttgattttaccctttcatatattactattactattgacttctagatgagtaacatttttcactcatccactacctttttttggctataaatatgaggagttaccatcattcttgctcacatttattggaaaacttggtgaagtgagacttggagtcttggaaggaggctttcaagaggtaagttttctaaattctctcattttgaatgtttttgttttgttcttcatgttcttgtgcatgttcatacttattttaatggtatggatgagtaaatatattttacttgttgtatgtttgtgtttgtgtttgtgtttgatctttgtgggcagtaaaaatttgtacttttactgtttgtcttcgtataatagtaaatgtgatttgagttgtgattgtctggctagctaaaatattatctaccctttggttaattagaggaccataactggtggtctatttagaacatgtattatccaattagtgagcattagtaaggtatttgtttgtatgtctagttgtttttttcaccttgagcttcgatatatatatatttttattttatctaaccgacgttttgctttccatatatttgtgtttttggtgaactcactcttagtccaatgttttagctctaggtgggttttttgctatgtctagcaacaaccataatagccgtgctacttcatctaataagacgactagtttttctaacgatacttcaaacatttctactggtgttgtaacaccctaatactaaggcacgctacagtgctttt

SEQ ID NO: 219911 - DNA, 5362 bp, Cannabis indica
agatatgaagaaaaagatgaaatgtaaactcaaattgctatcttgaaatgaagagaatgatcgagaaatatctattgctctcaatatggcgttacaagaagtatgattttctaactccctctaatatctgagatgggagatatttataggcttcaatggcttgtacaaagtggtcccatggggacaaaacgtagcttttctgttgcaagttgtaggtgttggaggtagtctggctcctcgtactcttgtctgatgtcaagtggtccccagttgcaagggagttgtccccgattgcatgttgcaggttccaggagagtggttgtagcatacccttggttgggtcctcagatcttgcaggttcgttatcgccgctactcgtacttccttggttgtagaattctcagaaggcgtggttgcatgctttctctatgcacgctttattgttgtaagttcacctctcactttatattcataatcctcggaacacacttacacaacacacgtaacgactcgaatgcgaaaccccccaataagctcatgtgtcaaccccaaacactcaagacacacacgtctcacccccttacacacacagcttgatgcgagcccccatgctcatacacacgtttcccctttccctacacacacgcggctggcatgtgagccccccatgggctcgcatgtgagcccccatgcactcgcaccaacacacacacgacatctcttccccacacacacacggctcgcatgcgaacccccatgaactcgcaccaacacacacacacgtagcacaacactcacccacactcacggctcgcttgcgagccccatacttacactaacacaccctcgcacatggtgctcatccacacatgtacaacctctccttcttacgctcatgcttttgtcattggatcattatgagaccaatcatcgaattgcacgggcgcatcccaagaattaggagtatcgatggcggcattgcaaaaatcatactgagtaggtaagctcattgaatgtgcttttgttaatcgcttcgagattagttaactaacctcagaaattatcagtgctaatttttggggttaacacttgtcccccagtttccatgaatttctagaaagtgttcttgtcgactaagtgagttggagaatctgccttgccgaagtgtgagaccctcttggttttcttcgaggaaagccccctttgcattggagggttcctttttttactaagtgacctcatcccccattcgttcgagcaacaatattacttgactttggctgaacaactctaagggtcactctttggcctaacaactttcgtaactcgcattggccgagcaactctggagattactctttggccaagcaatttttggaattggcgttggccgagggactctgaagatcactctttggccacgccatttttgtaactggcgttggccaagcgactctgggggtcactctttagccaagccatttttccactgtggtaagcgggcattcatttgagggagtatggctctttgagcagtctcaacctcttatcatttcttcatccttgtactcggatgggagtgggcttattgtacttgactgtgtcccctcttgatttataagtgtttacttacgttttagaggggtccctctcgttttagaattatgccatgagcatctttcaagagctctttgggctcggcaacttttgtgaggagaggtgtatttctttcgtcaagcaagggtaggtaatccttaccgacataagttttttttgcctttccaagtacgtagtgttgcccatggtcccgcacccttggactttgtgtgacacacacatttttattatgcacataccttcctcgttcattgttatcattatcatttaatgaaagaggagggatattgcctttccattctgcaacaagatgtggttgactaatcctaatgtaatattccttatcaacaatagtatttcttcaagtgtgtcacattccatgccctcaatatcattgtgtcatccatgcgggctaacttgtaggtcccgagtgggatgactgacaatctgataggtgccttcccaattggccccccaaactcctgccctcagatccctagtatttgggaagaccttacttagcatcaagtctttggtattgaaggcatgcatacggactctcaaattatagtatcgtgtcgccctttgttgatacactgctaatctcatctgggttgctttttgattggcctcttcgttgatattctttaaacgaaatgagttaagactcatctcgatgggaagtacagcttcacactcgtacaccaaggagaaaggagtttctaccatggtggagcgtggcgtagtcctatatgaccaaagtatatttggaagttcttccacccatcttccttgaagcttttccaactttgttttgaggctcttcttaattatcttatttgctacctcaaatttcccattggcccgtaggtgtaccaccgccgagaattccttctcaatgcgtctcttagcgcagtaagaactcaataaatctccttcaaattgggtcccgttagtggtgatcttgtagggcactccaaatctacataacaggaatttattgatgaaggacatcacttgtttagcggtgatgctaaccaatgacacaacctctacccattttgtgtaatagtctattgccaccaccgtgtattttactccagctttacctgtcggtaaggccccaatcaagtcaattctctacatggaaaaaggccatgcactggtcatgctcgtgagtttggccagagggcgcctactgtagctaacatgcctttggcatttatcacatttttttgtcaatgtcgtcgcatctttctccaagctaggctagtagtatcccggcttcaacaccttccttgacatcaaataaccccctacatggttgtcgtattctccttcatgtatctcggataacacttgttgcgcttcactttctcttatacaacacatgagtgggatggagtaacctcttttgtacagatatccatcaatcaagatataccaagaggccttatactggattcttcgtgcctccttcttatctatggaaaacttcctttctcagatgtactcaatgtacgacatcatccaagatggttctttctcttcctcttgtgacactagatcacactcgatagctggttgggctaagaactccactggtacagactctaggacattgacctctcgggttgacgtaagtttagttagggtgtccacattgacgtttctctcccttgggatttattcaatcgtgaaatgttgtaactgctccagggaactcctaaccttggccaagtatgccaccatccttggtcatgttgcttggtattctcccctcacttgggaaaccaccaactgcaagtcgctgaaaatttgcagccgcgtgacctttaattcctttgcgagtctcaatctggctaatattgcttcataatcaacctcgttgttggaggccttaaagccgaactttattgcacaatgcattttgattccttcaagggctatcattacagctgtaatgactgcagttagaatatgaattagtaaaggcaattagtgttatttattggcatttttataattatttacgattttattattttatgggtcccattattagaaataggcattagagttataatttctcaattctggagattttattaaactctaagagtactagctatgttaaatatgaattatgtaatttttatgatttttcctcggtgacgatggaaaatacgatggctggccgttagagtcacacggataagattagaacctatttcttagcaggaaaaagttacgagatatttagaataccaagtttgggcgggattatgacttttgaccattttacccctaggcttacaattgcttaacttaggaggtttaagggcaatttaagtatattatatttgaggatagggtggcattccctaagggtggtaactggccacttgttttctcagttgaaagtaatgcttttttttaggaattaattaattagaaagagatttagaaaagaaaatcaaaatttcaagaaattcattcccctttctctctctctttgctcaacccctcaaaccagtagaaaccaactctaatcttcatcatttttctagaattcaacaaaaaaccaaagtgttaccaagtggaggtaaatcctagaacttaatttttagttgttcaagctttatgtttagtttgattatgtgaatttgaggattattggtcgttaaggttagaatagtttgtgaatgaacaagtttgagttttctaagttctttttgagttagaatatattgagttcttgcagtagttatggtgttttgcgtggtgaatgaacaagtttgagtttgaaaactcaaacttgggtcattaatggcatgtttggattttgtgtatgtttcttgttgttattgcttggaaaattttttgaggttggtacaggtgttttggaaggtttgacgtggtttggacacgaattggacaagttttgaacttgtttgggttacctggtgcaaactggttgaccagttttacagatcatgtaaaactgattaaccgaattaggggcaggtttcccggattatttgatttgtcaattcgtgttttattcagagtcttaattggttatttctttgataattagggtattgttataactattactaatagcagatgccttagtagggagtttaggttttccaaattagggttttgacgtgtaatttacacgtttatgtaaatgtgactagggcatccatccagcacgaggttttccgttcaagtcggccaactcacttgaattgggaaacgaggtaagactagcatagaacgtattatatatgtatgttgtgtatgtgatttatatatgttttgggctaatatcatagcgacacaatcattgtgtcagtcaacccaaaaagtattaattggtgctatcatagtggtacgaacatagtactggttcaaaagtacaggcatagtactaattaagagtgatattatggctaattgtccttttgaatactattgatgttatcatagcggtacgaacatagtgtcgggcccgcaatgcgattatagtgctggtagtggaggatatcatggtcaatagtaccaaatgttaagaacgttcttacccatctaataagccttttggataggtgtatgggcacctaaacacaagtcggtaatgtattatttgtgatatgcttttcttactgagtttattgactcacagttgctactttcatgtgtaggtaaagaaaaggcgaaggctgaacaggagtga

SEQ ID NO: 219912 - DNA, 3630 bp, Cannabis indica
ttttatggtaatttaattaagttttatttttatgaattttaattcaaatttcttttaatttttatattggtttttttaagaaaaaaaccatattttagtttgattggttagataatgccatatttagtgacatttactttttatgtcatatttatcataactttaataatttttcccatatttttgaaaatagccctaacttatatggttgtattgacatttctactattcctaagaacatttgttgaaataaaaaaaaaaaaaagatttgacggtttgggatggtttataagaaattagaattttgtacaaatacggatgtacttaatttaatgtgtgtcaagaaaaataagtgtaagattggatttactactggaatatatagccggtttttcttttccattgtcgaaaactttcaaaaaagaaaaaaccattaatgaattaaaataatatgttgcattaggatttttaccccaactttgacatgtactcaatcatgttccttcaaattgtaaggttgttaaaaatgatctctaaactattgagattattggatttaagaatttttattttttaattttagtaaaaaaagtctaacatagatgaaagttccggggatataatttagtacatatcaaagttcgaggggcatgatttggtagatatcaaagtctggggagcatgatttagttaataaacaattactgaaacagtaaattgaatgaaattaaacaaaagtccttaaatctaaggtgcatttttaacaaccttaaaaattcaaggggcatgatttagtacatgtcaaaattcagaaggcaaaaatcctaattagtcaaataatattattcattggtaatatatatatatatatatatatttatatatatacatatgatggttactttttgtataacacgagtatataattaattgataaaaattttatttttaaactcaaattaattatatgtttaaaataaattattatttttttatttaaagtgtttagtaattttttttttcaagtttttaaatattttttattttttatttataataaaataaataaaatcaagtaagtatcacgttataagtaatttattaattattttttaattaatcataatggtttgacaatgattcaattaaaagtaaatgtagccatcgtggttatatatttgtggcatgtttactattaagcaacaagaattaataataaaaataataattccctacattttatttatttaattaattaaattttaaaaaatgaagaacttgattaaataatggaaaaaagaaagggagaactttccctaccaatattttaaggaatgtcattaagggtaatgacttttatttatttttattttatttttaataataaatttatatgacaattttatcctttaaaacttgtcttataaaataaatactgtatactatagtttaactcaaaagggtaatttagtcaatttaagcactttgattacgtttcctgataaagtaaacaagataaatcactatcattccatttctaagtaacatattacaaatattaattacgattattctttatttatttcattatatttctctattaatttattctatttctgaatattaaataacgtgctattgatatagccagcaagatttcttccatatatatttgacattccaatttatttgatataaaaaatttctttctaaaaaaatattggttcttaaaattgatatttttttacaataaataatctttattttttaacaaacacctcattttgttaatgcactagaaaaatcatgatatcctattttataaatcaatttcttatcaactacatcttttttattcaattctttttaaatttaatatcttaaatatatatatataattatatattatgtaagatgctacaaatttataaatttaaaacaacaaaaaaaaaattcaaaaaaataaaacaaattacaaactttaagtagggttttgatcatatgtaactaactaaatgttattgtgaataatcttttattgtcacttcaacactacatctgtaatttaaaatttaaaaaattcattcttattagtaatatataactaaaaaggtaaatttattttaaattttcttgttaattccataccacgctaatattattggcagaatggcactccttggtcaatattaaaatatacaatggaatgtgcatttactcaaaaagttggcttgacaatgtggacactatttttgacacatgatacgaaggaaacaacctccaagcctacattccaagatatggcaatgttgcctacacgatggaggcacctaggtaagcaccaagatccatcgaagttgtttctaggtattattcatcaacaaataggccataatgactctaaaacgatgaactatgaagttgaggatgtcacatggacatcccaaggctcaatctgggtccagtacaagtactggacaccgaggttgacatcttgtttgccttttcacatcagttgtggttcctaacaacttcctatgggcgatcttcttagccactactaaaaaacgtcaaattcccgtcggttttacactgtcggccaaaaaattctcgacagtccataaaaccgtcgcctatacgagcatcgcggatactgggtagaatagacgacgattttaaaccgtcaagaaaatactataggccacggtttaaaaccgtcacctatagtgtccactataggcgacaattttaaaccgtgacctatagtttaggctacagtttaaaaccgttgcctcaagtataggccacattttaaaaatgtcacctatagtgttataggcacagttttaacccgtcgcttatagtaaaattttcagttcaattataaatttcatttttttagcgacagtttttgcctgtcattggattgcaaataaaaaagaaaaaaataaaaaaaaaaatctgctttttttccttgcactaattaatttttactaatttatatattgtcacaattagttagaataaagtataaacataaattgaaaatgaataaaaaatgaaatacatacaaactacacactcaaatggttctccattaagatgtcgtagctatgatatgaaaagaaagctacccagttccgagaattactacatacacaaaaaattaaaagtagaagtagtttccaatactttctcacaggaaaggaatcaatgaggacacccacattcaaatcccaagtgaaacatatacccgtaccgtaccagacttaaaacaaatggatgagattgcttcgttccccacttccatggtgttcaccacatctttgcattgcatatcaaaccagcacacacaaccatcctgtgatacatgatatatataaaaattgataaataattcgattttgttgagcatagaagagaaaaatactcagagattaaaggatcgaacataaaatataccagagatagggggcttgggagagagagagggaaagcagagatagagggctcaagagagagaagagagaaagagttatgggttttgaaggtcggggaccatcgccaacgaaggtggtgttgaggtttggggcgaagaacggttcacgagagagagagagagagggaaac

SEQ ID NO: 219913 - DNA, 2934 bp, Cannabis indica
aaaaatataattgaattgtattaaatttagttgcgaacatgcattacatgtgtttctaatacttagtgtatttatatatttattatataaacggcagtttgttgtgtccagttattactgtcataacaaatctgattctaagaggccacttcacatttatgcagctaccgccagctcctccaccgccaccatttccagaaggctacgtcccccttacaaactcagaatcggaaaatggccctgaaacccagcaagctggggaggcacgacaaccaccttccgttgatccgatcattgatcaaggcccagctaaaagaatgaaattctgaataagagctaacacatcgtatcttatctgcctggaggtatgtgaagagcttcactaacttactttaggaaggggatatggtacaacttaaatgtcagctaacccctaggcccttttcttttgttccttgttgaatattaagttagtaactttaaagaaatgaagaagaaaacatgatacaaagaagcaatctgaaaattgtagaaaccttgttatagaagtcgatactcggtgttggtgatattggatttatgtactgctaactattagcagaagaccattggaagcttattacttgtagctcgttgttgtttacatgaaattaaattagtgctatacagtgtctaatggactatcctattcctaagtcttttttggagtatggattttctgatttctagggtgacaaaagtgaggagttaaatgttttttgactaggaagtattaaaatacaaaacagaagattgcttacaccagattcatcttgtatgcaccccaggaatgttttctgaaagaagtgagctataacgctccatagccgtctcctcgatcatttcagcaagctgttgccaagcattccttgcaaaatttgacccatttcctccatcacttaatcaggcaaacgcccccataacttttcttattaagtactaaagttattatgtaaaactagaaagacaatgcatttgtgatttgagactgaacagaacagttcaagaatctgttccttaaatccttcatagcataattgaaagtcagttgacacaatttttattatgtgtacatttggaacactttataaagcatattactatagtacaaaagcaatacaatacagttttgttttttttgcactccattaaataaactaaagtatatattaaaaactatctatacattagaagaggaagactaatataattaccgtgcctcaataggcttacaaaaattatttaccaagatcgaatattgcagcaggtaaaggaaacttcagtaatgcaggttccaagcattgtgagctgactatgaccaaattcattttcttaattaagaacacccatcaagtgtgagtgtttacttccactatttccaatagttacattaatttggtgtaggattttctactatagtacaataattctaataattcatcaagaaatcggtttcttagtcatttttttagtaacaatgtcaatttcgatgattttttagcgtccgtagtaattccgacgacttttctgacatcggcagcaaactctagcaacttttccagcactagacaaataaaacttcttaaaaataaataaacacattaaatatgagctttaaaaaatctaatttatatatatagtatatcaaataccataaaaatatctaaaaaataaaaaaatactatataaattggtcaactatatttaagtaaataatttttaaaacccctaattaatatctcaaagagatagattagccctggaggggtagtggggtaagttgaaaaataccacttttattaatcaattaatcaagtttacatctacttttatatttaattgaaacatacctctttttatgtgtattatactcaaaataccctgacataagagagtcatatagagagtatcttgaagtgacaggggcaaaattagtataatgtttaaaaaaagagataaaaatgatagactttaaaaaagaggataaaaataaaagaggacaatataaaaaaggtatagagtgtaatttagtccactggaaataagttgcccaatttatatggttgggcctaatgttctcctacagactgcaaaagccaaacttaatattttttcttaagaaaactgatgaaagtgaatatcatgtatgttacataataataataataataataataataataataatagtaaaagtggaataagataatcataataataattatttttttttaaaaggaaccttgttgaatttaactacgtatgaaaaagtaaatgtaacttaaaaaaactttaagtattgttattgagtactagtggtgtttagcatcttctaaacgtgacattttgtgattgactactaatactttctaaaaattattacattaaactatataaaattcgatacttagttaaataaagagcattgctataaggcaccagtggtgcttagcaccttctcgtcatgttgtgttgcgattggctagcgatactccttaaaagttattatattaaattatatgagacccgatacttaattagaccaatagcgatattgacacataggaggatgttaaacaccgctggtgccttttagcatttctcttaaacaaataacaatattgatacataataagatactaagcattttttagccattcccttttaaaaaatatccacttaacatcgtcttggatctttcaattgatgaatcgtcattctcacgcagtataaattatgtatttatatatttgggtagttgttggaaaaggagagaaagagaagaatgggtttggtttggcttagctaaagagacaaatatactcagtcacgctataaataataatgattgttgtacaaggacttttgggcatgccaaataaaatgaaatgttaa

SEQ ID NO: 219914 - DNA, 1350 bp, Cannabis indica
taggggtgatgtcccgatgtcttcactataggggtccgatggtttattctatttagaggttagaggtgatgtcacaattgtgtttggtgtctgtacgataactgtccaatggtttgttgagtttagaggttagggtgatgtgtttgatataggtcgatggtcgtccaatattggcatgatagttaacacttgtctattaagcacgatgtagttcaatagtttttcgatgctggtacgataagttttaaatattattctttgagtacgattacaagccgattgtgttcgatattacacattttcagcaattattttatcctttttttttgcggtgacagggtcaactgtgttcgcattcttaatgtataatggtatttaggagtgtgaggatagagatttggtttttaatagagcagaatgtttgacattcgagattaataagaacataacctactcactactggttgagcttttgtacaatgagttggtggttgacaaagtacagtatgacttgaaactagaagtgaattacaagtacatgaaagggttaatgtatcaatttaaagttataagtaatgataagcgtctaagtttatatttatcaatgctttaaaagaagcgagataaatttattcccctttttgtgactttagtgaataagaatacctatatcgatcctaatcctccactatagtgggtgaaatctacaattacgtaattcaggcacaagcaacctgttaagaacaaaaagagagacaaaagttcaattgggagcaccgatggggtgtcagccaaagggactttgacgcttaagttggtatgattgtagtaaaaaaataacaataacagaaaataaataaaatgtaaatggtagtcggatagatgagtggacgagcaaacggatgaacgaaaggaacaactgcggtggtgaggcttaagagaaaagtttagaaaggacgaatgtctgcttgagcaagtgagtagtgtgagtatcgaatgtttgattccccgcctctgccgtatggtttcttttattgtgttcccttcgtattgttgccctccatccacatcatcaattggactcgttccagttggttgcttacctcattttataagaatcgtactcgtctttctgactggttcaatatctacttagttccacccgtttggccgactagctggactcggatccaattatggggggaactgactcatggcccataagctcacccatttgtctatctcaagccctagtgagtttatttggttgccttattaggcctaataatattgggctcattattgatgggcctatttgtttggttttgtgccctaaataaaacccattac

SEQ ID NO: 219915 - DNA, 6737 bp, Cannabis indica
cgcaaatgtgctctaagaaaaattacttttaccaacacatgcactaagaaaagttttacttttgccaacgcattaacgcgctaataaaaatcacttttgatagatagatatttaacttatgtcagtgtaataatacgtcagtaaaactttataatttaattttttatttagtattatttaatttaaattttatcaattatttttaaattaaaataaatagaaattaaaaaatagaacaagaaaacttgattatagataattacagaataaaacataactttaaaattttctaattatacatacataatattattataattatattattataattgtcaaaaatttagtaaataaatatacgtttaaaatatcaacataaatataatcttctcaactaaaataaaataaatactagtatactactacaaatcgatttcgtcatcatcaatatcatcattgccatgaccattattaatttattatctcccacctctgcccaattagatccaacataatcaaactgcagtggcgagaggtctaggcaacggccttgagcttaggcaccaaatcctttcacataacgtgaacgtgtggtggaccaagaacttcggcaactatatccatatcctttcacagaacttgccaatgcaggttcctagcgagacagaggtaaactatataatccaataatagaataaagggcatggaaattgaatggatagatgaagaatgatatacaagggaaatgagaaaaatgagatatataaataaattatgaaaagtaacatcaagcgcacccaaaagtattgtacataagtaaataaggggattggtaccttttctagcaagctgccttcccttggatgcatcatctacttccttctcaagaaagttggccaattctcttgcttcagaagccttatcagttgtaacagaaattattcttctaatccctttagcaatgccctctttagataaaattgcaaaagccttggcttcttttgtatttgatatatgggtcccaagacacagccataagggtaaactttaatagcaaaaactccatggaaaaacttatcccagctcaaaaactaatataaatatatatctatatctatatagatatatatacacaagatattaacctccgcaaagttctgcaaaaattgaggtccattcatcattttctgggtcagccagaaagttgtcaattttcttcccaattgctaccactctaacttgatttgggtagacctacaattataatatttttatcaagatcagatcattacatagaacatgtccaacatgaattatcaaaaagaaagaaaaaaaaaagtgtcaacataatcaacttaattccccaaaaactgctggtaaactattgatgcgctcagcatctgccagatttacctcctttgaaaagacatctaattttgccgcaatttgatcattcacaatattctgaattcttctcaaatcattgagatctactggcttacctgcaaagtgcaagcagagtatttaagggaccagaagagagaaccaaagatatacacatgaatctaattagcattcttgaggcttgcttttttctaagttctaagctgtaattagtttaaccttgagttgggctcaataaaaatggtccaagcgtgttctaagaagcagtgttaaacaagaccagaacaagttattttaattggaaaagaaaaaactcaccaagttatgtcagtcacagaacatgttatcgacacaaagaaaactctttaaatgataataatcagctaaaagagtaggtgaaatcttacatattgggccgaaacagtatcctttgctcatttgtacatagatctacaactagttgttttagaaacaaccttcggttgagttgcttaggtgataacacatctacatccaatgatccactttcctgttacaacaaaaaattaccactgtttttgttactcaaaactacttgtaaatgaaatcactttctatgcaaagtaaacatataataaaattcccatgcaaattactcttattacctgtaggaatttgttgtactttgatatgctagattcgcaactatccaatataaattgtagggtttcttcctctatatcagagtatctaaattctttgttgttattaactttgtttgatgttgcggcagccatctgagaaagccatatattcaagatggttattcgatttgcataaccatctattgctgttagaaaaaaaaaaaaatctactgttgttgactgaagataccatccaccaactaattcataaatacattacatattatacttaagaaaatggtcttcttattataattagttcgtacaaaactagctaattgatgacgaatgacatagtaagactaagagatagaagatgaattcaatagtgaattcaattaattcgaacccattcaatagttataacaaaatatatcaaaaacatgtaataaccagctaaattgttcaattcaattgggtatgctaagtttcttcaattacctcactaataagcactgaatttcaagtatttatcatctatacattagaaaaaacaaaatccaaaattccatttcaaagaaatgaaaaaactgagtttttcttgccaaattcaggcaccattttggctcatattaaacaatgcctagcttgttacaaattcaagtccaaatgatcaaacaagttagaaacaaagcctagttccaaatacagataatggcatatttgcttctgcaattgagtaaagcatttcatccaatcaacagaatttaaagccttagtagaaaccagtgaatctttcaatgttgaatctacaaacaaagcctagttccaaatacagataatgaactcaaataagcacattcagggatcatcaaggcaattccatatggtgtaatgaaatcacaaaagtgaatcaaaaaatcaaaaaccactctacctgatatcgaaacgctgatgtagcctaacctgctgcaatcgaccctcggcagtccaacagtttcaacgttccaattgctgacccgttttaattttttcccagcaaataaaaaaattaataaacaagttccttctcgatgaataacacgatttcatgataaataatagagtaatttgcggcataaatacctaactttaactctctaagtttaaatacctaagtttaagttaaacttacgcaaatcaatctaaataataataataataataataataataataataataataataataactttaactctctaagtttaaatacctaagtttaagttaaacttacgcaaatcaatctaaataataataataataataataataataataataaccaaactttcttcaatatggtccaaggaaaaagtaagatcaatgcagtaggtacatcggcgttaattttattttttacctttttgatttttgagttttcaagctgaaaataaattaaaggggaaaataactaacagattcttgtacgtgctgaccaagtccccaattcaactccagtgtcacttagctactaaagtttcagattcttgtagtactactgattgtacttctcaatgtaataatgaggttgtttctacaacctcctcctcttgtaccaattctgttagcaataaagattacattgtttcaccgtttaattctgaagtctttgctgttaattttaaccaagacatcaatgtttggcactcaaagttgggacaccctgccccaaacactcttgccaaagtgctaagcacattacaacttccctgttctctcaagaatctaaggttctgtgatgcctgcaaattaggcaaaacacacaaattaccttacttactgtctactacaagggcctctatgcctttggaattggttcacacagatgtgtggggaccatctcatgaaccatctaaggaaggttttcgttactatattcactttgtggatgactttagtcgattcacatggattttcccaatgtctatcaagtctcaagcctttcctatctttcttcagtttaaaacattagttgagaaacagtttcaatgttccataaaaaagtccaatccgattggggaggggagtatcggacttttgcttcctttctagccactcatggaattcatttccaacattcatgtcctcatgaccatgaacaaaacgggagggctgaaaggaaacatcgtcacataacagaaacaggcatgacacttcttgctcaatcgggtttaccccttgcctactggtggcatgcttttcagcatgctacctatgttatcaatagattaccatctccagttattgacaattcaacaccctatcaatgtctatttcacaaagaacctgattatgggtttcttaaaccctttggttgtgcatgcttccctctgcttagaccatatcagcatcataaaatgtccttcaaatctgaaaaatgcattttcattggatattcgatggcacacaaaggttacctatgtgagaatccttctggccgaatatacattaccaggaatgtccagttcaatgaacttgagtttcctgcccttgccacttccccacatgttcaggtaccatcttctccttttactactactgcttctactaattttatcacatcacctcttccatgtgacactaatacctcctttttatctgacactgaggtccaacttactgctcctcaacattccacagtatctaccacgtgatcaaccacctatcccagctactacactacctataacacaaccagtattaccaactcaccctatcccatcatctcaaccaaatacatccactatctcaaccaccacacaaacagttgaccccaatcatctccaaaatccctcaaacagtcaccttatgcaaacaagatcgaaatgtgggatacacaaacctaaagcatatctttccactcatcaccctctcccagaatctctcctacccacagaacccaagtcacttaaacaagccttagccgatccactgtggaacgctgcaatgtcaatggaaaataaagctctcatcaaaaatcacacttggacactagtcccctatcatcctcagatgcatctagttgggaataaatgggttcatagagtgaagcttagagcagatggtactttggacaggtgtaagtcccgacttgtagccaagggttttaatcaaactcctggaattgactttactgagacgtttagcccagttgttaagcctgcaactgttcgaataattctcacattggctgtctcctttagctggcagattactcagttagatatttcaaatgcctttctacatggcaatctacacgaaacagtttatatgccacagccgcctggatttgcagaccctcaaaaacctacatatgtatgcaagctacataaagctatctacgggctaaaacaagcaccacgtgcttggaatgataaactaaaaactactcttctaaggaaaggattcactgcctcacggtctgatgcatcattgtttgtctctggtactggtgcaaatctagttatcttactagtttatgtcgacgacatcttggtcacagatccaaacaaagaactcatctcacatcttgttactgatctcaaccaagaattctctttaaaggacttgggttcccttcattactttcttggtgttgaagtggtcagaaatacgacaggaatttatttgtctcagtcgaaatacatctcagatttattggttaaagtccacatggaaggtgccaagcccagtccaacacccaccagttccacacaaccattgtcactgtcccaaggtgaaccactttcagaccaaactctctatcgcagcacactcggagctttgcaatatctgaccttaaccaggcctgacatagcattcattgtgaataaactgagtcagtttattcatgcccctaccaccattcattgggaggcctgtaagagacttttcaggtatcttaaagggacaattcatgaaggtcttcacattagaccatgtcttcaactctgtcttcaggcttattcggacgctgactgggccagctgccctgatgaccgacgatcaacagggggctatgccgtgtatctaggaggaaaccttatctcgtggtcagccaagaagcaacaagttgtggctagaagcagtactgaaagtgaatttagatcacttgcaaacacagcagctgagataaaatggctgtcatacattttgtctgaaattaaaatcaaactaccctctgctcctataatatgggttgataatcaaggggcagcgtctcttgcagctaatcctgtgtttcatgccaggtccaaacacatagagatagatctccactttgttagagaccaaattcttgcaaaagaattggaggttcgatatgttccatcatcggaccaagttgcagatatcctcacgaaggctttatccaaagacagattttcctatttgaaatccaagcttaaagtctgtactacaccctttcgcttgaggggggatgatacagttacaattagttagtttgttactgttaggaatctgttatttctgttattttctgttaagctttctcgtactctgttttctgtttctctgtacaaagctatctctataaataaagcctcagctcctaagtcttgtaacttttgcaagcttatgagttctttgcattcattgaccatacacttgtattgataagttcacagtccccgattaggttcgaga

SEQ ID NO: 219916 - DNA, 4786 bp, Cannabis indica
aaaaaaaaaaaagacatagtgatgagatctttaattataaattgagttgtgtgattcatcatttaagaaaataatttgcaggtgtgaagtttcaatggattcctgcttttttttttctacttttttaaaaactaatttttaccgtacctttttttactttagtttagtttgacacgagtattgtgatttattttctatttttcattattgtagtctaaaattttggaaaaaattgaacaaagctccactaaatctaaaaaaataaaatgacattagcccctgtcactggattagtaggagaagttggtaagattgagaacatttattccttaatttgtactgaaaagttgcctgtgaaatggtcaactagaaaaactcaatctaatattttgtacaatcaacatatattcaagcaataaataccaatttgggaattaggttcttgttgttggtggaaacaagaacacaaaagttacatattatatataaaaggcttatgagcaagttagcatgttttgttagttattgaattgaatctatttgtgttattttcagctcattggaagaactcctctagtctatcttaacaaagttactgaaggctgtggagcatatattgctgttaagcaagagatgatgcaacctacatctagcatcaaagacaggtaataaatattatatcagtttaccttgcttattttgttttcaaaattttaactctgtaaatgagatcaatcatgaatattgttttgttggtgttactgctgttcatcagaccagcattttctatgctgaatgatgctgagaagaagaacttaattactcccggaaaggttagctagctcagtagtgtgtgtgatttgttgttggtactttagtttttgtttttggtgtaatagttaagctttatttgtcaatgtttcagacaactttaatagagccaacatcaggaaatatgggaatcagtatggcatttatggcagccatgagagggtataaaatggttctaaccatgccttcttacacgagcttggagcgcagagtagtcatgagggcatttggtgctgacttaatactcactgatccaaccaagggtatgggaggaaccgttaagaaggcgtaccaacttctggaatctactcctgatgctttcatgctccaacaattctcaaatcctgctaacactcaggtacttaatttaaaatgtttgatttctgtttagctccatgattctgttgtatgtgctcaatgaacatcttggttttatgcttaatggatggatcactaacctttgtacttttggggaaaaaaataggtacattatgaaactacgggccctgagatatgggaggacacgagtggacaagtcgatatctttgttatgggaattggtagcggtggcactgtctctggggttggacagtatctcaagtcccaaaatcccaatgttaaggtgtaatttttaagtttcatttttcgatttataaaatacttaagcctatttgtacacgatcccttgtttgaattccattattcatttctatattcaatctattttgttcatggcagatatatggagtagagccttctgagagtaatgtacttaatggtggcaaaccaggtaaacaactggttggtttagttctctgttttggtgtctttctcttttaaaattctctgtttggttgcttcaatcacggaataagttcattgtgcttttgcttattggattaggtcctcatcatattactggaaatggggttggatttaagccagatatattggacatggatgtaatggacaaagttctcgaggcaagtagtcaaaaaaagaccaatgcttctaagagtgaagactataatttcgaagtttaaatgttggttaactgtcttttggtacttattatttgtgcaggttagtagtgaagatgcagttaacatggcaaggcaattggctttgaaagagggacttatggtaaattctcaaactctctgaacactgaaccagatggatcaaaacttgtgccaaacttagatttcatatgaaaactcaattggcctcattatatcaagaaccaaaaccttgttgcatgatgttttctctcacaccctataacatttgcaggtagggatatcatctggagctaatactgtggcagccctaaggcttgcaaaattgccggagaacaaaggaaaacttattgtggtaagagaaacttatctcctctaatctgcttataacactacacaatttaagggtactccactatgtatatgtaagaattagaagatttacattttatcatcattcatataacttaataaatcaaaatctaattggattaatttgaaaactgcattcttgtatatgtgtgtgtcatgagttgagcacataacctttggcagaaagagaatatgttaaaagaattatggttttcaatatgtttgaatttcagactattcacccaagtttcggagagagatacttgtcatctgtgttattccaagagctgaagaatgaagctgaaaacatgcaaccagtttcagttgactgatacttgaaaaggatcacccccaaaattattcaaagccctttccttagtgatgctaatgcaattttatttgtcaatctccagttaatttgagtctttgtaatgtaaattggttattttattgatatttgcaataagaatttgtttttatgctcaagttacgggggtttttttttttttttttttattttttatttagagtcatctctatattttagtacaatttaaaaaaaaactaagtttcttgttttaatattaatagttttttatactccaaaaaaaagctccaatagtagtttaaaacgcatgtcaaatttagaacatgttaaaagtttttttttttttgttaaaaaatgaaattcatctttgaacttcagctactaatctaggtagcaaaacagatgagacatcctccagactgaaaacataatcaggataagaattgaaagctcttgcaaaagcatgagctactgagttcgctgaccgtttaacaaaataaacagaaacatttctcatagtagcaagcgaattcttacaatctttaatgaccaaactaaataaaagaaatcatatctattgagctaagtaaatcttgaactactgtaatattctaaaaaataatatggtatttaattggacatattttattaaatatgtaattattttggtaatgaagtgagattatgatcttacttaagttaattagtgtggatttaataaatgattaaataaaacgtaatttattaattacagagattttattataatatgtgggtatcgtggataccatttttgaaataaaatgttttcgaatccggctaccatgagaactcgacagagtggtcggatatgtcatgataataaaatacaaattggaatggaggttataccggactaagttagagtgttaggttgtcggtttggtggattagttagaattactaaaatacccctaggtttaattttaagttaaaggttattaggaagggtataatggtcattttggttaatagttattaatattgtattggctgaattattaggataatttattttttttaaaaaaaaaagaaaagaaaagaagaaattaagttaataggattaaagtggataagttagaagcatttgggtcttgcttcttcttcttggccgaaccctaggggagctgcaacctaagagtttctcttgcaattcatcatattcttggttgtggttgggtgttggggttaattaagctttaaggatcgggattgcccaacgttgttttccactcaggtcggcccgcacacttgagttatggagtgaggtaagaaaaatgttatgcactgtttatggttagatgattaacggttgtattgttatagcctcgattatgatcgagatcctggttaaatatttgttgagcctcagttatgaccgagggttggaaacggtcattaccgttacgagtaattactcctaaaatcccagataggttccttacttatcgttcgctgtatcgggcaacgatagtgacatatatagctcgtgggtaacgagtagtaagtgtactttatgaagtaccaagattgtgtgattacaatgttgtgtaattgtttagtatgttaatatgtgatgtgattaaatgaatgttacattgtttatagatttattcacttttcttgctgagtctctgtgactcacgagtgctaaatagtgcaggtaaagggaatgccaaggttgagcagccatgagtctgaggtcgcagcagcaatgtacatatcagctgcggtgccacggcccagtgaacaggataatccgttttgattgtattttgaagtataaacgtactttgtgaaaacatttttggattcggatgtaaatgttttggtagtaagggatctcgtaaatattaatacttatattttataaaaattatgcatttgttttaattacaaaaaaatttaactagccacactttctagtataattatacaaattaataaaataacaattttataaaagcacacacatagcgttcttgtggaacatggcgttatagtattaatataaagtgtgtccatttttttaattttggtaaaattgtgttaaaaaaatttaatatgcaccaaatgtatgtatgtaaattcaaatttccaaagggaaatttcaatttttgcccttaataatatatcttatatcaaattttataccccttactaatttatacaaaacaattccactattttcaaattc

SEQ ID NO: 219917 - DNA, 3121 bp, Cannabis indica
ctaattgcttggtttagaagaatcaatatggaatgcacatcttctagtttcggtatttaacttaagtatgtgcaaaagaagagatcaaacataagatactcaagttaatcccataattgtgattgaaaaatctggatcttgatgaacatttaaattaagcgtgcagatccctgcaaattaaaattatataaacagcattgggatgataaaatccatgaggcaaaactcatcaaagagtagaagtgcacctctattaatgcagcagcacaaggatcttcaaagatttccaggctccaatcagccatataattaagctgcaacaagtagggaaaaaatattagaaaagaaaggccaagagagcacataaaaataataatacttatatttatagtgtcatactatagaagattgtaatgcatggcttttcttcgtgttttgtattaatgactacaattcctttgtttcacacaaaactcattctctaaataaataagaatgagaatggaagtaggagagattccctacaacaattggaattcgggtagaaataggtgagattttatctgatataggtcactgcaaatttgataataaaagaatccattgattttgatggagtagaagcaaaaagaagggagagaacaaaaaacgtaagactagagacatcaaaaaaattaggtacattagtaacttaaatcaaccaccattagtttctagaaggacatatacaatagaaaccaaagacaacataccccgaaatcagccttgactagagacatcaaaaaatccatcagctgaatctttgcccactcaaaccgcatagtggcatcattcttttgtggaggatgcctccaaggcgcaccaaaccgtaatttatcttccgaaatttttccacttcgggcatcagcagcaaacttctgcagcaattccaatgctctatccatagcaggattcaccacatttagctaagagtaattgacatagagttgaagaattaaaacattagtagttggaatattttctaaatttttatttctaatagtatttattatactaatttttaaataatatttttatgcagatgagagtagagagaaaagagaaaaagataattatttttaacttacttgcaaataggctaaatatgaatctacaatatcctcaaatgacatagctctgtcgcccattatcctataattcaagaaaacacaggtaaaattttataagcagcatagcaccagagcttgttataaaatgtccacacagtagctaggaagcagagaaaaagaaaaaaagaaaaaaaacagcttctgtattgtgaaatgaggattcatacaatttaggtgggggaaaaaacaagaggaaggcgctctaacagacagagtagggcagtagccttcaagtttagacaaatctagagaaactgtctatctgtggtaacaaagtctcaagtcctacttccacatttatcaatactatctgagaataaaggaaactgaaaaattcttacttcgaatggtgattactttgtttaagagcatatagctcaaaaagatgtcgtggatttggaccgagcacctctgcaattattctccactacaattttaacaaaaacattaatggcaattaaatgccacatttttggttaagaataacattaagatatgaagtacatataccattatacaaattatatgtacgaacaaccataatcatcagcaaaatgattagtagctaatgtcttttgtctactagcttgattcagaaaaagttggacttgaagtccacataatgatagacccccaatccattttactaatgttgtgcttgataaaactagttaaatacacttagcagtagttgaaattgtcaagcatacgattttcccccaccaaaaaaaagtacgagcactcattatagtcgttgactgtatttgcaatgttggttaattgacagacttttcaggaatttgatgtatgtcgttatagcataacggtctagttgaaaattgcaatgataggaatcccaagttagttagccttgggaatgtgagggaggttttggaactgaggagtctgggaatgaataggtgactatactttagctctgctaggggagcttatcaggttccttgaactacctactgattatcctaaaacagtttttttcccatactaaatggttccatcacactataattgtttacctctgaattactgaaataatcatcaaccatatgcatgtgagcttcttgggtagtccatccaaaattctgaaaattaaagaagaaaaaaaagttaaatgtactggaattcaagaaagacatggtaccccaaccttttaatcttttatatcaaacattcagctatatcaattctagaaacttgtacacttgaatcacgctgccatcaatatattgtgatggagtgtatccattgtacaaattaagcttaagtcaaatagcgaaaatgaaatattcaaatgttcttattcatcctgcttaccagtatcacacaataatttaaattattcaataattaaatcattgcatacataacttaagataaatttatgcaaatggaaaagaaaaattagcataggcacacatgcaagcaaataaaacacaacaactagtaaagacttccaaataacgtacctcgcgggagataaatatgtctataaatccgaaatccaaaaaagctcgatatgaatagtaactgaggcataatagaataaaaattaaaatcccacataaatttcagaaaaaaaattatcgcagataaatcatttaaactgaattatcacagataatgtacataggagtcatgttatgtactgaagacttgttaagattgttttcagaaattaagcaccactagcacataacactattccataaataacaccaacatcattaaaagagggaaataaatatattttcctatattataaatctataacttgtcaatttaatcaagtgaaggagaaaattttaagtagaaacaccagcacccaatgaatgtgatctaaagttcaaattatgatgtatattggtattgtgttgtgccattccccctagataaaaattatatttataaaggagaaatgccatgagaccagg

SEQ ID NO: 219918 - DNA, 4173 bp, Cannabis indica
attacctctaaccaaaagccactttattattcaattttttttttttttgaaaataaagcgttcgatagaaaggaaaattagacctctcggtcattacaaatgatagtatcacgtatcgaggagggctccacaaaacctgagatgttctgggcaaacgcccaattagtcacgttatgggtagcaaaattacaacaacgagaaataaacgaaaaattacaggataaattttttttaaagagttgattacataattaaacataattatcaatattccaaatagattgaagacctttcagtgctttgataaccaattctgaatcactctccaccaaaatatagttgtggttttttagtctagccgagtccaaagtaagatgacacgccgctgcctcaccaatcagaggacctctgaagttgagcttggtaacagcagcccacacaacaattccagagtgatccctagccagagccgcaatgcacatggaatctttaccagccttggcatcacagttaattttgacccaatcttcatgcagagggttccaagccggagaagccatcggagacattggggggagtaagccggaaacataatctgtataacaatgaaaaatagagtcaatggccactgcaatgttactcgagtaaaagttatgtactttgtcattacgagttttccatattgtgtcaacgacgattgaagcataaaggaatagcttgtcaaagttcacccaatttgacttcaagttccaaagaaatttaacccaatctcaaattcgaccactagaatcagggatcgggaataccctcaaggggaggacctccaaaaatagtaaccaaaattacaatagaggaacaagtgtttcatccgcagtctctcaacacatcaggcataagccggagaagccactttattattcaattaatgttataggtcgagataagtaaaataaaataaaatatgacgttaggtgtaatacatcacaatatgacgttttcttaaataaataaataaatataacattaatgatatttctgtgttgttgagatcggttgtgttaattaattgaatatttaagagaaagtgggcctcaaaaattaataatttaatgaaaatccataaaaaaaaattatggtttttcaaattttaattatgtaatataaaataaaataaaaatcctcaaaattaatatacattttgttattttgaataaacccttggttaataactttttatttcattttactttagattgtttttttcatttgcttttaatgcatttttttttttatattattgtaatttttttagcaatgaacaaaactctcattgaaaaataatatgagattaatacataatgaaaaaataatagagaaatcatcaaactagttcactatctaccctaagtgtgtgcactactaatttatgattataaacataaattaaggacccgttaagaaaattagtaaataaactagtaatattctctaacaaaaatcttaaaaattcaatacaaataaaagatctcgtacggaataccaaaaacaaaaacaagttgtcaatcttaaaaaataagaagaaagccatgcattagagatcaatccaacaccatcaccataaaaaatttgaataaatgtgaatgtctccactaaaacttaattaatgctttaatgctatatcaaagttgttatcatgagttgaaattagttaggggctttgctaaattgagttggtttctgatagttagctactgttgtaactaactcattcttgtatttgtgtataaaaaaaagacttgattcgttttctttctctgtaatgattgaattaataaactctgccttttctatctctctattttcttcctcttcttcctaaaatgatatcagagccatgttaatcatggtgctttgttattcgtttcgtttatgattattggtttttctcttgaatctcttgttttccatggcgcgaggaaggatcaacactcgaagccagacgactcaagggactacttttgaggatttaaatcccttctctgttcttgaacctaattccaaatctcataacgatcctaatcgtgattcgtattatccctccaacaatgatcatcctagtgccaattttgtccctaaaattcttactgaaagtgataattatcactcatggaagcgtacaatgacagttgatttgcttgcgagaaataagatgcaattcgtcaatagaaagcttactcaacctgatgaggatgatgaagactatgatgcctggaatcgatgcaacaaccttgtcgtctcgtggttacttcactctatatcacaagaaatttgtgaaagtataatgtacatgaatgttgcagctgatttctaggatgatcttcaagaaaggtttagacaaaggaacgctccaaggattttttaagctaacagatcaatgcagctactgaatcaaggtgctatggatgttactacctatttaactcgaagaaaagtcctatgggacttaattcaagagtatagaccactgcctcattgtcaatgtggtgctatgaaaatcatacaaggatatcaagaggaagacaaggtccttgagtttttgataggattgaatgagtcttacaacaatgtaagatctcatatcctaatgcaagaaccacttcctatgatcaacagagcctatgcttctgttatacaagaaaaaagacaaagagagatttgttctaacaactctgaaaccagcaaagactctaatactcttactgttggaacttctaatgatcaatttgctagaaactccaatttcaacagatttaaagtcacttgttctcactgtggaattcttggtcataccatgtccaagtgctataagatttatagatatccaccaggacataaatactattcaagatttccagctcgagattcttgtgcttcacaaattgggaaagctactgctaacttcttaggacctcaacaaagctagagtaatcaagtggatcagcctagagagaatgataaagatctcattgctagccttactgtgcaatgtcagaaattaatgagcatgttgtctcagaaaaattcagatcagtcctcctctcaacctaatgcagatcagccacttgtgtcccatttctctggtaagaccaattttattcataataagaaatgaattattgacagaggtgctacacaaccatgtggccctgacttatctttgtttgttgatattgtcaaaaatccctctcaatcttatgttaagttaccagatcgtagaaatgtggctattgtttgcactggttccattcacttgactgataaaattgtgctaaaaaatctgatgtgtgttcccacttttgaaacctatcttttgtctgttatttccctaaacaaatctgcttcccgctcctttttttttaccctaatcattgtactatacagggcattatgaggactcagcagattgggatgggtgaaaggataggaaatctttactacttaaaactgcctcaggaaaccagtcctcctgctgctgttttttcaattttagattctaagatttgtgatgaaacattgtggcactttagattaggccacccctcttgtatcaagtctcatcctttaaataagaaattaaaattcaatcattaccctagcaatcatttccattgttatattttccattatgccaaacaaagaaaattgcccttcatttctaatcataacattgctaaacattgttttaatcttatccatgttgatatttggggaccttcaatgtcttatctgttgagggttttaaatatttcattactattgtggatgatagctctatgcttacttaggtgcatttcattaagcataaatctgatgctcaaatagtgataccacaatttattcagctcattaaaaatcaattcaacatcattattaagagtgtttgatccgataatgccaatgaacttcagtttctaaatttgtttaaagacctaggcatcattcatcatcactcttgtgttcatagaccacaacaaaattctgttgtggaaagaaacaccagcatctctttaatgttgctagagctttattttttcaatcctatattcctcttgcatattggagtgattgtgttgctactgcaacatatctcataaatagaaccccaacacctaa

SEQ ID NO: 219919 - DNA, 1664 bp, Cannabis indica
atttttacatttttatgattttatttacagaaaatacggtcttttaaaatattttttatgttgttacaatttcttaatttattgttgttgattttttttatttgtatattattttttggtgttgttttgatgttatttgtatattattttcatgttacttttatatagttttcttatttttttatattatttttatagaaaaccgtaaaaatatatataaaaaataaacgtaaaaatgtcaaaaatttacaaaaaaaaaatagtaatttatgtaattatcctattttttttataacccattaaattttaaggtcagacgtcaccttataatgatactagacatcttgatactccgtaacaacactcaccaataattggcggggaattggtagtggtagttgatggtattgaaacaatcattgggaacttaccactttggtgaaaaaaaagatacaacatgattattcttaccagtttccatgaatgtacctgtgaaaagaaatcagaaaaaaaaaaacaagaagggtaatgcaaagaattataaaacacttgagtatatattgtactctagccctaaagtaataataacataatgctttggcttttttaaacatcaaaatccaacattatatgtctttgtatgcatttgaattagtagtaaaatactaaaatctatacaaccactgattacaatgcagtctctaaaattctaagtttgaaaataatgccttgtgaatttaagggctactaaatgcatattaggcagactgtagtataggacaggaaaaaaaaaatcaacactaaatgtgtcaaaataagagtaaaatacaacatgtcactttctattcaagtcagtttcaaattttttaataccacaaacaatgtaatttattatggtcaatcatactttttcattttcttttctttcaaaatatacactcattagctaggctgtcggtagaattttttatccttttttcttcgtattattatttaaaaatatacaaaaataacaaaaaaaaaaaatacaaaattatggttgtacataattttaaatatttttacggttgtcaaaattttatttataaaaaatataattttttaatgttttcatattacttactttcatatgattttttttgttgttttcaggttgtattttataataaaaaattataaaaatatatattggaatgtgaaagtttaaaatttttacaaaaaatagtgttgtgtaacttttttttcccaaaagatttctaaattaaatgtaaaaagtaaattttgattattactaaatattacattattacttatgtttacttgtgtaggcattagaagtatcctcctcccacaccaaaaacctttgcaattgtttttggacataaatagactaggtctgtacctagggcctgcctagccctagcccagggaccaaaaaagactcccttttaaaattatgtatttttcttactaattttaaaaactaacacatttttttttttcaaataggagctcaaaaataatttttttcttatatctcactaaatttcagtgccgtccgtattcaaatatgtcataatttcataatattagttctaaataatgagtagggaaatttgattttctatgcttagaaaataaaaaatttgatttttaaaccaaaa

SEQ ID NO: 219920 - DNA, 1583 bp, Cannabis indica
tgccacatcaccctgtgtagaaatttggataacaatatcaaagcacatatccatcttaaatgaaaaaatgcaacattgtagatttcatagagttataacccaagtcaaataaactcaaaatgaaatgtataaaaactaaaccaagaaaccattcaagacaacagatcaataaaaatgatgtcggttgttgtgcggtggcagtggcgatggcagaggagaaggttcagttcaatcgctatacgtattgataattttggggatattatgtacatatatctaaagcagttataagaggggtcacttttacccatactagctaaaaatttttacattttttttgacgattttcctacttttctaaagaagatgaactcaatgtagctcgataggttacttgcatgtttaagaaccttttaaagttctattgtatgttacttgacaacaatctaatgcctccatgtttgtggtttttttttttttggttctatttattgctcttttatggggcttaatttttgagtgtctttcttgatttcgtttgatgccccttaatagtagctcgattagtattattttccatgagcttgatggggctccaaatgggtttggaaaaagcttactttgagtgttttctccatgagcttgttgatgctcgacaaagtcttgatgtggctttaaaagaagataatttttaagtttttttttccatgagctcgatagatactggtagggactcgatgtgggttccatatactaattttgagtattttttctatgagcttggtggagctcaatatgggctcaatgattcgatagaagtaaatatcgagccaaaccccatcaagggcattgagttcatggaaaaataactcacaattatatatcatcaactctgtatcaagttctcatcgagaacccatcaagtcatcttcaaccaaagacattcttcaaatgaaatcctccatcaggtttacaacaaaattgtatcgattttgcttcaatactaaatcaaacctatcagactctgtatcaagttctcatcgagaacccatcatgtcatcttcaaccaaagacattccttaaacaaaaccctccatcaagtttgtatcaagattgtatttatttcgcttcaatattaccttgaacctatcgtgtttaaacagaaactagtgcaaaaagatggcaaatttcactgagttataaactagttcaaacaagctcaaaattaatctctatgaaagccctccaccaagtttgtatcaagattgtatcaattttacttcaacattacatcaaatatattaggcttaaacaaaaatagtgcaaaaagatggtaaatttcattgagttataaactagttcaaacaagatcaaaatgaatctctatcaaaaccaaaacaaaacaaacattcaatcgaatggttgaatgaaaatggtggtggtgagtgtgtagtggtagaggtgaaggtccatttcaatggtcgtgggtctcgatgactttgtgtattaaggtttaggggtttaggttttgaggataacggtatttcaagggcccaggtgtcagggtggggattaccaaaatg

SEQ ID NO: 219921 - DNA, 1351 bp, Cannabis indica
actaataattaaggtatatgatatagcttagaaggctttaaatcacgagtaacattaaaataattaagtgtcctaatccacttttcttgattcttcaacaaatgaacagcaatagtattaggccaaagttcatgtgtacacccagttcttggctctggataattgtacattgaccacttagcattaattctatttttacctctatgcccttctttaatccaatcaccaaaagtcttatcttcaggcccttctaagtgattcctaggaatctctgattccttaatccattcaactatatcccatgaaaccatgtatcccattcctgacatgtaatgcttaaaagggtccatactaggacaagggatcacataaccatagtacaagtcttcttttgatgcacctctaagtgaatccactaagttttcgagtcgaaaataagtgtcgtcgtcggctttcatgacataatggtaaggagggtaatctttatttgttgtgtcgtttaacatttcgggtaaactagagaagtaagtgtaggttttacctttgttcatgttctctttacaatcgaggattatgatgtcgtcgtgtctcattatttccaatgctactaggactttttggtcttcttttgttaggttgcaaaagacgaatttgacatcgattctggctccagccggttgtgattgtgtgccatagattaggcggaggaagtggcggcgatggtattgatcaggtagggtcaatatccctatgagtatgcgaatttcgtcgtttttgttatcttctttgtctgaagagttgttgttgttaaacgacatagaatggttggtgtcattttgttgagggcaacgacctaattttaagaggtacttatcgaaacgaacttcattaatcgaagccaaagcacaaagacaacaaatgaagaacaaggagtagagtatgaagcctcgacgatctgtcgttttgttgtttcttagtaccatttggttttgcattctaatttagagaaaaaggcttagaaagaaataatgtgtatttctttcttttgagagaggtttgggtttggctttcaaaaaaatgagagaaacccctttatttcttatatgaaatgaagttttgagactaagaaagattttgactttttttccttctatatgaaaagataaacatcattaaagttttctcatttgggtgtttttctcttttggggtattatttttcctcaaaataaggctagtattatgcaatttgaagcataagaagaagcgtgtattaaagtttgtgaagggtggagttgagcctaaagtttaggttaaatcactttattgaataatacaaatatatttatata

SEQ ID NO: 219922 - DNA, 3277 bp, Cannabis indica
ttatatatatatattgattaacatactaatctatgctctcttttttatacatgaacataataatctacacaagagcagcctcctttgctttattgacacaattagctttaacaagtccaacataaagctcactcccactaaaatcaaactcctcacaaattcttttatgcctaccaccttcagacatgttcctcacaaattcaaccaaatttctccaattttctggctcaaacaatctcttgttcattcttagatatgtaaatgcacacaaggcattaccagaatctgacctacttgtgttcaaaacttgtccaaatgcactagaatcatacctctccaatgcattctcaccagcaagttcaactctagccaacttagtagcccttttcacttgtctaactaatccttccggtgagcaattcgcgtgttcgggttgttccccgtctttcatttccatacaagtgaagttaaacacagcatcatgtctcccaaacatttgtgctattggaaggtaaccatcttggtgtctggtgttgtaatagcctgcagtcaattccgccgcgtgtgatcttgtattgtagtgccagtgtatccctgctattttcccggatagttttgctcccgtgcctcggaatactccttgtgcagctgctaagatgtcatcaccatgagccaacaattttttggagtaccattcaaggaagaattgaccataatcagtgttccaagttccatctcttttgaaaaactcagattcttcagggaattggctgtatttggctgtgtcatgtggtccactttttccccaatctttcttaccaatacctaatgctgatgcttgtaatgaagctctcatatactgcatgaaatgaaaataaatgagatttttacaaaaaagatacttttttttcctacattttattgaaaacaacatatgtaaacatgaaattattgtacaaacatcattatcatagtagttaaaagggtaaatactattttagacgttttgtaaaagttattaattggatcttctattttgttaaataataaaatggacactttcaaaatagtaaaaataggattctcaacccaattttcgacaattttattttataatataaccaacttgaagacaatttatagcatgaacaaatataaaaaatgtaactagttttcctataacatccctagatcaaattattattaagttttattttgacaaaaaatcagttcagaatcctatttgtactattttaaaaaatacatgatctattttgtcatttaacaaaacagaaagtctaattaataacttttgcaaaacatgggatcaaaaattgtgtttaccctaattaaaacgaccattcgtatttttgtaaaaaaaaaaacttcaaatctgtaaaaatattgaatatattgtagatctatgtaattttttttttttttggataattatgaaaaaatcccaaaacaaaaataaagaacttgtttaggattgagcataaatgcttctaagtaagactagtttgtaatgacattataatgatgaaatgaaagaggtctttgtttttattgaaaaatagtaataccttgtcatagcattgaaattctcctattccaggaaacctccaagttccattgctttctggataagatgggtatctcagctcaccacaaggacccattcctacttgaacttcctgtaaataaataaataaataaataaattattcccaagattatggttgaatcaaatttaatccgttatagtgttttggtaattggataaaaattatgtttggtaagattctctaaaaaaaaagaaaatagaatcaaacagttgttagttgggaatgttcttaccacaacaacatcgcccaaataatcactgaatctgtcacgaaaactcctcatgaaatctgaatagacttgaattggggttcttcctctgagaataggcattgcatcacatcctaaagagatgtactctgggtttcttcttcctgatctgtctgtgtaaacaatatctgggttcttgctaatctcttcaagcacccatggaggtagaggaatactgaaaaatcacaacaccaatatggttcaacacaaaatccataactatggctaattgcttatgcttaagaatggagaagtgggatacactcttcgagtcagtgccaaactctaataggaataatcttaattttttctcatattattaattagtttcaataccctttcaagtaacactaaatagtccctataccttttcatgtaaaggagtactctgttttctattaacactagactttgcttgtttgatctaattagccgttgtctaattaaaattgattgaaaatttgaataccctttaagataaatggattgaaaaggtcatattattacctgcaagagtctccaacatttccaccacattgatgaaaagacataacaacttgaagcttcaagtctagcttttgagccatcttaacaagctcagcatatccttcccaattgtacttaagaggtccttctttctcaaccaaaccccaccaagcatcaaccatgattccttcaactcctgcactcttcaaggccatgagacttgcattcatggctcttggcttgttcaagtgccctccatggcccactgtgtccaatggaagcataacaaaaacaggcactcttgtgtcatgtttggtagcatgaggtgatgaagaagtaaatgcatggtggtgcttattctctacacttgtgaagacagtttcatgtgagatttgatgatgagttgttgcttggattattgaattattctttgctctaatgggcttggtttgaccaaagcaaattgagcttgaagaaaacaactcatgatgatttggtgttttcaagcctatggtgtccttaggactaagaaaagaagttgatgaacgtaatgttaaagccataattttttttggagagaatgaaaaaagagaagtgggatttgattggattaatggtaagatgtttgtgtggttttatttatagaaaaagaaaaagaaaaaaggaaaaaggtttagttgtaattgtggtccatgatgaaggagacaacattggtgggttctatagtttaaaaaaagagaaaaagtgcatatacattaatccaaatcagtcagcataccttttctattcacgcggttatagccatttcttactaccctttctttcttcttatcataaacttcaatttaattgaacggtttattttgttctattggatatgttttttttttttttt

SEQ ID NO: 219923 - DNA, 2462 bp, Cannabis indica
atgataatgactcctaacaatatttattgattatgacatcaataattaaattaataacattatatatatatttattctttaaaatatgtaaactaacatagtggcctctcttctcttaaccatgaaaactattcttaataaatatataatatcatttttattttctacctttaataatgtattaaaagatgattatataataatatacatatttgtatcaaattcacacttaaaaaatgtctttaattattattattcctctttaaagcattagattactgattttagaaaggcttagtgatcataagtaaaaattaaaagtttaaaaaaacaagattatcaaagtatatatatatttatataaaatactaagaataagaataagattaataattaattaattaattacctgaaaatagggccatattgtttggcaagaacagaaaaaacattaggaccatacttagccataagaggaagatgaccaactaatggaatagctgttgggcctggcactcttctcacggcccagtaaggcccatataagtagcccaaaacaagccctccgaccaccatagccaccaccgtacacgtggcagccatgctctcaccttccatacccataattaattctatcatatctctctgaaacaacaattttttcttagaaaatgaagaagaagaagtgagttgaagaaatggggttttgaaattagatcataaataatatatatttatttatatatatatattattagaagaaattagatgctgttttttgtatagatggtggtttggtcacttggtgtttttgtcgggtaatgaaatgattctattcaagaatattgtctaatgattctttggtctttttggtattgtctactcatattttctttaataaataaatagagaatgttaaaaagtataactagtatttatagcgtgttatattgttattgatataattaagtatagggtcagttttgaattgaaataggtgataagcaaaataaatttttagacctcactgtaaagataaataatatttttaaaattattaaaaaaaatatgtatattttttaaaagacatttttttttatttaggcttctaaaatgagtaggccctaagcgcgggcctaacctgtctatgcctagcttaggttcgatcctgattgagtattgagtaaaaatagtttttaaagaataccattaatttattcaaaaaaaaatatcgttaattaatcgtaaagtgttacctatagaaagtgttaggtatcaatagtgctcaatagcaatgctcaactaaatattatagggtatttttatgatacacttcattaaaatgggtatattggtgtaattcttaactgttttgacatctaaaagaattttttagtctagtttttttttttcatagtcttgtatattatagttatttaagatatactgtaaaaattttaaaaatttggaatactatataatatagaatttaatgttcaaattgtctatttcacacgtgtataaaataaaaaaaatcatgctgcaacaaactttttgaaccctattttcagcgtattagtttttttttttttttaatttattaaaattttgcaggatgtcttaaataattattatacaaccattaaaaaaaaaatgtactaaattttttttagtctattgcaaaggtacatcgatccacttttttaaaagtgtattgtaaaattttacattattatatataaagactgaaatgtaatttcttaaagtacactcaaaattaattttattttgattttgaaaagttcttcaaaacaaatagtggattatttattttattgtaatttagatatatgatattatgatataagtgcataaaaatcattggcaccttttttttaaaaaaaaaaaaaataaaacacaaagaaaaattaatagatgatttatgcccttcaattttatttagaggatataaagaaaacaaaataactacaatgttatatacatttaattgaagaacaaaatatgtaaatcataataaaataaatagagaaacatgaaagaaaatcggcatgtgaaataagttttttgacttgtatttgtataatttttagactagaaattttttatttttaattaatgtgagataaactgtaaaactcattacaaaaaattataattttagtcacaataaaatttatgattaaaaataaaaagtttataaataattataaattattattcttatattttgactaaaaaaagttttataattaaaagtactattcaaatttgttttttatttaacttaagtaatgtaggaataataaaatggattattgtatatgtattttgacaatattatgactatgacttctgttgtccctgattttgcccaatatacgtggaccaaccagacagggacacatggaccaaaagatcttaacatttaaattaattgctaa

SEQ ID NO: 219924 - DNA, 4839 bp, Cannabis indica
gattatttggattgaaacaatgggtacttcaaagtgtatctattttggtatatggtgttcatgtaatcaagagtgtaattctgaatttatagtggagtcaggagaaaataataagttagaaaatttacttgataaattttggatatacttattgggagcttggttacatagggtcatggtcctcgcataactgggataatatttatttatagtctcaattaattagttttaattaataaattaggattctacataaagactatatcttatatgtgaattttaccaaggaaggacacaattgagaagaaagagaattcaaggtttatttattaattaaaagacattggaaggtttaattaataatgatattcaaatagtaattttatttgatacttaattataaatctaaatagaattagtatttaaataacttgagccaaaaaaaatagcattattgaagaaagataagtttgtttcattaaagaagtaaaataatagcaaaatactaagtcatgagtttcataagggattcagccacgagggtccattctaagccattggatctttctaatcagtccattaggtttaactctaaacccattgaaaccctttaaatagaacattaaatgtttttgattcagatgatgactctagactctttcttgtcagacaaaattgaatcaaagaaaacctgatatttttcaaattcctctttgtttttcctctcaaaattttgttgtccatgtaattaagagtatgcccacacatgtcaaagtaatatctagcatagtgaggaagactgtgtcgaaccaaatcgaaggagagaagatccaggttcatatcttgataatgctttgctacaagtaagaattaaaggctagagatctgaatggaatgagtcattatattccgctactattaatataactattttttaattaatgtgtttattttattattttaaaaattttatatttatgatattaaattataatttataattaatatacatgttagtaaatttagattctgctaaaataagttctaacatttgtctcaaatcaagtaagaaatatgtaattagaaatttttagaagtttagaaaaagtgatcatttccaacaagatgtacttgtaatattaagtagtgatcaaattagttatatgaatatctagaacaaaagaatatatatggtagtttcgtagagtttgtcaaaaataacacaccatattgtgatttctctaatcattgagggaatcggtcaatattaatagaaatatttaataagctcgtgaaaattttatcatgccttcttttctttaaattataaaaaagaggaagaagagagagatactgtggagtcaaggttgtctaacagcattggtttgcaatcaatataatactgatcaaattaataaaagagagtagtttaattaatggatcattaactactactactggagcatttcaacacggtatctagctgtaataaatgactaattatttattatgagctaagattttgaaatgtatatatttatcaaaatgtgtaggttgtgtaattttgaagactcatttcaaagtaatgtctatgacctagtaaaacagatagctgggcagcaattttcaatcagtgtatacatcaacctctttatgtctagctaatataataagagcattggctgaaaacgagttttttaatttgtttatttctttgttgatcaatttcgtataactagttttaacaactaaaacatagtaatgtatgtttatcttcaataattacctaatctcataattactatttttatttcttgtttggaaggaaattagtattcttttctgaaagcttaatttgacatatttaaatttaagggaatttttttaattttttttttcaaatttaccgtttgagtttttaaagtggttatagcgctagttgcaatagaagtttctatacgattttttgttaatatttaagttgcaacgctaactgtaataggggtttcaatgtaaaattccgtaaaaatatataaaaaaaaaaaaactgttttaaaatgtaaagaagaaaaagactttatttttatttaaaaccaaacatactaactttcgctattatatcttataaatcattaacaaaagtttcatatatttcatcggtaatatttgctttaaatatgtaactttatttgagaattaaatatcagtcataattaagcatttgcacaataatattcaatcacttgaaaatttgaaatgtcataattcatatatattattattaattcataaaccttcaattctcaaataaatatatatgcataaaattatatgtcataaaggattagtacttttcacaatcataaataaatatcgatgaaattggaagtcttctctttttcatgcatgttcattgtttcatacttcattataaccttgcgtacatttttaatacaaacctattttgaaattggtaggttgtgtggtgaagtgaggggaggatgagctttcaagttacaatcaaagtcgtgtatgtatctacaatttaatttaaggcttcagcatgtgcttaggttgtttttcttcctattttattattacttgcctaaatttcttaaaaagatgaggtacgtgtcagaaagaagtagagcatttttcttaagcgttgtttagaaaagttatgttgttggattaaaattatattgtggccacatacttataatgtatatgctattataaggtgtgatataaaattaagtgaccaattgtgttatgagtatcaaaagagtattaaattatcgtgggaataatatgtagataccataaattaatttataatttgttaagggatcacattataaatacttaaaattcattatgagtctataaatacgtagtgatatccaagaaacactctccttccccatcagagaaaatactttagtagtagtatattcttggaagttcaaaattttctctgcaatctccaacaatggcttcaggttagtgcttccgctcatattttaccatcttctacttctttaatttagcaaagtttatatagatttatgatttaggattttatattttaaagcacttctaggaatatgattagatctgtgatatatatatatatatatattaagtgttttataaatactaacaagtggtgccagagttacctattactaaattaattgaagatttgatgattttatttataaaatttggagattttgaaaattagggttctgatatattttttttttttgaattatactgttgttgcaatttttttgagatacaattacatatatgtattgatttaataagtttgattggacgtatatatcttactattataaaagtgtcgtaatagtgataattataatgacaattttttccttgatgaaatcaaataaaatgtgttaaaaagacaattttgtcatttgaaaagttaaaatatactcatctctctctaattaaacaagtactctctttaatatttttataaacttaggtcaattttttgaaccaataaatgtgataaatataaaaatatacatacaataatatataataaccccctaaacaaccatgtataataaaatttgttgttaatttatattatatattttttatcctgaaaattattatgtgagagagattgtttatatgtgtgttaaaatatagattttatctaacaattatttttgctattatttttttaaaatttattatggttttgaacaaaaatttttaaacaaattctaaacagaattgaacaaattttctctctaatttttctttttttaaaaaaattatctcagtagtactcaattaaatacatattttgttccaatatgtgttttcaacagcataataataataataataaaaaaaagattaattgtcggcgtcaaaatttttttatattttaattttaatttacttaacattttaatggtttttttttttgtgagaatagtcctttaattttctaattgcaaatttgagatgtctgttaaaattttaccattaaaagttagttaaattttcactgtgaacacttttgtatgcaagatatgtttttattaattttgagattttagtgtcatgtatatacatgtatacatagtggcaatctcaattaacatttaaaatttaatttaattggttttttaaatttacaaatagaagtaaagttaagagagtattgctacaacaacaaaaaaaaaagttatgtatataaaaactaaaacatttcatagtcaattaccttaaaaaaaaatttatatgtttccatcaagcaaagtaaatttagttatattaaatatacaattgaaaaataattattgtaaaaatataattataagtacttttaatataataatttatccaaaaacaatctctcaaaatataagttattttgaattaggaccgagaataaaataatttctttaaaagaaaaactaattaaatgtattggtcatttggcaagatggtgaagtttgaaattatagtaaaagttaaagaaaaaatattctttttaataattaactataatttgtcacacaacacaaataataaattttgaaaagaattatacacctcacttgtcaagtccatgctttatctagtatatatatatattggtaagattgtcacaattaagtaccatcgtttgttttgttttttttttttggtgtacgagtgattgtttcagttaattatatatatattgtaattttgtcttatatgttagacatttatatgtataaactgaaatatatgaatgtgtatataaaatgcggaataaacaaatgtatacactatata

SEQ ID NO: 219925 - DNA, 6039 bp, Cannabis indica
aaaaatgtactaggaaagaacatggaagtatatgtcgatgacatgttggtgaagtcaaaaacttccatgagccataatgaagatttagaagaagctttctccattattaaagagtatggaatgaaactaaacctaaagaaatgcactttcagagttttctcagggaaattcttgggtttcgtagttagttcttgcggtattgaggtgaacccgaagaagatcaaaggtattcaagatatgcattcacctagaaaacataaagatgtttagaagctaactaaaatgactgtaacacttagcaggttcgtttccaaatgaacaaataagtgcataccttttttcaatgtacttcaaggaaatagcaagcttgaatggacaactgagtgtgaagaggccttccagaaactcaaagaacatctaacaaaggctccaatattgtgcaaattaattgagggagagttgttgttcctgtacctggaagtgtcagatcatgctataagtgctgctttcgtgcgagaagaaggaaatgtacaacttcatgtatattacgtgagcaaaagattgttggttacggagtccagatatcctatgattgaaaatctttctgtttgcatgctaattgcttcacgggagttaagaccatactttcaagctcatgccatcaggatactaacaaccaccctctttgtcaagtattgcaaaagccgaaatctttagaaagactcctaaagtgggcaatggagcaaagccaatttgatattcaatatcaaccaagaatctcaattaaaggtcaagcgttagtagattttattgtggaatgtacggggataaaagacgatcttgaaatgcccatcctagaactaaaagtctagaagatatatgtagactaagcatcaaataagaaaggttttggagctggaatcattttaatttctcttcaataaattcaactttaaagtgcacttcgatttgaattcgaagcttccaacaacgaagttgagcatgagacaatgattgctggcttgcaattggctaaagaggttggtaccaagaacatcgagatgtgcagtgattcacgtttggtagtcaaccaagtgtttggagagtaccagacgaaaggagaaaatatggctagttacgtagtaaagtctaaggtgttattgaaacattttaagcactattctttgaagcaaatcccaagggataaaaattcttttgcatatatgttggctaaattagcaatagatctagaagtagagaaatatgaactagtccccatcgcccatttactcactccaagcacaaagacactggggtatcattattaatcattcaacctcctggatggtcccaatactgaagtatctggaatttggcgctcttccagaagacaaagccgcttcgtgaaagatccaatatcaagcccccatatatgtgatcatgagtggaaagttatacataagaggattagtgatgccgcattcaagatgcatagctggaactgagataagctctgtcatgcatgagatacatgaaggattttgcgaagatcatacatccggacccaatctttctaagaaaatcattcgtcaaagttatttttggccaaccatgaaaaaggattgcacagagtacgagaatcttgtggaatctcttaagaactattctctttctccccaactgtttttttgtcccacactaacatgctaaagaatacaacagcacacaacctagcgcaaatatttattgggttagataatacttagttttagaacaaaagtaaccctttctcatgctcgctataaatttagcgagtcactctttcctacaaaaattaagtatataatgaaggaaattacctatacattaaatactacagaaatattctaaacccaccactaagcaaaggaaaaaaaatactgaaaacaaatcaaggaaaaaaataataaaataaaacaagagagagagaagtataagagttctcacactgaaaaatcctatataataatatatttatacaatagatttaattacattaaatggttgtttcattgatagaatttatctttgttagggtttgatgatattcaattttaattaacttctgtcaattaagtcgggttatacttattaaaaaatatatttttataaaagaaattgctttcaaaattgtttaattttgtaataggaaattttatttataccttaaaaaatttataaagacacttcatttcaataatttttattttatataatatttaaatatttaattgtattaatttttttaaaaacttttttcttctactcttaaaaaatatacttatcaaataaaaataaattatattttaaatattataataaaaaataaaataaaaaattatatgaaattttaaaaaaagaaataaaaaaatacatgacttaaaaaaaatgaaaatataataaaaataattattaaatatatatatatagtatgactaaataaaattatatacatacattaaaatatttgtattatagctaaacaaaaattatatactaatatcatacataagcaaaaataaaaaataaatattatcttaaaataataatatatcatacaacaaaataaaaatatactatacaataaaatctatataacaacaacgacataaaaaagtaaaaataattatcataatttttaaataaaaaaaaaattaactaaactaatatatagatatattataagtaatttgcttctaattttggtgtccacaacaacaaccatggcagcgttgctttcagctgccgctccaccatcatcaccatttctggtcagtgcctcatttccatgtccttcatccaaacccacttcgctttcttgggcatcttcatttcccaaattcggcttatcctttaactctatcacaatccctcttaaacctccttccaacctctacaaggtattttcttttctcttctgaatttcgcgaaacatttgaaaattttcaattgaaacaaccaagttattctttttcttgaattctgatgatgggattgtttgcatttggctgcatcttctccaactggatacacgagtattctctttttttatagtttgattgaatgtagctaaggtgtttgctaaaatgactaggataataggaacaagatattatgatattttggcaagcaagaaggttgatttagctacaaaaaagaatttaagcataggatttatgcttaagcttgttgtgctttgaaaggtaccaatttttttattttcatacgagaaaagatgttttgtggtaattagttaaattaaagcacctggtacacaatggataaaatcactttgttggattttattgttctagagaagtcatttcttaagttgtcactttttaaataagatgccaagatgtttttctgacattcaaaagtggcatttgaagaattgtactgtctcgattttgtaccacctgcatacatttgagcctaaagcttcttaggaatgagatgagataatctttgatccttcatgcattctattaaaataaaaccaaaatatggagatctcgtttatcaatgatcgcattgagtttcatctcaaaaccaattgataatgagtggagtaacctatattcttatatatggctcaatatttatacatttaatccattgtccaatattccccctcaagatggtagcggatatgactctgataccatgttgggaatcatggggttccatttcaaaaccaattggtgatgagtggagtaaccaatgttattatatatagctcaatgtaaacatttgatccatgtagaacaatattgtccaataacgattgaattcgattcacgatgtttcaatgacttaagatcacaaattggtttgctgtaatttgggattgcttcctttccttaaaaattgatgaatgtaactccatcttaagattttgtttcacaagctcacctatatgtgttctcataggctgtatcattcattttcattaagaaacttttatttagcaagtcattgtatgcaagtttttggctcggattcttaaataaaaacagtatttgtcatagtacaactgatttaggctttaaccaattcatatacgtagcaaattttgttttgttgaactgattatgcatacacgcatctttagattagactctttgttctaggaagaaaatacttcaattttttagtcgaagtatactttgatagttccacggtagttggctttaatatgtcgaagtaacattaatactgtctaaatagcaaactctgtttagtcttctttttatttttttgtttaactgttggatcatattagtcaatcctatgcttcttcaaattataccaaatttcaaaattgtgatcagggtcacaaatactttacaccctttgcctaatattttgcaggattcagtcataaaatctgctgcctatacccggagatctcgaggtgaggctgcaaaaaaaccaaaccgaaagtcatggaagcaaaggacagaaatgtatatgaaaccatttttactaaacgttttcttctcaaagcgatttgtgcatgcaaaggtgatgcaccggggcaccagcaaagttgtatcagttgccacgacgaatgccaaggatctaaggtttcaattgccatcacttacagataacaatgcctgtaaggttataggaaatctgattgcagagaggtcaattgaagctgatgtatatgcaatggcatttgagccaaaaaagaatgagagaatcgagggtaggcttgggattattcttgataccatcaaagaaaatggtatcattattaactgaaaatacccgtcttcttatagagtagggctatattttatggtatttcctagaaacaattctcttgtggacaatcagctttttaagagctaataataaagcatcataaatgaccaaaaaaaaaaatcactgattttgtgttcttaatacctcccacgttatacgattggattggatcattcccaaaattatcctttcatccttgactgttgccaccttagtgaaactatcattttattcagaagacgaaacaattaatataatggattattgatcgttcctaaacatgacaccaacaagctctcaatctagatgaaattcttatcacattaaaagaaaatattattcatgtaagtattacgatctgtcatgtaagtagaggataagcaagaataataatacagtaacaataataatgataaagagatctcatttttatgtaaaactatgaccccttctaaaacaataataaccaatagaatccaaaaacaaaaacttgcaaattgaatactagacctgtaacaattaacaaagataattttagtcatcgtcaaacaccagaagtgttgtcgacattgtcccacatagaataaatggtagaaaattgaaccatatataagaacaagggctactccactcattgccaattggttttgagatgaaatctcataattctcaacgataaacaataaatttttatatgtacaaagtttatatgagtaacactattgcaaatacacattcttcaaagtagagttttcccttaatcaatgccaaagaattattgacatgcatttaccatgaaatagtttcttggcaaatcaaacaaagaatggggaatctcaacccaaagaagtgaagaacactccaccaaaaagctctgaatatcatttgccgagcttgtggttgtggtaactaaactaaataatagattctgattttcaacaaaaataatattattgactggttgctaagaccatatggaaaaatgcaattgtataaatagattaatcacatacaaaaaactaggtcatagcagataaaatctgatgattcattcataaagtttagaatcaaaagtttttactataatatttttattttacctcaatacatagaatgtcttcgaatctcagaatgatcatatccctagagaataactgtcatcctccaaggaatgagggacgaccgatctttagaaagataaataatattgctattatttattct

SEQ ID NO: 219926 - DNA, 3038 bp, Cannabis indica
aggagtgattgagagaaagagaagagcagtgtgataatggaacaaaagaaaggccaaagattggtgttattcccattaccattacaaggtcatatgaacccaatgttagaactagccaacatactccattcaagaggcttctccatcactttcatccacacaacctttaactctctcaacccttcaaactaccctcacttcacattccactcttttcccgatggcctatcaccaacagaggcctcagcatcaaaaaatgacatcctttcttttcttttgcatctcaacaccaaatgcgttcaaccctttaaggactgtttggctacactactatctcaagctgctttggatgtcaaaccttatacttgcttgatctacgatggtctattgaatttcactcaagctgtttcatgtagccttaatcttcccacggtcgttttaagaactggcggtgcctcctctttcgtcgtttttgctgctttcccacttctttgggaaaaaggttaccttccaatacaaggtacccttgatctatttcttttggaataatgtttgttggtatatgcattattgtactcttttaatgttaatttgtgtttttattagaatcccggctagaggagcaagtgatagagtttccaccgctaaaagtaaaagacataccaacaatgaatactccgaatcaagagaaatttgttgaattcctaaaagctatcatcaatgcagctaaggcctcgtctggaatcatttggaatacatttgaagatcttgaacagccatcgttggagtccttaaagaaccaactcaatattccaatgttcccaattggtccgtttcacaaatacaactcaacctcttcttcaagcagtagtagtttgttaattgaagacaaaagctcaatctcatggctgaatactcaagcgcccaaatctgtcatttacgtaagctttggaagccttgcggttataggagaagcccagttcttagagatagcctggggcttagccaatagcaagcatccattcttgtgggtggttcgacctgcatcggtcaatggtgcggagtggcttgagtcgttaccaaaagggtttgtagaggagttgggtgggcgtggacacatagtgaaatgggcgccacagaaagaagttttgggtcatgtagccgtgggagcattttggactcataatgggtggaattctacgttggagagtatttgtgagggagtacccatgatttgcatgccttgtttctcagatcaaaaggtgaatgctgtctatgttagccgtgtttggaaggttggaattcaactggaaaatgggaaatttgaaagaggtgagatagagcaaagtattagaaaattaatgaaggagaatgaaggagaagagattagatgccgagccttgaagctgaaggacaagtcaatcagttgcttaatacaaggcggttcttcataccaatcattgaacagcttggtcagccatttactttctttagaatagtgatctatctatttccttgctaagagtaagagccaataataaataatattcagtggtttcattgatatgaataaaagtgaagatcttttcgagtttaaaatatatattaaaaaataatatgtgaccttgcgttgctaagagtcagtcatataatagtgagagagaaatggagacagtaatgaattgtcctctaatttcaggttaattattttataatagtgagacaaatgaaatgacttttatcaagtttgtttgtttgttttattttattgaattttgtattttgtacgataaaaagtacttgtgtgttaatttattattttgcgttagagatcataagttttttctttatataaaaaaacaagatgataaaggtttagtgccatcaagaaataaaaactaataatattagttaagacatggtccgtgccttttttggtgctcgacacactactgccattaaatatcagcttctatataatatttaatttaataaatagtataaaaattagtaatcagtcatatgtcatcttccacagcgttagccacgtgaaagtgataacaattacaatgctttcatatatatatatatacacgagagatatatatgtacacatctggaaagatttaaatggtgtagaaatattaggtagaaaaatagtttattctttcatttgtatatgtgccaattgaatgctttgttacattctgaaaagttaggtagatttaaataattgtaataataattgaattagatattgttgttattatttactgtacaagaaatcttattattattatttgggaagaaaagtttcaattaaaaatttaaaaccaagagatctaaagtttcgagaaggagccaatttattgattaatagatcctagccaatttttattgaaaacaaaacaaggccctacagacgaaagttaacagtggcaacaaagggtgccacttccatacataccagaaaacatcttaaaactaccattataagcagcccaagctcctaaattaattatgagcactagaattaggctaacaacatagccgcacctcataaatcttagaaaggttgttgagagtggcatcaaacagtccccgagccaaccacacaggcgacttaccagccagcagacccttcaccgccatttgcaatccgagaaaatagagacattcgaccaaccttgctgtagaattctgcagcacccctgctggattgccaccagttctgcttcaaaggaagacatcaccatcctttcaaccgaaaaagcctccaccactgaacccgtgatcccaaattatcactgcaacaaccccgaagttaccctaaaaggcagcgtcaacaaaaatattatattcataccaaggtaaatttcaaaaaagatccaacacactagtcgcaggattagggatgcatattttccctatgggatggtgccccgcggggacccgtgcctaatgggacggcccgtctaaatagggaagggggcggggacggggatcaaattttgtccccgaatgttaaacggggcggg

SEQ ID NO: 219927 - DNA, 2529 bp, Cannabis indica
taaaaaattattctgaataaacaaatcaagggtgcatcagtacattcattcagtatatcccttttaaggatgtgcattggagaatcacccaataaattttttttaaaaaacaaatgtttgtaaaataatccgaggtggacaatggaggaagggtcccgcagttagctgtcacccacccgaatatcacagtacaactccgcctctttccttctgatgtttttactttttaacaccacttcactgctaacgtggcaacttcattggttaatgccatttactatttctgttcttctaccacctgtctgtcactctaaagttaaccaacacaccacttttgcttcgttggctttggtttagtgttagtagtagttgcttctcttccacgatactcacgtgacccaactccaagccaccgtcccaacacctgctgagctgtcctccgaacctgacactcctccttccacgtaggctcggacaaccgtttgccccatttcccaaaccccaataaacaaacattaaaatacattaataaataaataaataaaaataaaaataagaaaaaatatatgagtgtgtcttcttccagactctgtaaattacaagcgtcttgtttgagaagccaaaataatgaaaaagcagagacattgagagtttcatcagaagtaagcgaacagcaacaaagattcacacgaagtttcttcctttccaagccaaaatccattactctaatatattcatagctctttctctttcttttttttttttttttttttttttcgtttttatacatatttgtaaatatatagacactaatctataaactcgttagcagagattttgatactgttactacttaccagtctagccattaaagctttcacgttcttgttgtaccccacgagaaatcgggaggttcttctcacggaaaagcatttcttttctcaacccctctctttgacccttttctccaaaaagctcactctctgtctccctctatataaaaaccagagatcttcttcttctttcaactcactttgaatctcaagctttttttattattatttcttttggttttctttttcttcactctctaatggcgaaacagaggtgtttgagagttgggtttttggtattctccctctgtttgtttcaatgtaacatgatcacatttgccattctcgacccacttgatttcttggctctgcaatcgatacggaaagctctccatgacttgcctggctcaaatttcttcgcgtcctgggatttcacttccgacccatgtaacttcgccggggtttactgtgattccgacaaggttatttccctcaatctcggcgaccctagagccggttctccggggtctcacaggtcgggtcgacgcagcaataggaaagctctccgcattagccgagttctcgatcgttccgggtcgggtctacggcccgctaccgcaatcaatctctcaattgaaaaatctcaggttcctcgccatcagccggaacttcatctccggcggcataccagcgacactgggtcacctccgcaatctcagaactcttgacctgagctacaaccagctcgccggagaaatcccacgcagcattggaacgttacctgagctcacaaacctcattctctgccacaaccacatctccggttcggtccctcaatttctgtctcaatcactgacccgactcgacctgaagcacaacagtcttaccggttcgctagctccgagctccctcccaccttctctacagtacctctctctggcgtggaacaagctctccggttctgtagaccgggcactgaaccggctcgatcagctgaactacctagacttgagcttgaaccagttcacgggttcaatcccgggtcggatattcacattcccaatcacaaatctccaattgcaaaggaaccaattcacagggtcagtcgaaccggtcgaccaagttacgatcccgaccgttgatctgagcttcaacagtttctcaggtcgaatctcacctttgttctcgaccgtacagaatctctacctcaacaataaccggttcacgggtgaagttccggctagtttcgtggaccggttactagccgctagtatacagatactgtatttacagcataattttttaactgggattcagattaatccaacggctgatattcctttgagcagttcattgtgtctacagtataattgtatggtacctcccgtacacactccttgccccttcaggtccggaaaacagattacaaggcctacatctcagtgcaacgagtggaaagggtaaatctgtaaactcgtattaatctctaagggtataatgggaattcaaagttaaaacgggtttttttgatggcattattattattaaactaatatggactccttctgtcttctggggattcttttataatattcattttattatttatttattgaacatttttgtctaaatttgtgggtacaaaactaatgttgatgaagagaataagattttgtggatacttgagaaaaatagt

SEQ ID NO: 219928 - DNA, 1910 bp, Cannabis indica
aaagtttcctcatagtccacaccttctctttgggtataacccttggtgaccaatctagctttaaaagtttcgacttcgcctccagcgcctctagcctataaatagaacattatacattagcaaagggttcaaacaccaatgttcatatactaaggctaaatttagggttcttaacttggacaagagcactcttgtgtaataatcaaaggtttttctagttaataatattgactcgtggactaaaattaattaacacttgaaccgtgtaataatcattatcttttcttctatatttcatttacttcttaagctctatttattttataatcggtttctaaaaatctcgataaatattttggtgctttcattgagagcttaaggaaagatttttctaccaaagttgtcatctacaacaatggtgaccactagaactatcgtcgcaaagcctactgctcacaaaggtggagatgatgttgccatggaggacgttaatcagctccccctaatacacactcgggtgggtactgtgggaggcagggaaacgtcaaaggtgggcagtcgtcttgcttaaaaagaatagcaacgcgaaaagcacaccgatgaagaccccattgacgaagatgattgagaagatcatgaggaggatcctgaaggcggctacgatgacaaggattaagtagagtattatgagccaaatctcgaagtcattgagtcgagaactcgcaaataccaaaaagagatcagtggaccaagaagaggtttctcgttaaaattcaggaagctctggcacggatacaagcacaatatgatcctgaagaaaatgttcttgaagaaaatatcccaaaagaaaatattctcgttaaaaagtttaaccatccgagagatggacctttcgctccaacaaaagacaaggggaaatgtatcatgggtaagcctctgagcagacccactcaaaatgtttcatggagcaacagataggattgcctatgccctactgcagggtcatccaatcaaacctcaaggaagagtgatatgggacgatggactttgtactcaggtgcaaaagcctaatgttcagggatggaaaaatcaccccagcgattctgtgaactagagcatggaagtgaaagagatactcggaagatggcatgtcgatggtggacctcagggatcgcctaatgcaaagcagaacaaagtgaaaggtaaaaaggaaaagccccgtagatgagacatcaggttcagcatcaatgacaaaatccgtggatgtgagctcatggatgaccacactagacgattggaagattagataataactttgactaaatttacggactatttaacccgaaaacaaagcggagccatatatgactaagaagatggggatcttgagacatgcttaagaagaatcatagaggcacaactgtcggagaatttttaaatatcacaaatggatctatactaaggcagaacaaacttcagggcccatatgtctaagtacaatagattgatgcaagtggcacaagcaagcgatgggaagtaatacttacatatgaatttttattttcatgttcgataactaaattagtaattacatagtttaataacattaatcatttgaaaatagtaatattttacaattacacggtgtaattatttcaattacatgggtacaattacctccaaattggaaagagtagttgagtgagactcaatattaattacctctagttatattattgtgttacctagctaaacaaataccttagaccttataattattccgaattacactcgattctatttacataataactttctaaatatgtttaccaattatcaaataaactatatctaagcaaaataatacagattaaattagatgaatactcttacaaattaaaaaaaaaaaa

SEQ ID NO: 219929 - DNA, 1427 bp, Cannabis indica
tatatatatatatattatttttccggactttgctctaaaccaactttcgaatctgactagtattttgtattattcattttattcagaaagaaacaccgaaagcagacgtggagaagctaatccttcaagcaggaggggtgaagtccttgattggattcttacatggtattgcagaaatccacaaggggaagaaggaatcaagtttgagtcagccatttggttcagaaaatgatgagagaccttttcccataccagatggaatgccgaagtcacaggcggagcttgaagaagaagagagtgggaaaatgcctgactcatcctttactagactgctgagaagcaaaggcaagttccctgcatggtattccccaactcctgaccatgaaactgattgatccagaaattcgttttacaacatgtaatggctggtttcagtttttgatatagttcgcattttgatacagaaatatgtatatatatagtttatataaatatgtatatatagtttatatatgtgtgtaatgttcatagctgttggatttttgggttattgtattttggccaaatgtatcttcagctaatgcttttggttctttggaatgactttggctgtataattatttcgagggtgcaatgaactaatttttatttcatgagcgaccaagaaaaaaaaagtaaacttttatctgattaaagtgttaaaaacgtcattattagtacctgagagtgtgaaagatcaagtgagaagaaagagttctgagaaaaaaaaaatcagaagcaaaagttagtgcaattccaatgttttttctctctctatcttttgaaatatgtcactcaaattttactgttttacttttttattttgtattaatatctttcattaatatctttatatctaaaatatataataataataatactatatgttatatgatatattttaggtacattagcattttttcttcattttagagcaataataaatttaaaacattagttgggacttgggagtgctcattctcaatgctcatcaatgaagatttgtttatttaattttagttttaatgaacttgcttccatcatgtcaaatgaagaatctttcacaatagactaagttatagtttctaagttaacgagagagaaattgcttagatcatctgtaatttgaataaagaagatgggatagaaaaaatatggagatttttttttcttcttttttaaagaactaatatattcttttttgcattgagaattattgtaatatatagctgattagatatataacacttgttagttgttataatcacgtgagttgtctaataagagaaattccatatatgatcaaatttcttttgatgacgaacactatatagttttcaatagcatattagttggatttaacagaatttaacaggccaaattaatat

SEQ ID NO: 219930 - DNA, 2843 bp, Cannabis indica
  modified_base (76)..(76): a, c, t, g, unknown or other
gtactcttcggaggatcttgaagcagtcatttacgatccttatgtgacccccagccgtttttagacttgaacggancgttgcccacatagacttccatgttacggccatagatctttaactatcttatttacaagtctctcataagtggcctctagattttttcagtccaaaaggcaagacttgtagcagtacagacccacgtccatcgtaaaacatgtatattcttaatctggttgatacatttttaatttatttttaacctgagtaggctccatgaagcttaggatctcatgatcagttgtagcatctaccagctggtctatccttgaaagtgggaagaagtgttttggacacgtcttattcaagttggtaaaatctatgcatacttttcacatgtttttggcttgggcatcacaattggatttgataccgagagcgggtagaaagcttcaatgatgagtttttggcactcagcctttcgacttcatcttttagagcttgtgcttgctctttatctagtaacctcattttttctatataggtcggaagttttgatctatgttcagggcatgagagactattgatggatcgatccccaccatagttctcatgcgactaggaaaagacattgaggtttgcccttagaaattttattatttatgatttttttctatcgctaaacccattttgatctttaatcttttggtcaaaagattgcggccaatatctacttcttctaactcctgtaccggtccaaagctttctataggatccccatattgagaaactatgtctgtctccttgctttcagttgagcttcattaacctttgtcgtactgttcatcaatgctctttgtaggatttttttccttcttggctttggtcaaacccatgttgtagcagtgccaggaagtttgttaatctttccttaggcacactaccctatgccttgttgggaactttaggcataggttgtaaattgacgtcactgcctttaagtcgttcagggctggctgacctatcattgtattgaatgttgatggcacatcaatcactgtgttttgagagaattttagggattctattgtgtttttaattgattatacagttgtgaactttgttgttattgggagctgagaatttaggtgaagtatttaagctcttgaagttgggttcttggtgtatcttgctctagtttggaacctatgttgtatgttgtttaaatttgaactttgagggtttatattgtggggttttaatgcatgaatttgtgttttaactctctgtgttgatgagttataattatggattatgattttgagttttggttttggtttgggttgaattgagtgtgatttggccatgttttttgaagctagtttttaggttttctgggtttggaacctaagggccgcggcccagctccttcagcgccgcggcgctcttcttgtttgtggcctaggaatcgaaaccatgtgtcgcggcccgccgcttgtgtctgggcatatttgaatgtgatattcgaatattcataactttgtgattcggactccatttcgagagttctatatatcgttggaaagcttgttctgagctttatgtgaatatatgtgattcacatgccaattttatattttgtgaaagtggaattagggattaaccctagacttgtaaatcctagaatttgtgactaggattaccggcatttggtcaagagcacccaaggatttggaatctccacgtttgcgggacatcaggtatgacagtagtttagcacgtagagttaggcgcggtaccgcttatattgaaaatgacatatgtgagtaaacagaaaccgggattaggattattaccctaacatgagcagtttaatggcctagcattattaccctagtcaattattaatatgtaattattatcccatgagattataatgtatgtgaagatttagggttttgcgttcaaggcataatcaggttagactcggtaaatagaaccgagatgaactattctaaggccttattgtatatagacgtgtgagtgtaacacataggtctatgccacataaacgtaaataggcatatgagcgtaacatgcaagtctttgtcatacagacaaatgtgaaatggaattaatatttatatgatgttttaattgattatcgatatttaatattgtcttgcaaggcttggctcacgtgtgctctattgtgcaggaaagggtaaatctttctctgatcagccatgattgcgaaagctgagcgatgtatgtacatgttcgggccacactagacctagcgggttagggtctaccactgatgaacttttgtatctttgattttgccgctaaggtcggctaatggaaagacttgtaatattttataaaataattttgggatctcgaaacatgtaatttttaattataaagttaaattattacaagtttttttcattctgtttttgtttaaagttaaagttcccacgcttatctgcttagtgctcctatttaggggattagggtttcttaatcacattgggtagcgtgccttttgttagggcgttacacccatggtccccatattaattgagacaatactgcttgtaagactcagttaattaattttaattaatcaattataattctaaaattagactacgtcttatttatgaattttcactaagctagggtttaattgtgaagaaaagaggtttaaggatttatttattaattaaaagactttattaagtctaattaataaatatataaaattggaaatttatttgataattaattttaattgttaaataaatagttttggcttttaagtggttgaattggaaaa

SEQ ID NO: 219931 - DNA, 6384 bp, Cannabis indica
aagacgactgtaattattacttttaatcctttgaggtgccacatcatctgaactcttcgtggtttgtgcaggtgtgattattggtaactgttggattgagagaccttaggcattcttttgccacgtgtctccatcccaataaatgaggggtattagtatttaaacttcttggtataaaatgatcttttattcatttccctctcatttttgttttcccatctttctctttttcgaatttcgaattctcaaaaatctttgtatttttctgtgttttcttcatctgaaaaggattttgaagttcgtgattctcacaaaatcattcaaagagagactgcacttcaaggttagtagattaccatttatgtaattgtttttctttgtttgagaatttgtatgcactctatggtattaggggtagaaaatacatgaaatgataagatttgtcatttgtcttttgacaaaataccctatttttctgggaaatatatgcttgaaacttgagtaatcatgggttttaggaaaaacgcttcgagtgtttgcggatttttggatgagcacttcgagtactcgtaagtctttgatgagaattttgaatgctcgcgaacttcttcaaatatccgaatacccagaaataactttaccagaccaattactaagccttttgtccttctttttgccagaatttactaattcttagaacgtttttgcttttaggtcgtatgtatttttgttatgaaaactgtctgagtccccaaaatggtgggtgtgtcacagtaacttaatgctcctgcaatcttcgtatgctcattgggtcactgtgatacatccagccgtttgagacatgcggtaaattttcatttttcttgttttgtagtcacttattgggactaactaggttcttcaaatggtgggtgtgtcccattaactaaatgtttatgcgataatcgcatgcctcttgggatattgggacacccccaaccatttcttgaggcacacatttagtttttacttcgtgacttacttattgctgaattgactatattctcgaaatggtgggtgtatctcagtaacttaattttcatgtagcgatgtgacccttatgttactgaaatactcccagtcatttcttgagatgtttggtcaattctttaatttttttctttttttgaattttatacgggtgagggcacctttttcaatttgcactttcaccacactaaaaagatcttctatctttcaaatgagcgatttgtcggatagccaaaggctcgattctggaggaggggcatttgctgatgaaacaaaaagaagtgatagcttcatacccacctcgacatctgaggacgaaggccctgcagccaggatctgttagggctcgctatctactgatgagatagataggatggtttgagaacttgctgaaccagtaacaatcgatgtacgcgacagtgattctacagtgttagctcaggattatctcattcactcgagacattctctagacactaaagttgaagagatgggtgaggatttcgaggtaccagattgcaattctgaggaagagtgggatgttgaaggaagtgagacgaactcagttgataacactcaactaaatgaaccattttcatgtgaggatctggtcttgtgagtcaagaaatctgacttgaataattttacacgactgaagttggttcacacagccacctcaaagccttcagcatcctagcgacctcatcttccctttacgaatcctgcgattatccctacacaaaatgtagtggtctcgattcttattcttcgatgcggagtgacgttgccttttcatcctttcgtgaaggccatccttacacgttacaatgtttctcctttccagttaactttgaatagctattgcataacattgggattttatgcgatgtacatggagtatgtgtaaggggaaccaacgatggaagacttcaactatttttatgatataaagaccgtcgaccatgacaatggcttttactgttttagtaaataggctaactttgaaattaacggggtagaaggcacagtttccaatatgggagattggaaatccaaatggttctacgtgtttaaaatgctaggggttagagttgacttcaatcgccgacgtagtatgtcgcatgtcttgacacttagtaaatattttcattgtttttttatagatgctaaagtttgttttcatcgaccgcagatagatcggcttgatatgtattggaccccactcgtctagaaatctctaaagttttaagtggccttctagttcaagatcgcgactggcgattactgtgtgttactataaaattgcgagagcataagctcatcccaaagaacgccaaacttcagtgagaaccagtatataaggatccttttgagaagcaaaaggaaagaatagacaagcgcctatccaaacagaccttgagacaaaccttaggtaacacacttggcatatacaacacttttttattttgacaagaagttcttacataaagcaagctccaacttttaaccgaaagcccaaagtcggtgctgcgacgacgtctccagtagtcttgtagaaaaggaaaagtgatgctattcctacaaaggcggctgactcgtcgaagaagcagcacaaagatgtccaagacaaggggaagaaggttatgatcgatcctactgttagggccaccgacattgtggctctctaggagaagtttgtaagcgacgaatttttttccaagattgatgggattcctcctgaggacttgatgcctcgctcagctgaactagcattgcaatttatggaggtattttctcgggcctttattgcatgctcaaaagatctcgatctccagatgaagtagaatacaattcttcatgaaagtttgaagaaaatgaaggtagaagcgactatgaaggataaagaaatcgaggatctttgaaaagctaaagagcaggtggaggaaaaagtcaaggttttggaatcacgagtcattgaactcggttgcaaccttgataatgaaaaagagatcgggaagaagcaatatgaccaggctatctccgattacatctatactaccctgaccaagctacctgactttgacttcccagtttttggagtggaggcggttgaaatggccaatgcattctgcgccatgtcgcctattgagatccaaggacttgaaggaaatttttttcccgaggatgccaaaaatgcgaatgcagatgaagccgcagatggtgctagcaaggtcacagatgatcccaacactccatcctcttaatttttttaatttcttttgtataatcaaacttccttttctagcagtacatgggtacttgcatcttgtagtttgaataacttatttagctatgttatccgaacaacgtatccttttgaggatactccttttgctaagttttttttctttatcggttcattaacttgcatttttaattaaaattgattttatctttgcaaaagttctcattgatttactcacatcttggtgtgatgattttccctaaatataaacttgcaaataatgtagataaaaaattctgaaaatttgaaaatttcattaattagtcaatggtacagtactgatggttgcatccgctatacttaatgcattttatgaaataaattaactaagtataaatacatgcaagtactattaatagtaatattttaagctttctccattccaagctcgcttaaggactgtgccgtcgagattggacaatcggtaatttgtgttgccaattttttcagctattaaatatggcccttcccaattatcgccgaatacgccatgtgctgaattacgcgtattacgcataactttgcgcaacaccaaatctcccacttgcaggttcctttctttaacctttgagttgaaatagcgagctattctatgttgataggttgcatttttcaaatgagcctgatctcgcttttcttccaagaaatcgagttgaatcaactgattttttgtattgttgtcgatattaaagatgtctcttctcaaagatccagctccaactttgactggtaccatggcttcacatccatacgaaagtgagaacggggtttcaccagttgttgagcgaggagttgtattttatgaccacaaacttgtggaagttcttctggccatacacctttcttttcttcaagcttaccttttatagtatgcttgatgattttgttggctgctttagttttcccattactttgaggatatgcatctgctgaaaaagcttttcgaatctccaggtcgtcacactgttggtgcatttccttacagtcaaattgcttaccattgtcagaaattaatttgtaaggaataccaaacatgcagatgatagcattgtagaaaaacttgcataattttgaagccattatagttgcgagagccttagcctcggcccactttgtgaagtagttcacaactactacgacatactttgctcttcttttccttttggtaattcaccgattaaatttatgccccagaccgcaaatggccaagggctagtgatagagtttaattggcttggtggcctgtttacatatgtcgttattcgttggcatttgtcacatttcctagcaaagctagttgcatctgttcgcaaggttggccagtaatacccttgccgcataagtttcaaagcaagggaattgcctccggtgtagttgccacatattctgccatgtacttcgcaaagtatgtagtcacattcatttccatcgatacatttaagcaatggttggctaaaacttccgcaatacagcttgttgtcataaatgacgtattgggtagctcgatattgtagttctcttaggttcgaccttatcttcagggagcttacccgttgttaaataggtaacgattggggtcatccaagtgaccctcttagttgtattgacctccatcatctcatcatgatgaatagtcggatgggttaagacatcaacaggaattacatcgagtaattctgcttctcttgtcgaggccaaacaggccaaagcatcttcatgagaattgtaagcacgaggtatcctaataacaataacctttttaattttatgtaataactcacaagtatagaagaggtatttggccaaacgcccgcctctggctaggtattctccattgacttggcaaaccacgatttgtgagttgctaaatgctctgaggtattcaaccttcatctcaagagcaagctttaatcctatgatcaatgcttcgttattcgatactgaaaatttgaacctcaagggagcgtgcactttgaacttgttgggggttattagtattattccaccacctgatccttcgctgttggatgccccattaacatacaaggtccatccttcacctgatggtacactagggtcgactcgctcttctataatgattgccacttcgtcatttggaaactcgaggatgaaatcagtgaggctttgccccttgattaccgatcttagcttgtatctaatgtcaaattgacttagctctactgaccatttgagtaaccttcctgacgcttctagttttgctaacacttgttgcaaagggtagtttgtcagtatttcaatattgcatgcttgaaaataaggtcccaacttccgtgaagcgaccacaagtgcaaatgctagaggtccatttgtggataacgcgttttagcatccaacaggcaattactcacacagtatactggatgctgtctaccttggtcttcgcagattagtactgaactaatcgcgtattcagacactgctaggtagattgaaaaaacttctctaggcatcgtcttgggcagtatcaagggttgccccaagtgcatttttagggcttgaaaagcttcctcacaattattagtccactaaaactttttattaccttttagaatctaaaaaactccttacatttgtcaggggaacgtggtataaaaagatttaatgcagcgactttacttgtgaggctctggacctcttttagtttggtgggatgttgcatctctactaattcttttatcttcgctggattgccctcgattccttgctgatttgccctaaaattgaggaattttcctgagcttaccccaaagatgcactttaaggggttaagtcgcatttcataatggcacaagcatctgaacatggcttctaggtgagcgacatggtcctttgcatgttgagattttacgagtatatcatcaacatatacctccattgtctctcctattaaatctacgaacatcatgttaactaatctttgatatgtggctcttgcgtttatcaaaccaaaaggtattaccttttaacaatacaaacctcgatcattgatgaaagaagtatgttcctgg

SEQ ID NO: 219932 - DNA, 3637 bp, Cannabis indica
cctatataactaagctttcaataagtagatctagaattcacgaagtaaattttctaacttattaattctgcattgccccactatagatttggaattgaataacactctcaattatatagaacgctctatatgtaccacgatatagatacattatgattatccattgttacaatcttattaatagtcaaagatcctctatagatgatctacgctgaacatttctagattcggagagttcttcaatttggagtctatgcaacctggtatgaacaaaacaaatgttgtattgattcccaagaaaaagtgtccagatatgatgagtgaacttcgtccaatttcactatgtaatgtgcttgcgaaggtaatcaccaaggtgttggcaaatcgtatgaaggtacttttgaatgatataatatcggttaaccaaagcacttttatcccgggaagattaattaccgataacatcatggtatcctttgaagttcttctctatctgaaaagaaagcaaaggggcaaggttggatatatggcactcaaattagacatgagtaaggcatatgacagggttgaatggtcttacatttgtgctatgctttcagagatggggtttgctgagaaatagattcgcattatttttagttgcctctcaactgttgaatatacgatggtaagtggtgatcatatggttggcccgattgctccttctcgtggacttcgacagggagatccgatctccccttatctatttatgatttgcgcagaaggtttctcagctatgattcgtaagtttgaggaaaggaaatggattcatgggtgtcgggtggctaacaaagtcctggttgtgtctcatatgctcttcgcggatgatagttacatttattgtaaggctaatgagaatgatgtacgctgtatacaacaactcttagagatatttgaattcgcatcgggccaaaaagttaattttaccaagtcttcagctttctttagtactaatacatcagcccaagctagagatcgtatctgacagatgttgggtattatagaagcaggagaagacagaaagtatttgggcctaccatctacactctcaagaaacaaaacaacagtgtttgggtatttaaaggatagagtttgaaaaaagattcagagttgagatggaaaattattatctcgtgccaaaaaagagattctaattaaagttgtggtacaagcattgccatcttatgctatgaatgtttttcaacttccccaagaggtgtgcaaggatattgaacgcagtatgtgcaatttttggtggcactctaagtcggctcaaaaaagtggtattcattggttgagttggaaaaacttgagtaagcataaaagagttggaggaatggggttagagaccttcatgattttaatctcgctttattgggtaagcaaggatggcgtttgctaactaatgaggatagtttggtgggaagaattttaaaagccagatattttcctttaggaaattttcttaatgctgaattgggagcgaatctgagctttatttggaggagtgtcttggcttcaaaagatttgatttggaagggaattcgaaaaaagagttggggcagatttgaatgtaaatgtgctacaagacccttggcttatccatgacagcaacccttacatctcttccatacaccctgctcttaccaacactactgtcaactctcttatgagagttggggtgagagaatggcatagggagatcctggtggatgttttaaatgagagagatcaagctttggtttggagcattcctctgagttttgaggtgaatcaagacaggtggtactggtataaagaaatatcaagttataacactgttaagagtggctattactgccttcaacaataaaaaggtagctggtcttttgatgataactctggtttttggagagctttatggcaactcaagctaccccctaagattaataatttcctttggagaacttgctcaaggtgtctgcctactcgatttcagttgaggttaagacatgttcagcttgaaacaaactgtccctggtgtcaaactgctgcagaaacttctctacatttgtttgtatcctgcccagtagttaaggcgtgctgaagtaaaattaatttcgaggcacaagatgaaaatttcactacctttgttgcttggtttcagcatggtttggctaattgtgatgctacaacaaggttggaagtttcaatgatctgctggtctttatggaagcatcgaaatgagaaaatttggaatgctaagtcacctactattgatgaaatagttacatcagcaaaactcaccttcacaaattggagtaatgctcggaatagatgtcaaacaactcttatacctcatgagacaggagttaaaaccgagcattggaccccctattttccctaagctgaaggttaatcttgatggagctcttttctagcaggaaggccgatttggagctggtatggtggcacgcacaggtgttggtttggtgttggtggctcggcagatggcacaccaaggtgtagtttcaccaattgttgcagaagcaataagcataaaggaggcattaagttggataaaaaaataaacaatggggtgatgttgtagtggagacagattgcctaaatgttattaatgatattaattctaacaaacctatggtatccccacatggtatggttattcatgattgtaaggcattgttagtagatttgcccctagtttcaatttcttttgtaaaacgatccgcgaataaagttgcgcatgctttagcatgtaactctattcacatggctgattgtacattcagtatggcttctttgcctgctgaaattttatccttagttttggatgacttaagttaatgaagtattttcttcttttttaaaaaaaatgctcagaatcaaaaattaccattaaagagaaaagcttgagttcttaaactcaaagcttgctcaaacaccacaacaacccaaaacctagctcaattcaactacagaaaacacaatcaacaacacagaaccctaatactcaatttcatgcaacatttcattacttaaaagcttaacaaaactaagaggaagcggtgctaaatgggttaccttcaatggaatcaccaagaactaactacaattcacaaaaaccagctaaagaactccaattagctgcttgttcttcaagggttcaagagagagaaggagtgaagagagagaagagagcttttttccttattttttttttaatttaggttaaagcaaaataaaatataattatcctagacataaaaggatatactaaacttaatgaaatcccactaaagacaaaactctaattagggaaaaagaccattttgccccccacttaaccaaaaagtcacaaaaccacttaggggtaatttggtcaattataaaataccgactattcccgacattcccaatgtctaactatattgtcccgctatactaaaaatactgtgattctaatggccaaacaccgtgttccgatgttaccggacacaaaacttgtaaaaacataaaatttcatgcatggcataaataatacaccccgaattcaaataaatctccataaaataataaatcataattttattctagt

SEQ ID NO: 219933 - DNA, 2418 bp, Cannabis indica
aacttgccccataaatcaattaatggagaaaattatgcataaaatggtcaaatgcttaggggaaagagaggaccttgaaaatgatccaagcaagcatccgtgataccattgaatcccaagctcaagacctttaagcttttaagtcctgcaggaaagcggtttatttagctagttcaaattacaaaacaaggaaggccagaaaggagttgacaaataccatgcattcctgatacatagaaccaaaacatgacgcaatcaatctaatgtcacttaccagaaaacttttcacatccatcatcagagagactgcatctgttcagatttaagtatgccagggcttcaagagctgcaacaataaaaaaacagttacttgaagaatagtaacatagaggaagagcatatattaattaacagcttatttgcacgatcagaaagaccacacagttgctagaataattttaacaatgcaacttctataaaattcaaaccaccagttatttcagagagctatcctatgactagtggtcaaatatgaatttgggcatagacacgaacgcagagagcggtaggtatataaaggaaagggaactaattgccctaatgtatttctctatatatcaatttaaatttttgttaggcatacagaagtgaataatatttagtaaaacaagaactagactatgctacaattcttttctcaaatgcaatactctgggataaatatgcatatttctgaaaagtggaataagtacaaagcctacaaaacagaacaatgaatgaagagaagagacatattatttatgtttaaatttccactgggaaaacatgtatttttttcgctcaaagaagaaaaactcctgcttcataatcatgaactgcatgacacagcatatactagaagttaaacttaatagatattcacattaggttatcctgaagttataggacaagttaaattttaaatcccaaaaaatcaaaggagaagcagacctgaaatagaatccaaacaagcagcagttactttgcatccctccaagtttaacatattaagcttgcacaaacctgaaaagcacaaatgaagatccagcaattatagcctggtggaataaaaagagagctacaggatacaggttggacaaacaactaatcctgcatctgcaaccacagcaagctttttaacccagtaaataatgaccttaaatataataaggaccacttctttaattggtgaactttcaaagaagatttagatactgggaaaagtttcttcattgctctgagcctcaattaagaaaccattattaggttctcctctactttagtttatatttttcataggcacagtggtagaatcaaattttaatcccaaatgtccctatggcgcatgtggtgtacatgtgtgtctaattggcataggcggaaataatatatatgatgatttcacatttcattttgaaaattaaagagaaaaaaagctctttggaaatcactgttattgaactaaagaagtctacttcttctaaacatgaagtccaagaattcttactgtcagcaacagaagcataggaatcaacaaattgaaattacctattaagtatgaaattccaagatcagttacactggtgttggacatttgtagctcttttaaactggtaagccctgaaattagacaagaaaaaaaagataaaaaacactgccgaatcagcagtgtagttctgccattttaaacaatggaaaaaaaaaaagcatacggacaaggtcaattttattatgtcacaaatacctgagagagcttggaggtctgaatctactatgcatttgcagcatctgatgttaagagacctgagcttcaataaccctgtgaagtgaaagtaattataatgatcataaacgaatcaaaagggagaaagtagctcaatgttatccttctgttgacaatattttatcctctacccttaaaagagtttaagaaatcgcaaagctctgtcctattttccttgcttatttcataaactacgccctatttaaaccagtgtatatggacctgtgaattaagcaattaaggaaaatggacaagatatggtatgaccccaaacttcagcttgagttgttaagaaaccataacataatttgtaaatcctaaagaatagatacgacaaaaagatacatagttcaataacaaaaatatgaagtttaaataaataagttaagtagcattcagcacaaacctttaagatgaataaatccaccatgaatgtcaggacatctctccaaatccagcttttccaagttaactaaactcgagaaggcacgcatgccttcagcagttactgcagtgctctttttaaaactcaaagaggtcagttttgagaatcctacagaacaaggttattgcatgcattcattaggaactgttta

SEQ ID NO: 219934 - DNA, 3582 bp, Cannabis indica
tggtgcgatggtatccattaaatggttgttttattattttgcaatggaacgataaagggttgatagtccccaatattggtacgatggtacttagttaataattgttttgtgtgaagttaaaaatggtacgatggtggtctgacaatctttgatagttgtacgatgacaacaattatatttaattttgttttattttagatcgaatgatggatggtcgatataaggacaatattgttacgatgccaacaatctaatactaaatttacttaaattcagatggaataatggttttccaatgaaagggcgataatggtaaaatagtgaatatcttgaacacaaattttatttacgtttaaaatttaacaatggggatgatagtttcctgatagtgttctgatagtggtatgataaactgaaactaataaatacacagttcatcataaatacattattcttgtccaaaataaaaggcaatattgttgtaaaaaatacgtagttcatgttaagttttggtagaataaatctacacctaaattttctctaaatagattcatgttgtcatcatttacaattgataatggtaggtctaaaattttatgctcgatatgctacattgcatatattctgaaatttccactccattagtaagtaaacaataatttagtaaattatggtcaatatttatagaaattttaattaaattacttagaatatattttgtcataaaatatggattattacctcgatttgtctatggttcaacctttttgtcgaggagttcctaataaatcatttgacttgactttcagatgttgtcatttgagggatcatgaccatataatgggaatcagactgctccaacaatgatgtgaatatctttcactagtaatccatcaacttcttcaatgccttgggggtttttaatctaatacttgaatcgaagacgaacaacttccacaactccaaattagcctctaaagccactcaatgtttttgttgatccaagaagatgctcatgtatatgaactccttcttctcccaagacagaaagaattggactagatccccttgaaataggttcacaaaacattcatcccacacaaagccagagtggtcaacattttctttccatacatcccatcgacccttcaatgatgtaggaaatatgttaggcatgacaacacgttgattttgtacacctccaaaaaaaaactgttgacgtctcctaatcatatgaaatgttgcatccaaatgctacacagtcaaaacaaataagtcataaaccattacattcaaatattaaggcgaaaattgcaaaaattgaaaaaaaaattaaaaaactatcagacccccatcataccattatcgtactaatatcgtcccaactattcatagaaaaataaaaaattttgtatccctaacaggctatcgtaccaccaacatacagatatcaaaaaaccatcatcctctcgtcataagaattaacaaaaaaaaatgtaaataatgtatccctaatatcgtaccaccatcgtacctaaatcaacccatacatatcgtacatatatcatacctatgtcatcctaccatcgttccaactattaatagaaaaatgtaaaaaattgctacttaatatatgacaatcatacctatatcatccctagcattgtacctatatcatcccaactactgatggaaaaatgcaaaatatcaaacctatattgtaccaccatcgttcacagtgagaatcatagacataatttgcataaattgtgttaaaatattagttatagcaacttacatcgtcaaaaatccatgtcttcagagaaagaaacttctggaactaagacgaatcgtatacactagagtagcactcccgtggatacttgttcccaaaggagactaccgattgattgttgaaacttagaagtaacttcttcttaacgggctgaagtgggtccacatttactggtacacttgatgcctttgaattcctcttcatttcagtgtattcattaaactacctaggcctcttactcggtctcttctccattggttatggagttgtttttaacacttgtaacttagaatcctaagtatctccaatggacatgatctgcatattctcaagtgtataaagaatatcatctagatcattgggtctataatcatttggaagaatgaaatcatctccaagaaacttgagttgtggttgtggctttgcctctgcatttggccctctaagttcttccatgagtaccattagggtcatcaaaagtctaataatatcggtgttctctttcaaaagagcactctgaccttgctttagagaaatttgttccctctcaacattctccaacctttccaaaatagtagaataacctggttcctgaacctctgaggtgctgcgataagatgttgctgggggaactgaacgtgcatctggtggtagaaatggtgtagcatctctaaagattcaggctgcctcttcccgctcttctaactcagggtcctatttataccattttagaaaatataggtccattttgtcatttaacaaaatagagggtccaactggtaacttttgcataatacagggtccaaaatggtatttaccctcaatacaattgggcaaaatcatcggaccaacattggactagcatcgtccgttaataataaatcagattcttattagacacaacgtcgttctctatcgtaccatgtcgtacctacaccaatttattttatttttttaaaaaaaagccattggaccaactatcatcgcacatcatacaatatatagggctatcatgttcaacctaacatatcatttttaacctgctaccattgtacctttatcggacctacattgtaccttgttgttccattttcacataacttgtaattcatcttctgaataccagactatcagacctatatcatccctatatcggacatcatcgtacccatatgaaacacaaaaaaaaaaaaaatacaaaaacacacaattcatcaccattatcacattcaattttttttttgtgctcaagaaaactgaatctaacatacgacagccccaataatattttcaacaaatctaacatatgaaaaagttacctaaaaaattcatacctaagacattttttggaagacctttgatttccaccttttaaataatctttggtctgctattgggtttctccttcacgaatctcccttgtgggactttggatctttatttacttgtgtaaggctaggtctttgtcacttatagtcatgagtctccaaagtgggtcgcagtaagccttcgtgtgattcagtcattggtgagattttagcttggcttggtggtgcggtggtgcaattggtgaaatttttgggcagtctgtggtggtcggttgggtgagaacgagggagagggtgcaaacgagcaagagagaagagagaatagaaagaggatttcttttcttttatgggtttttttttaaaatgagagaggtaatttggagatgtactaaattgttggctcacaatacctatatacactaattttagtttaggtgattaattttaatttaataaagg

SEQ ID NO: 219935 - DNA, 1721 bp, Cannabis indica
aaaaaatgcatgcatcgagatgagaaaaagatggtgatgttgaagacattaatgcctgattattatttcatctgcgcacacaacagaagcgaccaaacaaaaacactctgctgctgctcttttgaattttgttgacccttaaatgatatatatattttttttgttcttagcaaaaataatatatttcttatcatcatcatcatatataagatttagttacagatatagtaacttcagaaagtggtactgtgtgtagtgaagttatgagtaggcatgtgcagccccgtggaagatggaaaaataatcataaaccaaacatggtggatatctatgaactattaagatccaatcaattagtagtacaaaaatgggccatatatatgtggagtattgtttgtttaacattttttatatttgattggtttgtgatatataataatcttttatattatatacttaattttatcgtatttttcaataaatgtgataaatattaaaagacactattagtacttaatatttttttatatgttaagtgcaattaagtattaaattccatataatttaatataataattttataaaatatggttaactaattataaagggtctaaaaaatactaaatactacttatgtccattaaaatgctattcacatatatgtgcggcttcttttttttaaggagagatacccccttactaattttgtcgttttcttatacacatgcgtgtatatttcattttactcaaaatataatatgcaattatatgtatttttatatgcacaaacgacacacatatatgtatatattataatttagggctgcatgcatatatttttgtgctagttaacacacaatagcttagcgtggctagctagtatccaattttcatagactatgtcaatttaagtaaataggacaagttactttaattatccactacttgatgatagaatgtaaattgagcattggcactactagtaaagtctaatactatttaaaagacaaatgctaaagggtaccagtgttcctatgtgtcaatatcgctattggtacaactaagtatcgggtcccatataatttaatataataatttttagggagtatcgctagccaatcgcaacgcgacatgtcgcaaaggtgctaggcaccactggtgcctaatagcaatgctctatttaaaaatatttgtaattaatttataatattttttaaaaaaatatttatttaatatatatgaaacttatttaattgtaagtattggatattactagtctcttttaatattaatcaatgtaaatgtacaaatttttattcgaaagttattaatatatgagaaatattaaaatgtattaatagtagtgaatagtacttaaaatgtgtcatattatatcttgaaaataaaatatatcaataagtctcacataatttatataatatatataataactttaatgaattgtcacgaacagcaatatactcttaattatacatatatatatatttataaaatgtcttaactatttgaaatcctcagaaaccaacgaattttaaaaaaattatttcatacattattatttttttaaaaaattaatttataactcaaaaaaaaaaattaatttataatttgagttgcttcagtaattattctagtagtttctatatatgagttgctatgtagattttgattacaatttaagatactttgttagttggtat

SEQ ID NO: 219936 - DNA, 4623 bp, Cannabis indica
ttttttttgtgttttttttcaatagaaactttgtcgaaagagttattattgtgattacaatctttgaacactcgagctgccaaggaagaagtaaacttgtaaaatccccactcatgttttgccaataaaacctgcttaaaaaggtgcaaattatgaatacccatatcacaattatttttgtgccaacagagacattttcaagtacaatattgttgtatatttctcttgatatctttccctccccaccaaaatggagaacgcaacctatgaatatcatgaataaaatccatttgaagcttgaatatgttggagccagagtcttatggaacagaatacaattggtgagtagttgtatatagtcatgtatataaattttgtttcaacttatgatataaatagtttatattcatccaagatcacaaatctcattaatatatcacattgatgatcatgcaaagtatatatgcgctcatacacacatatacacataccacataaacatatatattattatatacttaacttatatattctgatccacgcaaataacatataaaagattaagattcttttacttcttgaagtctatcaagtatctttatatcttttcgtatgaaatcatgatcttcatatttttgctcgttgatgagcttgtgtactcacaccttagatcttttagattgttctctacacctcaagatgtgtttgggcacatagagaacgatgttactttctggatcaaagtatttatcaataaatgagaactttggttatggctaggaaatgtatctttgttcttgatagaaaaaaagaagaaaaagactattattcttgttagggtttatgatctaaaaataagtaattgacaaataatattttattaaatatataaaatataaaaatattataaatgaatacgttaattattattaaataagtaataaatatcagaacaatccctattcatataagagtttatgatcctataagagtactagagaattgagatcataccatatgaatataactagttggtagtgtataaaagtatgtaatctttaatatagaattaccaagtacggtttagtaagcattaattagtagtagcatgtgattgtgatttaaatgacatatgtgggtaggcacttagtaaaggtgttgtatatagtttgattctacatgatttgaccgctataaatatatatgttgatgcagtttttcatcaactgatctaagaagatcataataataaaagagaactagactaagacaatggttgtcaaaaataaaatcgtaaaaaaaagtgaccctaggatttatcgaagttcacccccatattgcgatggtataaagctacgtctactttgatttttattaataagacctaagcacactagagttaggttctcagaagaatgcttgagtaaattacagaagaaatttcttggtgaaatcaaagtgttggtggtgtttgtatatgattttttggaagataaccacattacgaattttactagtggtaagtacaagatcaaagttcttgggaacaatgaccaaaaggatggagaaaaatggtgatggtaattgacaattgtctcatgtctctctgattgagaaataaaaccaaaaagaatcatggtaatttacaacaataatatcctaaaatcatggggtttgattacacatcacgcagtgtaaatgcagttattacttaaaaattatacagctgtgattttcccgcttttactgggtcaaaatgatcgtgtatttaaatatgtctctaattattttatatggggatgtcttgatagaagcttggttccagtgatcacaatagcaagttggggctattttttccttccgaggtcgatgatgcacgtcttgcggcgatcgtggttcttatatacaaataattattcgaggcttgtttgaatgttagcttctgacttgtcaagattgtaaacctcattgagaaaatgtctgaagttaactgggtgaagttacatgaagtcttcccatagcgagataggcacctcgcttgctaggtctcgagccaacctgactgtcacacttagtctgtacattatacactaagggtttttgcagtcgatatgtgtcactttcgtattcctagatgtaacatacttaatgcctcactattcacattcagcgacatatagtttctcgctattatactaagcaacagtttgtatattttttcctcacataagactttacagtaagcaggttacaaatatactctgattcttacgtaattaatgagtttttccataaaaagcgattgcatcgatccatattccctttatcttgacatgcatcttccactgagatagcagccgaattttgggtataacactagtgtcagatcccttttttaggtcttatcttttagtttatatagacctaggaaaaagttagggttttcctttcttcatttcccatgactcaagaaatttaatacacacactaattctctcattgaataaaggtaataaattgcattgaaaggaactatccaaacatatccatataatcatggaaggaaataaatgtcttgtggaagtgtatcttccaagataagtttaacatgtgtcagtgagattctcctttcagaggataatgaaatgggcaagtagtgaccatgggaactggttactgctcacatatagtctatttgggggagccttgccgctaggaaagtgacacagtttgtgtgccaactccatgcgactcccttttgatgaagctttcatttcgccagtcgaattaagaagttaatcttgtaacacaatttcgggaccaaaaacatcaaaatagtgatatgaatattgtacaagcttagattgtcttgaaaagagctttctaacccattttgaccctcatcatttggataagaattgagcgagttatatcaattttactgaagggctgcaggcagtgaccattagggttggtcaatgcttgcaaattcatgtcttacacgagaagtgaccataagatatggcactgctcttgagttacttgatttctaacacctcagggtgtattttggcaagtttcttgatggtgataaacattctcttagtttttaaccctaaaaccctagtgaacccttataaaatgcattatgcaagtagtgaccactcaaagttgtcattggtcacatacggcccctcaccacctcttggtggattttctcattcattttatgtgtcttgatgttggagaaacacttttgaccaactttctccttctccttgtctttgggagagtagtgaccactttggagtgaaaaagtggtcactggtcgcataagacccttctccacccttgggtggcttcttttattggttttatgctccttaatgttggagaaacacaattggccaagtttcctcttctcttccttcctaggggagaagtgaccactttagagtggcactgctcgcatggaacacaagcagtgaccattggaagtggtcactggtcaataacactattgaggggtttattcttgtgcagttttgactctatgttaaagtcttggcctccttctacctcaataaatcaagtacttgttatatttcttctaagattagggttttaaagcgaaaccctactatagattcatgaaaccctaggtttaaaaccctaatgtgtgagtactgacactagtgaatgttcagtgattgcatggccttcttggtgtgccatggggcactcaaacatggtaccatgtagtccctggattaagtcttatctccatttggtattttgagtcttggttaaagccgtccttattggcttgggtatcttcaaggtattcttggcttgtgggtcctcgtgagggaattgtcatttttttttccgaaattgggtataacattcgccccaatagtattttcctgtaagccttcgagcaatgctttttaacttttctcgagattgacacaaaaattacttttttattggagtgcatgtatgttacttctcttcaagagatgtgtgcatgggcacttccattgtccttagacttaggtaggtggagtttttaaatgtggcttatccttgaaatgtgagctaagttatatctcatatctcatgtggtagtcgagtagagttatgtctatttctcaattatgggacttttgtcaaggtttaaactttttgcttatatttttgacttaggagcagagttatattcttgctcgagtttgaaacttttgcagagttttgaaatctcttggttaagttttgagtgaagagtaaagttatatctctttatcaatctcatcattgattagagtaaatctcttgctcaaaattgttggtaatcaacgtctgccgcgaacaaagttaaattttcttgttcaagttggtgggctagaaagatcggttgcaaatagagttagattttcttcttatttggaatagagataggactcttgcttaggcaaaaaaaagttatatcttagctctttagattttttccatgacatgggatcattatggtggctagtttttgggtgttgccttcttgagcgagtttttagcttgggcgttaactctttaggtaagagtttcgcacatgatatatttgtc

SEQ ID NO: 219937 - DNA, 3416 bp, Cannabis indica
tgagcttgagccaataatgtgaggcccatatcaacaacatggcgtgttttctttcaacacgaccttgttgttgatgtgtatgggcgcaagattgcctaagttggatgccaagttcagtaaacagattatataagggtgagtattctttgccaagatcagtttgcacgctctttatctttgtgtcaaacattctttccacaaagtttttaaaatgagtgaacaaaagtgtgacttcagactttgattgcatcggataaatccaaacaaatctagtgtaatcatcaatacaactaagatagtatttatagccatctcgagaagtataaaatgagggaccccaaacatcggtgtgaattatttcaaagggagaactggttttattcattgtgcttttgaaagtgaattggtgcatcttgcctatttggcaagcatcacaaaatggaacatctttatgtttagatgtaggacagacttgagataacacttgagataatatgggcttggctggatgaccaagccgacaatgccatacagaagtcaattttgatttatcaaaaacagtgttacttgctgtactacaattgaaaacaggaatattacattgaacatcagtgtcagtatgctgagttcttgatgaacttggggcagttttaacaggaatttgaagttgatataggccattactgagggtacccgtgagaagaacttggttcgtggtcttgtccttaataagacaacacacagagtcaaattggagaacaacattattatcttttgtgaattgggaaatacttaacaaattctttgtgatgcgagggacatgaagaatatctttaagcagtaaagatttggtgggaatattagtgggaaaactgttagaaccaacatgagaaattgaaatagtttggccattacctacaatcacttttgcctttcctttgtagtcaactgtattgttgagttgttgtgcatctgcagtaaggtgatttgtcgcaccagtgtcaagaaaccaagtgccaggagattcttcagtgatgcttgactcagtaacatgagcttggggattttctggtgtggtgttagaggtagaggcaccagtattttgtgttcctgtgaaggtgatgtcaaagcggtgataacatttttgtgccgtgtgtccagcacggccacagagctgacaaattggcctgttgcctcgacccccacggtttgagggttgtcctctgcctccacgataagaacctcggtatccacggccacggttggatccattgacagaaagatttgcaagattggcttgcacattgtgtagagcagatgctgaaaattgttggagacgaatttcatgactatgaagcatgaattgtatttcttgaagggtcagtggttcagatcgagaggtgagattcaccacaattgattcatattctgaaccaagacctccaagaatatacagtccaagatcttcatcagatagaggttggcctgctgctgcaagattgtccgcatatcctttcatcttaagaacatattcatcaatggtggaggatcctttcttggtagattggagaagaccacggacttgaaggagcctcgcgcgagatgtagtggcaaacaattgcgcatagatagtccagatctccgacgaggtgcgacaatttatcacataaccaagcatgggttcagtaattgaattcatgagccaatgcatcaagaattgatcaagacgaagccaattttgataggcaggatttggagagttacctgtaagaaattcaggtggagttgtagttgtgccaaggatgaatccatcaaggttataggcacgaacaacagctagaacaagggaacgccagatggtgtaattcgatcgatctaatcgaagattcaggggaaggaggttgttgtttggaaggacttgtgttatcgcagctgcagctggtggagcttctggtgtatcacttcgtgcagtagactcggttcctttggacgccatgggagcctaagcatctgataccatgttatgaaaatgagagagagagagatggaagatggaatgtgaattgaagctctgtttgaaacagagagagatgctggtatttatacatgaatatggttacaaacagtgtaacagaaagagtacaaaggacacacactttaccaactaactaaccccttaacagaaagcaaataacagaattaactgacattaactaactgagtttgttatctctaacagacttgaataaaaatgaagtacatccatttggcaaaggaaattcaagtatagcatcattcatgtcatattgttgagttgagtcatatcatattgttgtgacattctaaaaattagttaacatgcctatcaaatcaaagttgtgttttggaatatgtattttttttatgaaattatgtgagtttgtgttaaaagaaggaaaaacaacctcttgccaccttgaaatgaatgctatgcatataaggtatataagtttcttagtgtataaacaaaggtagtaacacttataattgttatattatataattaagtgtgtgataaattatttgttgattttatttttagtcaacgatgctaagtcaataaaacaaagatataagtgtttgataaatgaaaataataaagaactataaacgatacagaagttatagaggtttggcacctgatttcaagtaatgccactcttttagacatcttgaatgacctattttgtagagaataaggagttgggatgaatctagatatttccttggcgaggattaagttacacatactaattaaataagaatttatattttttttttgaaaattttgtttataaataaaattaaagttagattttatggtcattactaaagatattaacaggcatagtagatatttctaccatgcccgtaatattgttgacaagcacctatttggccacattatgggccgtatagttacaatttctaaaaatacaagaaaaattacaattagtcataaaagtagagaggagcttgcaatgttgcaaatagttctcaatcttccaaatagagtcatccccttttaggttcttgataacattctctgaatcactctccaccaacacaaaaggatgatgataagaacttttattgtttcattatatataggtgaccgaaatatattgtagtattagtatatatatagggacctaataatcactactacgtataaatacatatttccccatcagggccggccctgaaaatttatggacccaagacgaattaaattttggggccctcaataatatatcaaaaaaaagagtgtcatgggatttgaacccatgaccttggacattatgtcttccacctcaaccaactaagctataaatatttgttgtttatattacacttaaatttttcttaaataaaag

SEQ ID NO: 219938 - DNA, 3823 bp, Cannabis indica
ccaatagtaatatgacaccgagaagggtggtaggcgcaagtaatgccttttactaattctcttattaaacggagtacacatagttgcgccaacaaacaaaccaataaaaataaacacactggaagggaaaagttgtagagaaaaaaactaggaccatagaattccttggaaacagagggagctaggaagtaaagcttgcaaaagctttagaagcaagacaattgaaaattatgattttattttctatcctacaaatacaagagtactagagttgcatgaatttaaacaaatgcaaataatttagccacacaattacataaatatagggtacattaatgaattggtacctagtaagcaatgtgacaatattggttaagttagacttcaatcaatgatagttccagtcagatatatggcagactcaaagatattttctagctcacagtcttgcttctttgcatgaagacttagttaatccacgtataattctcctcaatatatgtcttattgactctatgcctcatatcttggtgatatgtcatttgactgattggaaataatgctgatgaatagcatcacgatcaatcgaattggattttttctagatatgttttttgtaattctaaagagttgaattgtggttgcttttaaactattaaattgtagtattttctttttaactattatactttatttttagacaatatactttatttttagattagttattaatttttcagtttaattttgcttcgatgcaactagcgaatatcccttgcatctactttgttctagtagctacaagataatagtcattcttatcatctctactttttgttttaaagaataatatttaagtgtaatacatacttttcatttaagaatacatgattgttcattgttgtaaaaataaataaataaatgatattttacatgtgtaggataatgctgaaggtccaagacaaccttggcatgatttacattgtaaaattgatggtcatgctgcatatgatatattaaaaaattttgaacaaagatggaggaaagcaaaatggcgtctctctcgacttaaaaagattacaacatggcaggaagatgcattattaaagttggatcgagtttcatggatactaagtccatcatcaaatcctagtggtgatcaaaatttatccctctacaatgaagacgatcctgaaagttggcatgtacaggttcgaagaaaatgcttcattccttgtgtcccttaaagttttccaattgtgttttgtattaaaatttcctatagatattgtgcttcgtgttcattttcatttgataggtatttcgctcaatcgattcaggatcagtgaagggattcccaaagggcatggttgaagctgatgctcaggttacaatctataatttaaattaaacgtatggaatactatttatttattttttttaggtcctttattgattgaagccatagaggctttagcctagttagatgattattattaattaaaagaggaaaaccaaatagtaaaagttacattagtttgattaatggtaaagttgatgaactaatttatagacatggaaaacttatatgtattatatctattgtaaatgataggactagatgatctcatctgtaactccagattcacaattaacaaaataagataaatgtattgtgttgacggtgagaattcatcaatgaaatattaaagagcaaatacaatatttaaaaattttagttaaaaaaaatcaaagaaaattcctaaactcactccaaaaaactactgttttattaattttttttccaaaaaagtcttctttacaaatacctgaaaggacctatttatagtgtctcttacaatttgaattccatctagtccattagtttgagagtgtcaggtcgttttcatattaggtagacgcagtacctcagatagtcggatgtctctggcattcttaataggacaaaagctctctcttccacttgtacttcaggtgaggtaagttttgtctccattattcatacttatcgtgtagtcgttatcttgcctgcgacattcttgtttaaatgaccctagtctcggtcttctctcctcatcccttgtgttcgcgaggttatgttcacattcaaggtgtccagttgagtttaagtgcatgaaccatttgtatgagggaaaaaagtgtagagggggtgtgaagaggctgggcgtgcagggagggctgctcacggggaggttgggtgtgtagggaggcttggtgtggggaggatgggcgcgcgggcgtgggcgcagggagcttaggtgcacgggcgtgggcgcggggagcttgactcgtgcctttgctgctcctcgtagcaacacatctcctgtggtgcatttggaatttacacttggtgaacttttgggcataacactaatgactccaaaaattacactttgcaatttttaggggtcaacacttgcctcctagtctataagaattctttcaattgttggtagactaattttggtgagctttgtcttcatctcttagtcccaagactggtccggtgggctatttgtcgtaggtctttaagacttactctaatcattctcaatccccttatcattgtattaaggtgtcggtgtgcttacgacttagaagtatgcacaactagctaatgcacgaccaacgaaaggacaaccaaccagctgtcaaatatctagttgaggtacaaccaattgacaggcacgaccatctggtggacggccagttgacaaacaacaagctgaaggaggatcaactaatggacaattggctgagggatgactagctgagggatgaccaattggtggagggctagctgagggacaattagctgagggacgatcagttgacttgccagttgtgggacaatcagcttagggacgaccagctgagggatgaccaactgactgacgactagcttatagagggccagttgagtgacgaccagctgacaaaaggctagcttttagatgactagctgagggatggccagttgagggacaaccagctgacggagaaccagttgagggacaatcatataagggatgactagctaacggacgaccaattaacagagggccgactgagggacttgtcatttatcgtatattcctttggttcttctcccgctatatctcaagctcataatgtggcactagcctataagaattattttaagcgttcttgtagactaagtttggtgagcttcatctttacgacttataaagagatcgtctcgaaattcttcatcatatcctctttaaatttattgatcagatcctcattatttcgtatgtagatgagatcatcaacgtataaagagacaataagtgtttcattcataccttgagtcttgatgtagagtgttggctcactcttgctcctcttaaatccttgcttcgttaaatagttgtcaaatcaacttcaccaggctcccagagcttttcgttaggccatataaagaagtttttaatctaataattatctttttgttcttgcaccactaacccttgaggttactccacatagatttcttcttcaagatagacactgagaaatgtcgaatttacatcgagttgaaaaaccttccatttcttttgtgcgactagagcaatcaatgccctgattgtgtcaaggcaagaaactggagcaatttttttattttagttgactccccattgttgcgtatccttttgcaactaattttgctttgtgtttttagatagagctatctacgtcgagcattgtcttatagacctacttgactcctaaaatgtctttgtctagtggtcgatct

SEQ ID NO: 219939 - DNA, 4812 bp, Cannabis indica
aaagacaagactaatggaaaaaattaaattagtttcaacacataaacacgatcacaacattaaaattctaatcccataaaacactaattggatttaaactaataatagtaaattaataagtgaaaacaaaaatatgaaacacgatgtcgttgaaccgaaccaaactactctcagaggactgctattgaacccctcacaacggctgacgacgacggctcttgaaccgctctcagacggtggccggccgacgacaacgccggccgacgacgtacggacgtgaggcgaggaagacgacgctcctatagctgttgtgttcgtgaagcgagagacgtagccgcttcctggtcgtgaagcgagagacgtagccgcttccttcgttcttgtaggtgggccgatattcttgggcttgatggttataagatactctatcaaccaaaatttttttataaactatataattttttttacaagtgatataatataattatttttatcaaatgcataaaatttatactacaaagaaaacataattaaaaataattaataataaaaaaatttatatatcatattatttatattatatttgtgattataatgagttagattataacattattgttattataataaaatcttaactattttcagcagtttaaaatttataagttattaaacattcagttcagcgtttttctctaattttattataattgctttttctcacggcacaattacaattatttttccccatattattattatatacaatagcctacattatttgtcactattctcaattgatatatatatatatataaatgtatttatatatatgtatatataaatgtacttacatagataccctacatgatcaccaaatatcaacaacaataaaatctagtatagatcaagctgcaccattagcacccaacaatgttgataatattagtaacaacttgatcatcgaacttctttatcaattttaatttgttttgttttttttactgagaaaatggtgtttttatcaaatcatatatcttcatcatataattgaataaataaaaccaggattacaattcaacttttgttgaagtcctctaattaatttcgttgaaaaatcaatgatatagttctcaattctcaatattaattaaggcaaaaaataagccatgttcaataatacaaaattagcattatgtaaacttgtctatataaagctaaaaaaaaaaaaagctaatttccctgaaaaaaaaaggatttttcattttacattttaaaatattttttctttttgtatttttacagaatttcacataaactcttataacaattactaaagcaacttaaattgaaactaaaatcggtgtataagataatttccctaaaaatattatataaagcttaaaaaaatagagtaaggtaatttccctaaagatagtatataaagctaaaaaaaatagagtaaggtaatttccctaataacttatctaagataatttatatatagtttagtattgctaaccctaattatagtttattagaaaaagaacaaactaaacctagcttggattcttaaaatcaaattaacttgtagttggtgaaacttaaagggagggtagaataaagaagaagaagagaaaaagataacaacaatgaaaaagaaaattcattattatttttagaaagtattaattattaattagcttaataattataggtaggaccagttgtgtgtttttggtctccaatgatggaatttgaattaatggttgtgttgtgtgggagacaaaaaaaaaaaaaaaaccaaatattttatatctctcactcattttctttctgtttttcatttttatattttgcttattttaatttttccagtcttttcattctcatttctatcttttccatgatatttaattttactaacatcaaagaataacaacattaatatatatagttttattaatgttgacctttttgttttttccaagcatttactcaaatatttgatcatatattaagctctttattacaaatgagatctatttcaatattgttgatttctgacatgggttgaagttctataataataggaataaatatcaataaaaagttttctgtttatggtttttttttggtaagttttttttttgaatatttgtagtaaaattatttgaattttatttttttaatatttaatcatataaattaaaattttgatggcaaagtttactgaactccatttcgttttgctttttacacttttatctaaaaatttcaatttacacttccagatataaataaatgaactatataaaaaaagtattatattctattaattttttttcttttctttttttcatctatcttttttttttctaaaataaaatcttaggccacgaaccctacacaaactgatgtcctctttttctctctcctctttgtgcaacaaccaaccctagctcctaaggagttaccgtcggcgatcctcaacccaaatgggccgcactattattatccctaaccccgagaaaccttaacccccaatgacactctccctctcatgtcctatctctctccttgattcctcgtttctttttcgtttctctctagctttcttatcgacataaaagggcaaagaaaggtcaacagaggtcttggttttatcattcagacatatcttctcttttgttgagatctatctttcttttctttcaagtcgacgaagattgaagcttcaattgagcttcaacggagattgagagctagatagctaaatttaatataagagaaatatatattttaaataaagtcaacttcatcccctatcctaacatttacccaactaccttttcttaagttgaaccaatccaccctaattatttaatatgaatgtattatatttttatttaaaataaagagtaggaaaagtgatgttggaatggtgtttttaatattttgttatgaagtcctttttagagtatacaaaattgcatttggacccacggttgtttcaatgaaaggtacgccaaactttaggtgtacattcatttttgtaacttgttccaaccccactttaaataataataataataataataataataataatttacttctttttgaacaaaatgtgactcactatggggtacttaatttgtaaatggatgttatcgtgttttaattttagtttgaagagtaaatactattttggatcttttactttgtaaaagttattaattggaccttctattttgttaaatgataaaatagactttgtattttttaaaattatacaaataagaccctaaactgatttttttatcaaaataaaacttaatatcaatatgatctagagacattataacaaaactggttatatttttttttatctgttcgtgttagaaattgtcttaaaattagttatattaaaaaataaaattattaaaaattaaaatcagaatcttatttttactattttaaaaaatatagggtctattttgccatttaacaaacaaaaggtccaaataatagcttttacaaaatacatgatctaaatagtattcacacaaaatagccatatcaccaaattctagtcctacaatataaaaaaagtttcattttctttaaacactattttcttagttgaatacttttttatggtttaaaagcaatatcttataataatgatcattattaacaaaagtatcaacttttaaccgcagttaaaaattgttgtttataatcataatatcaatgattgctatcacatagttttattgtatcaaaattaaaataattagtatttctactttttaaattttaaatattatttgattttgttccttaaaatatacattttattaaaaatttctcctgaacttttacatttataaaaatttagtcaatgtgttacgtttcgtcacattattcattttaaatattgacgtgatctttgtaaattagtaattttttcctttaaactttgacaactatccaaataaaaataagaaagattcaacattttatttttagaaaatcttaaaaaaatcattttgaatgattaagacaatttaaaaaaaattaaaatttttaaaattaattgagccatttaaaaataaattatttttattaagaaatccatttagatataaaaaaattaaattttacgggaataagtttgagtatatttttttctccaaaaatttaaatttatttaagtaaacataacattttttttagattaatttcaatttttttcaaaaaaaaaagtaatttatatttttcttgaatttctaattaattttctttatttgttaatatatgaatttgtaaatataaataagcttgattttctcttcacaaaatcttagtttgttcaaattatttattgaattcttaagatatgtgtttttaaataaaataaaatttgaatatattttcttctaagaataatgtagattttttaaagtaaatttaatattttttttattaatttaatacgtttatcaggtttctaagttttttttttttaaattttttttagaatttatataaaattatcacttttaaaattaactttttttaataaaattgagcaaaatttagaattagttaaagttcatgggtaaaaatactaatttttaacggtaaaagaaataaaatctaataaaagggcatgcttatgtactagtatatattttaaggaaaacttctaacaagtcgtatattttaggggtcaagatcacgtagtgtcaaaaattttaaccagtggcttggtggtggtggagggaggaggacgaagagttggtg

SEQ ID NO: 219940 - DNA, 2695 bp, Cannabis indica
ttttatgtgtagcttattgctttgagttgtaattcttctcttcgtctctatattctctattttatgtgtatattttgtttagtgttgtaacattatttaatttatatttttattttttgtattatttgtcatagaattataatattgttgatttaatatttctattggaacacaacaatttccaacaatatccatcttattctagtatgttattgttgtaatatatgatttaatcgggttttggcttagtttgttttcttcgagagctttgcttcaaattgttcaaggtcctagacctttcgatggtattgttgattctgtaattgtgtaccattacttgattctcatacttttacaggctacacattgttcagtatatatcttacaaatatgctactctttgtcagtgtaatgactaacgagttcgtaatgcgctcagattggttaataggactcgttttacattgaaccatttaataaaaaatcgtttccctttaaaaatataataacaattatttcatttgccaaaattgtcataagtacacgttcagttggcataataaaaaattaaaaattgtaatggaatcaaaatttcaaataaaattacgtacttctgtttaatttgtttttgaaaatcttgtaatccctttctaatgtaatcgccattacaaagaaaattacagctcttgtaattttttactcctgtattttttgggataaacttttataaactcaactgtcaaaatttatagtttgttattaatttaatttaattgtaaaataaactaaaaaagtaagacatgtacgctagcattgcattggaactttgattgaatagaaatataaagcttacaaagttacaatgatatacattaatctagagtataatttatgtgctcataagttctatacatattttttttttttgaaagggaagtactatacatattgaatgacctacatctatccctatatatgttagcgtttacctaaagcacctcttttaagacagaaggaacacagaaaaatgctttctcaccaatttttttgattgcgtaaaacttgaagagtgctgaacccgcaacgttccacgcgaatgaacaattcttgacactgccattacccatggcatggtcgtaagtcacatggtatatggcgatcgcctcgttatatatctcctccatactcctcgggctctcttccaaatcttcagcttcatacagtaactacagcacaatacaatacaatgaaaggacaataaatgcgcaaatttttgttaaattcaatggtttaaggtgtaaagtcttacctttttatacttccttaggacctcatcagcagcgttggttttcaattcactatccttgttcttcaaggcatcacacatctctttcttgtaatttgtgtggtactccttccatttcttcaagctgtcttcagggatgatatcgtcaccgaaacatggaagcttccacacctctggcattgaaaaatatcatgttcgttaaaactctgttttagttttgtatgacaatagaacataatgagttaaaaattagtacttatgctaaataaaaaaaagtaatttgcagcgtaaatacttaaatttaactctcggttacaaataaatacttaaatttaatttttgactgtaataacctaagtttaatttttgacctgaccgttaagtattaagttattatccacgtgtcattttcttatggtatgtttaaattaatttttaaataaaaaataaaaatttaatgatgtgaaccaatcagagactctcacgtgactattgacttgacactaagtacctacatacattccaaaaatataaattatttgttattaccgtcaaccaggagttaagtatttatgccataaattactcaataaaaaatcataaaaatgaccactgaaaaagatatgatgacagagagaagcaacattattacctgttttcgaataatcctcttctttataagaattcactctatcatatatcaatcccaaaatggacttggattcaaatgattttggcctttccatatggtgagggaataatttcggctttaactctccgggaactataacctgttgcagcaacaagaaaatctgtttaaaaggataaaataatatgagacacaactgcgaagacattttcaaagaacaaggatagttgatatgaaagaaaaaaaaaacatgattttgacataaagcaccagttttatgcattggtctcataacttgatcattcttacgtttaaattgagactgcaaaaagtgactattcaatttctgccatgaatgtcttggcaaataaaacataagagaaatttcatgaactgcataagcttagacatatttcgcaagtctccttgactaaaagatactcaagaaattaaatagcctgaatacaaatgaataacacatacaggaggaatctatgagttaatgtatgaaacatattaggagaaatataacaaaaaaacacccaagtgattaatgagacctatctaaagttgtcttgataaaaaaagtacagacagaactaaccttcgtcccattctttgcagcatccaaagcatcgtagtaaatgttagctaacttgtttaagttcttttcacaaatttttctcctcaacacaatcattccccagagtcaaatacctatccattaaggccgaccagct

SEQ ID NO: 219941 - DNA, 5147 bp, Cannabis indica
cggtaaagagtgtttgtttgtttgttttaattttttttttatcgttttcaatccaataacagtataatcatccatacattatctatttaatgttgcaggagatgccattaaactatgtgtaggttgtgcaagctttgataagtttctagactttgagcaaagaagaataacttttcaagaacttgcatatgcataatatattggtaagctctcattattacagagaaaagatgaagagaaatcaaacttttttctttttgtaagaaattattgtactcaaaattgttttttcttattcttagctgcccaagaaaatattttgataaaagattagggattcttggtgagtatttcagttgagtttagtgcttatttatttccagtacagaattttgtgtgttcatttttttcaatataatttttttgcttttgtgattcttatgtagatgatgtagtgtaaaatcacacccctaaccattcattgaagtagttttgtagtattagggttatagtttgtaccatatgaggttgtaacctatacggctttgtacatactagaaatatttatggaatagatctctttttcataatattttctgcttcttttccttatgttttgtttatactagattctctaatatctattctcctttcttttgtttgattagagattacattttacagtttttacaggttatatggaaattaagtgattgatttactcatttgagaagtgttgaaaactgcttttgttgatgatttttaatgcaaaattgaaagggttgtattttcaatttgtattgaatttcaaactcttagcttatgttaaaagttttgcccttttagttgatttagcagaaatttaggttagggttgattttactggtttttaaatattccttccaactggtttttcttctttttgttttgtcattggttgaagattttgatctgttctattttttttttcttaataaatgattaatggaacatggatttttggctaggcggtcagtttaatatgaatatagattttttgctaatgtgactgacaggttgtcttaatgttttaaaagaatccccattttataattttgagagtggtttctaaatgctgaattatgtctcatgtcatctttatggtgaagaagctatttattttctgcaagttaaatgatattaaaacttttattggtattgccttttgttaatttgagcctggatgattgactttacttttatattgatatgcatgtaacttaattcactttaacctggtttgagtgaaaaaaaccagagcatgatgaacactgcttaagctggaagaaaaagtaaaattttacttaatagtgaaagttgaccaaaatagagagagcaaataaaaaaactatgaagtatgaattaggttatgtttaccaatctagaacttgagttgaggtctaacttagtagcactttggacataagtagaggtatgaataggtggcttggtgatgcagaatgacattacagcttcagtcattgttttgagtaagaaaatgtaactggatattgaagcttagatggatacgcttagattttggtttcatttgttgtgtgggaggggagatgtggatcaactaccacacatatattaattcaccattaattaagatatagatgaaacatgatcatggaccattcgattacattattatttactctgaaatccttatcacagacatttgtttcttatcatactttactcctggctgtgctaataatctccgtagtattactggctgttggctggaatcgaaataaaaagcgtgtataaatacatatacatatatataatgtgtgtatatgtatatagggagagagttgttttgagaaatagaaagagaaataaaaaaattgagtgagcttatagtatgcatagtcatagagtgtatagagcgagagaatagttaagagagtagtttgagagtagagtaatgagaattagagagcctgcaatgcatgctcatatatattatgtagttaattagaaattgtgaggtaggtgtattattaaggaatggaatgaagcccaaaacgtatcctctaatttcttaaatgagttttttctttttttcatttataattaattaatgggattaatttttaaattttcactactacaaaagacacttttggtgtaagttccagaatcatttaatttaaaaaactaacaccatagagtagctcaattttaaggtgttggtttataactgacatttaaaaaaagcaatggtgtcagttaattaactgagactaaagcctaaaccgacactaaaagagttttaaaaaaaaaaaccaaatgcctctatggtgttagttaataattgagacttaaaagtttaaaaaccccttaagtctcagttataaattgaaaccaaaagagtataatataccaaaatgaaactaaccaaataaaatcccgcctctctcttattttcatctggcacctgatttctcttttttttttctcttgacataaacaaaacccaccagccctaaaaaaacccatcagcccccaatctcattctcatctcatcggaggcgtcgtccaacctcgaggcatcggagtcagcatcgaccaaccccaatttgttccctctccgaccatgacgacgaccacgaagcatctccgtccataaagtcgttttagctacgaagaggttagcatttgttcccaacttatctatgctgatttttctgagttttaaatttttcatagtatggaattcctttgatttttctgagttttgagatttttcatattcaaaaaaaatatattaaaagaaaatatttgaaatattacagaaaaaagattatcaacaaaaccaccctaagttacaagtggagactcttgtattacataaagaaaaggttgttaaaaaatgtttatacatgatgcaagtactgattttgtttttaattgtttttgaaaaaaaataataataagataagatgaatgggaattcgatatataaataaaaagaatatcatatatagtggtctaattgacgttccccagtgtaattggtctactgtagtagtacaagctagctaccaaaatagattctataaggtgtataaacaataatccaattcaagaaccaagttgattctttggttatcaaaagaatcttgaagatcttaaaccaaacaatcttgaagattttagcccttttagaaatgtatgtatatttgttctttgtatgcgcacgaatcttttcaagagttttgcatatttgtcctcatattgtcaaaagttggtgcataatgcattaaacttattgtactgggagtttggagttgtttctcagttttcatttcatttactagaatgaggaatatttgtattggttggttgttatgctctctgtttttaaagtccatttctcaaatttcctttccctgtttctagttatctatataccgaagatttccaaaatgcttataaaactcaatttggtaatgatgttaagttggacattgatcatatcattttgattatgaagctaagagatttgtcatatgctagctgcatgtgtttttttttctcttttggtgtgacatatgcacattagaattgatcttggtttaataacttacaatcgttattgatattgagtgatcggctatcctagttgttcttttcatctgatatatatatatatatatataaatatatatacatatatataagctgcccttctctagtttctcaataatgcttctttctagttagcttctcactagtgcttcagctggtttcaaggtatatgcaaatatggcattttgctttctgctactaataggccatgctttctcactacataaatatgggttattatatctgtctggtccatcccatttaataatgcaacattgtctctcaatcacgattagacttatcatctaatatgactcactatgtaaacctacaaatataggagactaaatatctcattatttcacacctaatttattattcttgcattctactaatttattcaagagctcatgactgtgccaaattcaacacgtcacttaggcactaaggtatatacaattatttggtaacttgttattttaagtacttttcattcatttataattataacttaaataattcttctctttcttttatagtataaccttgacacctcgtacacacccgatgaaattaatatacttcgagatgaatgggcggaattcattcagttcgagctcagtaaaccaacgcaacattgaagctttggaacttttttttgtgtaggacatacttttgttattgtaattagttctagtataaacataaacatagtactttgttatactaactggtttcagtataagtactttgtataagtattttagtatttaatttttgttgatattttgtcttaattttgaaatcttacaattaagatggagaatttgacaaataatagtaatttcaccctactaataatattgtgtcgttttaaaatcgacactaaaaaactgaaaaatactaaaaaatacataaataagttttttggtgttattttatagccgacactaaagaaccttttaagtgtcggttataaaatgagaccaaaactctatgatgtcggtttaaaaccgacactaaaagaaaaaacataaatgtatactttaagtgtcggttataaaacgagaccaatactcaatggtgttgttttagaaccgacaccaataattgactttttgtcactgtagaataggtgtcggttttatgaaccgacactaaaagtataagtatcagtttaaaactgacaccaaaagtgtattttgtagtagtgttttaagatttgatttatctgtgtttttgtttgaccttagctgatttttttcaatgaaaggatagtcaatttgacaatgaaactgtgagtttctttcttctccaacaatataatttttaagttcttgtattctttctctctttctcttctgagtttggtgaagagagagaagtggagtgtagtaagggttagtttgaggctttatatatgagtgagagaggaatataaatcgtgggaagaagcttcgtgtcaaggaataaaaaagcaatatgtgagtaaggtggtcataatt

SEQ ID NO: 219942 - DNA, 3220 bp, Cannabis indica
tttttcaattcaaattgcatgactttgtaatagtagaaccccatatttgtcatgaagcttgtatgttcttggtctgggatttgcattttaatctggttatatccagaatatgcatccatgaaagccattaattcatgccctactatttcgtgtaccaatttgtcaatcattggtagtggaaagaaatctttaggaaatgtcttatttaaatctaagaaatctatacaagttctccatatggcatgtagttttggtatgagaattggattagagatccacgaggataaaaggcttaatttattagttaataatttaccaacttcttctttgagtgtgttttgtctctcgagatccaatggtcatcgcttttgacgttttgctagataattggggtcaatattgaggtggtggcaaatcacatttggatttatcctgaccatgtctaaatggctcaaagtaaattgatctcagttttccttcaaaaaagtgattaattgctaatttagttcttcccccaaactttccccaatataaatatacttaatgggatggtttgagtctaaaatcacttcttccaacccttcaattggcttgagttggttattatcatcatggatcctaggatccaagtcttttgtttccttctcagttcctttagtaagaattaccatcagctgatgactggctttctactttttagctccaccctgtaacactctcgagctaatgtttggtcactttaattgtccctactctagaatgcgtaggaattttaaggacaagttctttatcaagcttattacccccaatccaatcaaagctagtaaatctatcaacacattatagacagaggggatgtcgacaacaaaaactcttgcatttgggtcgcagacaatggtggttcccccatagttcagggaagttcaattatgcctaggctcgcaacactgtcgcctatgaacccattaaaatttaccatgtaaggtcttagttttgcctcttctaaccccatctttttcaatatttccttatcaaggatgttgacagagcttctattatccataagaaccctctttattcttttattggcgagctgaattgttatcacgagaggattcacatgtggatatcgtacacgcttcgaatcttcttcagaaaagatgatgggtggttcatttgactttgctctatttgaaggttctagagcgaaggctggtaattcatttttcacttcattaatgtacctcttttgtgcactattattgtttcctgcgaggtgtggccctccagaatgactaagatatcctcaccctctacgggcagaggttgcaatcttgggttattcaggttattgggctaattaggctcattttcatgtgtcctcacatatttcctaaaatatcctcgtgaatttagactttccatttcatcttttaatagatggcattccccggtggtatgcccaatatctttgtgaaaatgacaatacttggttgagtctcgcttgtttcttgcatgtctcattagttttagtctgcgaaatgtgacccgattgtcattggcaagataaatgttctcgcaagtctcattcaattcagtataaactgaataaataggtacatatttcacatgcttcttttgtttcttcttatctttggatgagtctgttgactcgtccttccacttggtatttgaaccatttatattttctaccttcatagtcacggtgctcactgttgtcgtgctagtgttgtatttatctctcgagtctaactttaacaacttcatttcattctgtccttcttcttttcgcacaaagattcgtgctctttcattaaagtcattgatatttcttacatgaagaccttgcaaaccatcccataattctccccctgtagtgcataaatcaatcataattccagcttgaagagatgttaattgaatactatcatccaaatttctaactttagttgcagctgtactgaagtgactcaagtatgctttaagggaatctcttggttgttgcttgatgttagtcaatgaggatgcctctggtcaatgatctcttgcagcctgaaactgctttttgaaatcctttaactattgctcacaagaagttatggaatggttggtgaatttttcagaccaactacttgcggctcttgttaaggatgtgggaaacaatatgcaatccaagttgtttgatacattacttggttgcattatggtgataaagttgtttaagtggtcaactggtttagtggtttcgtcatactgcgagacatgcagatttttaactccttgaggaaattgtgagtttaggatattagggtggaatagctcagtttcttcatctaaatcatatccttgcagtttgccatactctccatcttgatatttcctgaatttgtcttctaattatattacttgcaattgaataggatccacatgttgttgatttgcattttgattaagttggttacgcaaattaggtgcatttcgattcaagtgctcgagaaggtctagttgccttcaatttaattgctcgcagagatcgggttcatgatgcctttgctcataattactcatggacctagtcctaaaataacttttagactggtaactacgcgagttactcatactttcttgggcattaaaataatgttgagatctactcctgtctcacatttgtgtattagttccattagacctgctattcctgtaggatcatgattctcctatactcgaacttgcttcacatgtctgatctcgcattggtcttcttctctgaaagagattagacacgcgtcacctactcaggtaaatgtgtgtattctctatgtccgtgcaaaaaggcctttatggatgccttggggatcaaccgaacacaggttggtttctaggatatcttcgatcattacaagggatttttcggtttcttagtcgcggttgtctcacctctgcattcatgtgagatcacttaggtacatcattttattcattcgctttgttagcaaacccatgagaagaacctggagcatcacgtcgatgctcttgatttcttgtattacctatgttgggtggattttctctatccattgggacatccctcgctgttatacctgaatttcggctaccattttagtagaggacacgtgtcaagataagtggaatataatcgatgcatggaacggtactcacttctaatggaataactcat

SEQ ID NO: 219943 - DNA, 2125 bp, Cannabis indica
agcatatctgcatgatgcaatatctccgaacctctcacatacatgacatttgtctctcaacaaaagcaattctctctaaacactttcttgctcttaactttaccatctttattaatcatcaataatacattaactttattaaaccttaaagcctttcattctcttgaaatcttattgttgtatgtatgccacgtgtgaaaatgaacatatgaacttaagttgactggattagcccacattaagagttaccctaaatttgtatgcagacttaaaagttcaatgtgtaatatgatttcgttgtattgctgccacaacttttttggttctcttcttttagaaacacatttacatgaattttatttagtgtttgtagatgtgatctctgaattgatgatggaatactcagtattgtgtattaataaattcaaagcaaagataatgatatacaagaggaataggacatagggtacataatgtcacttccttgcattatattcgcaagtgtaaagtgagacctaataaagcatgactagatagatataatatgtatatgtatatgtatgatgtatatgtatgaatatatataaacatatatattatagtggctgcgatcgaatgttgctttcatgaaaactaagacttttccattgttaatgaggagaaggtgaagaacattctaatcccactcaaaccataattgcctttctcagtcatgtttatgcatcttatcaccactttctcagtctttctacttatcggtttttggttggaatcaaagtgtgaaacttcattgtgtttgatttgacaataatgcttaaaatctatcatatcattcttgcactgaaaccccataagactaccaatcagtggaatgaaatctttatttcccagccagcaaccacttatacaatgctatctccaaaatactaaatataaataaaaatagaagaaaactgaaagtctaaaacacaaattactaaaaaagaaaaggttaatcttttaaatggcaagccatataataagttccaccccacaaatcatacaatgttgatagataccaaattcaatcggataagaggtcttttcccacaaacaagaaaacccttttttttcataaacgttttattattttcactaatcagtaaaagggtattgctcatacctaattgcacaatcatgaagcacagctcgagccccaatacgattttgacatgagccaagcatggcagttttggcagcaccaagacaagcaacgcagtctgaactagttaggtttttgttacaagaaccgtgaccatacgcaaatgcattaggaaaaggagagatgttatacacctcataattcttgtgttttggggtctctattagtaattcttcaagaacataagcaagactagtagcaaaaggatcgccggctgtgtactgacccgagttgcacagcacggttgtgacctctgtgtttggaaggcttgtgaccataagattgccatacaagaatccaattgtgattattgcaagaaatgtcagatgttgaaaacccatttttcactctttcttcctctgtttcccttcctctgttttttctgattagaattcaggtttgatcaagattatcacgttgactcttctttattggtttttccttcataatgcaataatttaagtttctttcttttgtcttattacttgttcctcttcggcctgttttttcttagaagatttttcgattgaatcatacaagatatattatttattttcccacttttatgtgattggttgaatttgtatagactgtaataataaaaggtacatatattccaaatagttgtaccagcgaaaacaaattaagttcgaatatatttatagctcagaggacttcataaaattgtagtctccattttctgactggctacaatcagatagatttgttctacatgagtttagtcactatatatacaataataacaacatcaccaaaaaccttccttttcttttttgctttttttttttttttaggttttagttcatttacactaatgtaaattttcccaaccaaagaattatttacgtccatatacgctcgagatgatcatcatgaccacttcatcatacaatttatatatat

SEQ ID NO: 219944 - DNA, 1798 bp, Cannabis indica
tcaagcttctctttctcttttgcatttttcttcttccgggttaggggaaggaagtagctagctaagcccagaaagtggaagaaagagaatgcagagagtgagcaaaatcattgagaagggtgctaaagctcttcaagatctaaacttgctcaaacttttgcaatctgagattacccatgagctctcttccaatccctttcaggttctctttttctattttcacccacaaggataatttatgtctatgccaattgtttactttttctttgttgttcttcatcgatatgggattgattttcatttcccaaaaaataaactgggttttcttttttggagttgtaggaatgtataagtgaggagaaagcatcattttttgtgtttttacagaatttaaattgcagcttgtgaaattcatgacaatagattttcttgatccaaatatgtgcatttctaatcatttaaattaaacacacacatgtttatacgtttcaacaagcgtgatgtagagtttcatatttgatggggattgtgaccaaaattcttctatatatattatgcaagtaaagagaaaaaaggtcttaagtatttttgacagttgcctttcctagttatttggagaaaaatagacaagaactaaaaggtgttgattgttggagtaatgttggtatgactatgaggtaatgttttcaataggaatgataattttttacatttccatgtttggtatgggaattttttttgatttaaggataagaatattattactgtggtagtctaaacatgttcttatgcataactaaacacagttataagttttcatacaattatattctctattttattattccagttaatcgaattattttgagtacttcataccaaacactcccttagtatattaaatctgttgtattgtgattgaagggaatgtttaaaactcattcccatggtaataacatttccacacacaaaaaatgaaaaatcttataccaaccaaacaagggaaaatggaagattaccattcctaaactgagattatataaccaaaatgtaatttgtgtaagttgttgtttgtacatggttacatacaggaagtgaaaagtggatctttgggagattttgtagtagactgggactcactgcaatctcaggacatggttcttcggcgaaaatgtgagacaggtgaggaggttgctgtctcggcgttgcttggtccattgccctttaccagggagacagacacagatgatagtgtgttcccacggaacattttaatgaagatatgtgtgaagaagcccggattgagatctgtgttgcagttcgattgtgaaatttataacaaaggcggtaatgggtctgagttcgacatccaaaatgcctattatcttcaatcttcatcagctatcagcagttcagactacagaggccctgtattctggtaaaaatttcattcaaagaatcttatatttgttgaataagtagcataaaagttgcatattataacaaatctttgtccctaaatctttatcatgccatgttagatacataattagggagaaaatcacaaaagcaagaaaaatgagtcaatctgttctctagagatctttcatgaggaccttgttttaaattgtcttcttgaagagatgtaagtttaatcatagccaatgaaaggagacgtggggtttccctctaaagtaccaacccggtgttcttgtgtgtcgccctcaaatgaccgttttctatgaattgcacctgcaaagaaaagcttattctccactacattattgcctctttgaca

SEQ ID NO: 219945 - DNA, 2046 bp, Cannabis indica
aataaaactaaaaatacaactaaatataggtgtaaatacaaataacaataacctctctaacatacaattctatgaaaaagaatcttacgttaattttgactcacaattcacagccacaatatatataatatataataatccatagtgtttattgattgatatataattctttttagtttatatattggaaaatagtatttatattcatatttttgtgaaataacatttccaacattatatacactcaagcaataactagtattaatgaagattattaattatttttcaaagagatcaagagttatcaaaatagaattttatttaaaataacaaagaagaaaactgagccctagctctacttaagaaactaattaacatgttccaaactctctaagactaattattttaaataatgcacttaattattaattctatttaattttacaataattaattgcatataattatctcatctaaataattatatataataatattctcatattaataaaaaaaaaataagaagaagaacgattaacgttgtatatatatgttctatatatatatatatttatatattaacaaattaaggtattgtacgtacaaacgttgttttgacattttggaatcatataaaagattacttttgtttgacatccacatattttcatattaattttttttttttttaataaaagacctaattttaatttttcaccattaatgtccaaccaaccaaggtgataaaaaaggtgataagtgtggtccacaaataattaagagtaaggccctactttcctatttagttttcaattattaatttttcagtatgtggtttttgtcattttttaaaataatgactatctatggatattgatctagaacacaccatgtgggagatgtatccacatttaaagattggttgaaacttgaaactgcatataataaccaatcatattattagaataaaatgagatattttttttcccaaatttagagggtttttttttttttctttcaaatctcccaaattataataattttgtaaatgtatatattgttaagaatgaagtgtggttgaaaaagtatgataaagtaatatgcactgcaaattattttatttttaattacaataaaatttatgactaaaaataaaaaattaattgtaactaattataaataatcacaacattgcttcacttgtgtgaataaaaaaaaagcatgtacatcatataatataacagttagctctgtttctcgatacgctctgctagggctcccagatcccgttcaccggtgccatggcaggtcgtgggcgtcctcgaaaaggggtatatatctcaggggcggggcaagacagtgaagaacctggaaactaagaaagtgaagaaaaaagggccatcgtcgactgcagacgtgaagaagacgaagaggatggacgaaattttaaagggttgaacctatggagttttctgatgaagaagatccaatcggcagcgaggatttagatgatgttgggttaatagatgtccttccagcgcctatgacacccagatcatcactgaaatccattcaacagcaggaggcaatttgctcggacttcaattttttcttacaagcaaatcaaaagtgtgctgaatcattaaagaaaggtaatgcatctattccccctgttctcaggtctgaaacagttaaggaaaatctactgaattcttttgagagtaatagccgaaccaagattaaagtaaatttggaagatattgaagttgaaattgctttttggaatccatctattgtttgctatgtcctaggagcaaatcctctactggctgtgcttgaagggtttgcaagaagactatggcaggataaggtggataaggtaggactgttagcctatggcattttcttgattcgatttactgatgttgcaattagagatgagatactatctggtggatacattttcttcaataaaagacctgttataatgaaagaatgggatccgaatatgaatgttaaaaaggaagacattagggcagtacctat

SEQ ID NO: 219946 - DNA, 2575 bp, Cannabis indica
aaaattaaattataattttttaactaaccaaaataagaagaaaataaaaaatacacacatgaaacatcttctaagtcaatccaatatgttcatctttgtgtttatttcaatgacctaattcaaccctattccttgaaagtgatactttgatctagctatcttatatacagctaatatggacaactaaacattagacttctaaatttgagttttcattggatgaaatgaaacaaaacagtaggtaagttcattagtcataattatgaaattataatgtttagtaaaaccactttctttattgatctgtgaatcagtggtctgatcaaagagtccataaaaaatagcataaaattaaatatatagtttaataatccaaacagtaaaattgctcaattaattaatcttatattagaattagctagtaaagtagcaactattctaagcaccaactactgaactaaaatcagaccaaaaagggctaatattttcttccttttctctgcttaatgacacagcttttcttacatacgagaaagaaaagtagtaaagccaaactttgcattccttttcatattaataattctaactcatcatttcaaaatctcaaaactcaattctttcacacagaaaaaaagaaccacctcacttcactttccttactaaaacaaaagaacaatattttctcacttcccctattctttctctctgttttttttcttttctttcttaattagatcgatcaccaccatgtccaccatattctggaagaaaagtttcccactttgcttctccatttcaaaatgtctccccacaactcagtcctcaccaaacgacagagacaacactcaaacgacatcatcatcatcttcctcctctatgccaatcaaagccttcaactcttctgtttatgaaatcttcgccgccagctccaactccgacgacttcttctcctcttcagatgagctctgcgactcagaaatcttaccaccggcgccggcgtttgatctcgccactgtatacgcttcccccaggttcttcttctcctctccgggccagtcaaattccataatcgagtccagtacaataacctcagaacacgcctctaagcctctacggccagtggccaccgcaaaaagaaacacaacggcgacccaattcgccggcggcgtcgaggtcccgaaatattcggttgacccttttgttgactttcggcgttcgatgcaggaaatgatggaagctcgggatgttttggtggatgggagaaccgacttggagtaccttcatgaacttctcttgtgttttctcgctttgaatcctaaagaaactcacaagtttatcattagtgctttcactgatatagtcgttactctgctgtcggcgccggacaaaggtcgccgtcaccgtgaaattaagatccgacggcggcatagtggttgtgtaagacgactcagcatgtaatgacaattattatatataaatattatatatttttgtctttcaattattgagaaaaaaaaaaaataataaaatagtaaataaaataagggaaaaataaaaaacattaactcaaaatagttgtgtcttcttcttattattatttcgttatatacatttattatctattagtttttgctctctttgagaaatgttataggatattcgtggtgcctaatactcttctatgtattagtatagttattagtccaagtaagtatcaggttctatatagtttaatataataatttttagaaaatatcgttagctaatcgcaacatgacacgtcgagaaagtattaaacattattggtgcttaataagaatggtgtttttgtttgggggtgattgtgagtttaacaatatgagacattaattacaaaaccaagggaagcgtgggataagttaatgtctgtctcgatgtctgttcatatatattaattacatttatcatttttgtcgttatgtacgtacaaataagttacttacagttttttgtttgtgaatggaagaggttaatgtgtaggatatataaatgtcaaacaaaacaaagaacaattttcttttttaatgtggtagttgatcgtatataatgtttcggttattgtaattaatgtcatgtcctttatatagttaagagttggatatgtggtcctctatataataagttagatatatattactttctcttgtaaaacactataaagttgttcctccttgcatgtcgggaccgggcatttacacacataatcatgacaaagatatagtcttgatgtgtcgtattgtatcgagggaggtaaaaaaatgacttaacatgtaggtgtagctaagatagatcaggtcctttcgttttctatatatttatttaatttttcatataagtgtgtgtattgttggacttgagttatattaattaatttttatagctatataattatttgctatagtacttttattaacggtattatttctagagtctacagggatggatgtgaagaattgggcattggctaacacactagaaaattgagattgcatttccatgctaaatttcatatataattttatttatgtatatatat

SEQ ID NO: 219947 - DNA, 4378 bp, Cannabis indica
atatatgacgtgcactgtagataaaaccacaaaatgctgcaagaaatgcagcttctttggacggcgcatgcacgacatttaatatatatgcagtctccttggagttgctctaagctccttgtttcgttgtttgaagtttaaattacatacaaataaaattgtgcagttttccttttacaggtacataagttgaacttaaatattgtactaatcataataaattaggatgatgaggtttgacaaaacgattactaattgcaaataattagtctctttaatcttaggggaatttattgatttacattatattataatgtatataaaacagtaaacttcataaatgaccgcatagcgcagtggattagcgcgtttgacttcggatcaaaaggtcgtgggttcgactcccactgtggtcgatcttttttttcaaataaaattatgaaccgtagcttttttaggagtgtggaaaaatcctggaaattataggctaaaactgaaaaaatatcaatggaaatgagaaagaagttatgaaaagaattatcatacaatagtatttatttcactaatgtcataaagtctcactaatttatacattacaactcttatttggatgaaaaaaaatggtcagatgccttgaaaagcaagcaatctcattctgaactagcttttcttcttcggacagttctcttagcagttactttaactttctctttctctttgtccttgtctttgttttcttcagctccatcgttttcagttacagttttcttgttatttacaacagcctttgatgaattcatttgactccttaacctcagtatttcacccttggctgaagatagatcctcttcaagtttctttgctttcttatccaaactctccctttcactcccaagtctcataaccatgttatgggcatcttccatgttttctcgggcctctttggccgcgttcttttgatctgttagggtcttgtagaacacctgtttctcatcttcgagctcagaaattcgggagttagccctctctaaatcactagaaagtgtcattgcatttcggttcatctcatcaagtgatttgatagcctcttccaagtctgtttcaagagattttcgagagtccttatcctttgccatttgcttctccatgccttgtagttctttgttcaaagtggctactgttttttgctctaattttaaatcactggcagcagtttcggcctttttgtagacatcaaccagttcttgctgcaggctattacgatcttcaacaagagctgcaagttcaagagacacattatgtagctcctctttcgtcttcttcacaagttccttcgctgaagttagctcaccggctaactccacaccactctgtttagcctcatcaagactcctttgcaatgaatctctaactttggcaaactcagcctgaactctagaaacctcagcttcaagttccttgcacaagttgttcgacttcattaactgtttttccagatcagacgcctcatctcttgattttgctagattttcgtgcgtggcttggagttcttgtttcagattatttgccttgtttgattcttcatccaacgttttcttcaacttttcattctcttcggtcaatttagcaattatttcctggttttgactaacctcacttgtagcaagtgcaagcttctcctttaccagctgaagctcttcttcttttctccaaaaccttggcatccaaggctgccttcttttctgatgataactttaaatcgttgtattccttctcgatagcatcaagttttttctcaagaacacccttctcagtacttaaagaactaacagttgcattcaattcctcagcaacagagttctttaactctatttcattttgatttttcacaatttcatccttcagatgttggatttccgaacgtgcattagctagttcatcgtttattttcccattggtagttttcaagttgctcaactctaactccttatcagcaagagaagatctgagattttgaacattaccttctttttccttcaactcattgttcagtaaatttatttttccttccaggacttcaatcagctcaaacttcttcttcaaatcttcttcaatgatcttcttatcttgggtcactttagaaagatcagtttcaagactgtttatctgaattttaagatcctctacaaatttcttctcattattcagctctactcccaatcctgcaaccacactgttcgccgattttagttggtcttgaagagacatctgttcttctttcgcctttttaagttgctcagttctctctttctgttcagtgagtagctttgattcaaaattcttctctaatgtgatgatagcagattccttctgatttattttggtcttcatctacacatttagaacaaaacaagtattttgctcagaaacaaataaataaagaaatacaagtattttaatcttccttgtgtatttttcaatagactcacagcttccactgttgcattattttctgttttttctttctgagctgaggcatagagagcaccaagaacaccagaactcagtattccaataccattcaatagagaagcaaatgcatttggtgaagagtccttttgaattgcctgttgtcaatacaaattaaccaattaaggatattttcttacaagtataaactcaacaagaattactgattgggacatattgtgaacctagtccagatccaaacctctgctatttggttcccctcagatgtctttacctcagtttcttctgtaagattttaaataaatgaatgcataggttagtcataaataactaactaacaacagttataattcaatctaaaaggttctaggcaatcttccaaacctatttattatgttctcatcaaaaagaaagtcaattgctataatcattattacaaccaataagagtcaattattatagcctttgtcaaatcttaacctatatgtcagttccctaaattacaataaaattcagattaaaataagatcaagttgatagcacaactgaactgccacaatacaaaaaattgaagaaaaaaaaatggttcaaaacatcttctcttctaaacccaccaaagattcataatcacacgaaaatactcaaagaaagaaactttcaacaaacttgtcaatttcccatatcgaaccaatacatacaaatatatatagagaaaaaaaagatatacttacttgttgtgggcaaaccgtcaagagctctggccctgagttgtaacaagggaagaactgaaatacccacaaagagaatggccctccgttgcaagggagacctatcataagttgacttgtcttggttcatggaggccattgggacagagccccttctcctgggctcagcattttttgcggaagaagagtagaaaaaaatggatcgtgaagaagaagaagaagaggaagaggaggaaagagggtaggagagagaaggctgtataaagcaagagctagagctccccattggaaagcccattgcttcttcttcttcttcttcctttttctttcgttgtgattttgttgggataaagagatagaggttcaccttaaacactctgtctctctactcaaattttctcattttatttttttctcttcttttcagtgaccatcggtgataattacctctactacccccgcttgttgttttaattaccacatgtgccatcatcactttactatttaattttttcagtttatttatttatttattttttaagaaaagaaaaaaaaaagaataattttattgcaaaaggcacaaacttgagattattttaatgaaattttttacatggtcatcaaaatttttttagtttattaaaccttttacttaggaacttaattaataattgagattattgttttaattttaatgttacattaagatgaattgaggtaggctttctaatttaaaaaatttttagaagctttctgttttgctttgttttaagtgacaattcagtgttataagctgaaaatttaactctatgcatatagtatttcgattcaaacagattattcaaattccctagtagtattgacagttgttactaatgagaatgcgtatataaatgagaatataagatagatgcattttttgatgatataatagttttattgtctaaatttgtgtaagcggtttcgtttcatatagcttgtaatgataatattgtagtctatgggatgacaaatgcatatgtcagttagagaatgaactattctagttcaaaaagattattgcatcattgtaaatgtattcatcatgaattttatcacgattctgatcactttataaaaaaaataaaaacataaatatttatcttctgaaaaattattct

SEQ ID NO: 219948 - DNA, 3085 bp, Cannabis indica
atatatagttttacataaaatattgcataaaatacaatttaatataatattatacaatacaatacgctgcaatacgacgtacaaaacgaataaaaaaagtaacatttattgtaagtcaaatttggcacaatgtgttataccttgtgccaaatttaacacaacttttagtataaaaattgttattgagtaccaatggtacctaacactttctataggtagcatcttacaattgattatcaatattttctaaaaattattttcctaaattatatgaaacatgagacttaatgacatcaataacagtatgatactaaaaagagtattaaacatcaatagtactttttagctattctctttagtatataccaaatttaacacttttagaatattattgtaataataattttttgtaagtgaaattaaatataataatacaccatctttttaacacttcattgaaggtgctgatctaaggccactattgcaaagtttatttttacctatacatatattaccacaaaataaatgtttatgatacctatagtttgaaaaaagaaaatggtgatatattcacaatatttcagaggaaaatgccaaagaaattgtactatgggctcttatatatgctctttgcagtgatcatttgctttcatcaaattaagactagcctttggagtttcttgtttggtactcttatgtatgtatataattctttttctttttactatgccatctctgcattatttcttggtccccaacaccaacattaattatttaatattttcttcctcatgatgtgtttaatactattatttttcaggttcaatttttctctatataattgactatacactagattaattaatcgttgctattaccaaagtaaattttcatcggctaaaatttatggctctacacttacctaaatattctattcatgacccaagttatttttgcttgatttttacatcattatatgtgtatgtattatctataatctataactacaatcaaaatgtcaataattttagtccttacatattaatttacaaaaatacccttttactattcaattataacttttaagacaaattttaattataaattaaaaaaaaatgtaacaataataataatataataattttggtttatattttatttcattcctcacttctaatctagtttaatctacttataccaacttattagtatttatatatattatttgaaagtatttttgtgacactctctcaaatagaataaactaatgtctaatacttaagaataaggtactttttattttagaacaacaacaaaagattcttcttaaagaaaacgtagctaataatagtcgaagccaacataaatctttagccagtattcattgtttgataattttgaaaaatattactattaagcactaataatgtctaacaccactataaggtgatatcttaagaattgttaacgatattttataataattattatattaaatcaatctaacgaaaaaaattattatataatttatattaaatcatgttgaatatgatatttaattgtatcaataacaatacaacattttgagtggtatctaatatagttagcctctgtataaatttccaacaaccagactcttaatttactattattaagctattatttacttctagaaaataccaaaaaataaaataaagatcaagacataaaatttacatgttacaattaaaaaaatatatttgaactacgagctcacgtgcgaagcatgttagaccccaactagtcaaaactaaaattatatatatattttcattttcatcaacttaaaatttaaaataatagtgtttatcttgatataaaaacaatgtagaaatgctatagaaaatattttaatcataatacaattttcttttgactaaatgtgacttttagccataacttacttgtaattaaaatataatatttagatacaagttgtaactaatttagttttagccacaataagtattgtgactaaaaaccatttaatcataataaattgtgatttttgtgactaatattgatacagaatatgtaaccaattttgtcatagtatctctagatcaaattattattaagtttgtttttgacaaaatattacaattttagaaaatacaagattcttttttgtcatttaacaaaatagagggtccaattggtagctttttgtaaaacataggatctcaatggtatttaccgactaaaagtaagattttttgaaatgaagcagagccataactcatactatcctatggacgagtctctactttccactatggctaactttgaaaaatcatcaagctcactcagtactcctctttttgcccctcttgcacttgcaccctctcctacctatcgcaaatcaacttctaataagttagacttcctttacgaactttcttatgttccagataaaaataaaattacctctgattctcttcttctcttaatccatattaacctttcaccaagactccttcctcttttactagatccgttaatgcacttattaaaccatctttcaaagctacaaaagaatacattcaagccttaaaattcagctagtgccaacttgcaccaacaccagaggtccaatttgtgactctcaaaatttcacttgaactccgtccacaatggatggcacaaggttatacccacatccactttggtgctattcgccttgctctcaattatcatggcaggaagggccttctagttagtactcgtattggtcttcttgatactcgaatgaggaaatatcaacatgcaagtataactactattgaaactaccttaaatgcaggagcagtggtcgtcactctgttttccaattttaacatgtctctcaaagataatcgactgactgatgcttttaaagtagaagtacaaacagtaggagtagatcaagacccaacttctcttggcaccacactccattatcagatggcatatcggcttcaggatcacgctcttgatcttaacatccctcaaacacaagatgccttactcatctccgtcgattttaaacaagtaccgacttgcacac

SEQ ID NO: 219949 - DNA, 1441 bp, Cannabis indica
aatctcccattaatggaataatgtgtttcaaatatattaatgcatattaaacagcttgtaaataatatgcaattataggcaggttatatagtcaaaaaaagaaaaaaaaaataaaggcacaaaactaaagtaaacactatgaataaggtacggatttgtgagcttactatagaaggaagactgtccaaattacagggagagatgtcatagtcttcagcatattgaccaggatcagtttttagcaatccatcaaacagcactataaatgatgaaatgtcgccttgcactgagtatagctcttcctggagcttctccactttcgtattggatgtcatagcttcccattgtattttctcaaatgcagcttgcttatccgcaagactgatctgtaggcatagacaatggttttcataaataaaaaatcaactgatacagtgacacaaacagagggataaattatattcaccattctgaacacccttgcagatccttaaattttgattcaatgaaagaatataagcttcacatataaccttataagataaaaccaattaatgaatgaccgccgataatgcaaatttcttatttgtattcaatttcccaaatatgcgaagcataaagatgcaggctattttacttatacactaagtaaatacaaaccaatataaaagatcaatgtcaaaaccaaatcacaattaaaatttgaatcaatgttccagaagcagtaatgaaacactatagctgcccctcagacctaacatatctcaaatatagtcctgcaattaggtatgatgactgttgtaacttgtaaggtaccaaactgcaattactgctctcaccaggtctgaagttcgagttctcctaggtacctacatagcaaattgctatgcggagagcctagtttcaatatatctatatctataaatatatatatatataaatatatatatatttcatgcaataaatctgcagcaagctaaacacacagttgacataataatttgcagtatctagcaaccaaaagctagtattaacagggagggaaacagttcaccataacatagtcattccttctctgaaatttgaagttttagattatcaagttctgcatgaatagcactcatttggttcttcaaatcgtctgctgatttcaaagattcatctttttccaacaatttcctttgcaaatcctccacctgtcccttcagtagatccaactcttctctgtcatctgcggtcaacccctttgacgaaaaaatcgaaaatgcctcagcatctgtattattagtaccattcttgtctacatgctcccttttctttcttcttggaatagattgagctgcattcctcccttttggttcagtacaaccttttttttaaagaaaaaaaaagaaagaaagaggtgataagaaatatctgtagtcagcaatcaatcaaatta

SEQ ID NO: 219950 - DNA, 3319 bp, Cannabis indica
aggagtttgtttatcatctacagcaagcagtttctgttctcccccggattgtgaaaacagcttctgccaatcttgttcatcttcttcccttgtttccgtaggttctgctttgagaagattatcaatagtctctgaagaagcttgtttatcatctaaagctagcagtttcttttctccctggtaatgtgaaatatcttcttgctgattatgatcagaagtaccaaaaaagttgctgtattcttcagagctgtcacccctttgtactatgttctcttgtaactcttctgaaaatcctaaatctgctggagatgtttcctcctgcaacacagctgtaatttttgcttcgtcatctgattttacattctgtggaatttcaaaatcttcaaaaggattcttcttctcttccagactatccaacagttttggcaaagttgctacttcttcattgattaaatctgatgcatcaatctcttcatctggcttcacgctttgcagtttcccagaaagatgctcaagattacagtgtgcttcagtgaaattcgtttggagattaatgttctgctctgtaaaacttttgttgagatcctgaattccgtgcaacttttcctccatttcctttagcttgctgctcaaattattatttccatcatgtaaagtagctttgtcatcttccaaagttcgaatttgtacttgaagcccatcagtttcgctttttagtctctttacaagagcagcctgtgatgaaactgcagtttctaaggtgatcactttatttacaagttcatcaatcttctctaccatttctgatactgtaagagatttgtttggcatggtgtcgaattgtttcttgacttttgcttgcagtaactccatctcttgcctctcttttgatttactggccactgcttcttgatatgagctatttgatgcttctggtgctgagctcttaaattcatatttcccaagttggcttttttcattggtctgattatggtgatattctcctatgagaaactcaaacctctcctttacactcttaaccctttgggactcaactactgcctcctcagctgatctttcctgtttctcctgcaactgagtcagcgtctcttggcatgattttaaagcagccgccgccatcagatttctagcttcatcatcttcaatgaccattccctcaccaaattcatcttgcaaattgcacactatttcttgtttttcattgatctgattgtcaatttcccagtatttcgcaagtccattctcataagaacccttcacgaactctttctcagtttgcagggccaaaatatctttctgaagtcgatcgatctcttccaatgcctgagttcttttaagacctgatttagaaactgttgaggtagttgctgtttttttgtcattttgggaagcaacttttttgtagcttttgctgttgtaatgatattttttaactctttaaagggacctttcggagcattagggacattctttgcaacttcaggaatctttctcggaatcccattagacacttcttcatcttcttcttccatggcaaactgcacttgttcagggaaaactgtagcgattgtgttgttggcattttgcagctctgttgaaatgtgatcataccgctcagccaatgcccgataagctctgtatgattcttctacaaagcttatcagctccggtctcttcttgtagtacatttctgctctcttagcaaaggagtctccatcctcttcaatgagttttagtacaatttgcaccttttcctccatatctgcaatcccgtacataattcatattagtgtttgtttgcctggaaaaatagagaacagaaataacaaactagtgctggagaatgataatttacagatgaagtttgaataaggaatacagatgaagttttgaacttcagaaccttttattatacaatatttctaaatttgatcataagaaagaaaccacaatcataattagttatgaaagttatgcttagaaacagacatcaaaactttttgtcaaaacttttttagattgatcattttccaaatgagatggatcataatatcggttgaaaacaaactgttttattgcaacttcatgtacagaagacaaagcacatacaaaattgaattatttttattattctaagaaactgatttggtgatgaccaattcaatctgcttgttcaaccctataagataatagctttgtgataaaagaccacaattcagatgatcgggaaaactaatcacaaacggaagcaatggcaatattcaaaaataaacaaattacaaaccaaacaatattatgaaatttctagacaaactcaacactaatttaccttggaggttttgctccagccatttggattgctttgttcttatgtggctagcccaccaccatgaatatgcattgcttgcagctctctgcaacatttcttcttcttctacttgatagacccaaaatttgaacaattttttttctctctctctctttctatctatgcaaggaaaggagagatgggaatcatttatgatttagagaaataaaggataaaaagatttgtatgaaatgagaaaccacagaggaaaagagaaaagaaaaaagaagaaagaaaaagaaaaagaaagaaaggaaagaaaatggaaaaatgatatagtttgagagaaagaacgtggtgaacaatggaatgtggcaccaactttctaataatggggttcatggaggggagcaaactccgccccgaattcattgtcaaagccttatttttcataaaaacttttaaaagctttttccacaaataaataaaatcaatgcataacataatcatattactctggcttattaattacaataaatgtatattttatgggtcagtaaaggtaggaaatcatcaagtagctttttttcttttttccttcacatgaaatctttgcttttccagggtgtgaaaaaagagcgcacacacctcgcttttggctttatgaaatcccatacaataataataataataataataataataataataataataaatgaaagagtcaaatttgtataagttacctgtcactgcgccaatggtgtaaaattattaatatttctaataattagtttaagggattctaaaaatgcacctccttaaaaataatgtatcgatgcactcttgatttgtttcggcatctagaaaaaatttttagtctattttttttttcatattcatgtacgttatagctatttaagataacctacaaaattttgaaaaattcagaataatttacaatatagaaaataatgttcaaacagtcta

SEQ ID NO: 219951 - DNA, 2984 bp, Cannabis indica
aagaaagttcttcatagagtgaacgctatatgtagaaactgcttatggaaaggtttggtggactccaatagctcgagtcaagtggcctgggaagatatgtgtcgttctaagagtgaaggaggaatgggctttagaagattaccatgtggaatgaagcagccattgggaaatatgtatcagcagtggcagacaaagcaagattactttttgggttcgatgggttcacacagtctatataggaatcgagaattggtgggcctacaaggtcccaagtacaagtagttggtattgacgtcaagtggtccgaagtgaaagaagcctacaagcaaacttaatatggtgacaaaacttcatcgtgggggaattacaaaataagtgatggctacactctcgtttgctctactcaaccgaaagtcttttggtacagggaagtgtggaagagattaacaattccgaaacatagatttattctatggttgtcggtgcttgataaattgcatgtgcttaatatagctcaagatgataaatgtgcaatgtgtgggttggaaaaagagacaagagaccacttattttttgattgtcatgttagtagacattgtttactgatcataaaacagtggcttggctggagagtgacggctgctatattaccaacactcttgaggagaatagctagggcaaagctatctaaatttggaaagcaggtggtggttatgactttgcagcagtggtatatcacttgtgggcttgtcgaaatgaattcgaagttgtgtggaatcaaaggttatatacagctatatttgtgacaaaaaaaaaatacagcaagatgtaaagaatagaattagaagtgtgatgccaaaaaaggtgatttgggaatttgtaatagagaagtttacaggcctaactttatttggtgatgtataggatgtaaattgttgtttgaagtgcaatacacatatctgaattattcaaaatatatacatatatatatacatatatattcaaagatgaacattgtcagttttaggaattaaaaatgtttcagatcacacaatttaaaggtggtagtaaaaataaagcaaaattttgaaaacacttcaaatatctaatgacattaaagtagcgtttggttggaggtaatgaaataaaatggaatggaaagaaaataatttttattccattcttttgtttagttgcatttaaaactattggaatatcattctaatagaatggtctttccattatttttgtagaatgattattctattttgaaatggaaggaaagaccattctaatgcaagatttgaaaaaattaataatttttttatgcagtttaaattttattctattctattcctgctacaatttccattctcattcccattcttatattttcattccttttaaccaaaggcttagaagatgtggatgtccaatttaagacgagcataaggaatttctgtaaaatgcggtcattccgtcattcaatgttttaactaataaaataatcagatgagtaccagaattcattgttggagaactctgttctactactcaatcaaaaacataatctacagttctaatatagaagaaacataaacattataaatatacagggtagatagtaaacaaaatctacatccactacattgtcctttgttatacttatcttccatgtcagaaagatataaggagtagatgtaagaaactaaaagtacatatacgaacctgaaatccaaacacaacttccagaagatcaaacatgtcagcgtctcggtcgccaattatcacgtaatcatctggaagtctaggaaagtgttcactatatctaatagcagatattgcgcctctgacctgataaaattacccgaaatgaaatttcatgttacaaacaaataacaaaaaaaaaataaaaaaattaccacaatgattatattacccaaaatgaacgtgatgagtttaattggaagactgttctacgtattgaagagctatggaagctagacaatgcaatcaatgagaatatatccccccaaagaaaaaaaaaagaaatacagaatattgaaggaaaaggaattcggaatatgaattcaagttcaacatacttctgggaaaattccaatggcattggtcctcgacggcccttccagtggtacgatattataaggcgcgaactcccgagataatgttgcctcagaagattttattcttctcagctgaaaccccaagaacaaaaggtcataagttcaatcaaacgcgtcaacaattacaatggtaattagatactttcctaagccgcatattttttctttttgaaagaaaagccgcatattttttctttttgaaagaaaagccgcatatctttgaaaatagcgtaagagttttttattttaatgacaaaacatacatacattgttttcaaaaaaaaaaaataaataattaataaaacatagatacattcaatcaaaaaatatatatattataaaacatagatacattcaatcaaaatatatatatattataaaacatacataagagacaaccaaaaataacagaattaaatatttagtacaatatgaatacaccacgtctaaaaatataatttagaggacacaaaatacatcaagtatttaactacaaatcagtatatttgtaggtgcactgtgcacatccgaaaatatttgaagaacatgtacctcctctttgataagtccaccagctcccctaggatctgcttctctgctaagcgcctccatgacctctactagcgccctcagcgtagcaactatctttttcatttctaaatatttcatttccatcctaaaacaacaaaaacaaaaacttgtatcagtaaaactaatgaaacaaaccaaaggttctgtcattgtacttgtgtttaaagaagctgattttttattataaaaaatattaaacctagctgataagatgatgatattaaaaaggcataaaagcagtgaaagtta

SEQ ID NO: 219952 - DNA, 5549 bp, Cannabis indica
ataataataaataaaattaaattaactttattaagcataattttaaagttaaaataatttaatattttgtgttttgtaaaatttatcaaatagaatattttgttttgataaatgataaattagattgtgtattttttaaaatggtataataaaacaagactttgattgaggtggaaaagcaagagagaattgctactctccttcgtatggctccttagtcgggtctagtcttttatagactctggagttccacttttggtgtttgctatatgttgtgtatgttagaattattattgtggattaatataatcataaatataattctataatcacaatcatttattatgtgtctatagtacttttcaataatgataatgagatgattcacactaactaattatattagaggcacatgaaagtactcttgtgactataattggctcattaagttatagtctatcattaattaaaccaatagatcctattagtccataagtgcttaagcttagaagggtgtgatatatatttgatataagaaggtttaattaatggcaatgagattgacataaggcgattgctccacattagcttttcttcaagatttaccattgaatctttttgcgcattcatcacattagaagattctaagtatcaaatggcttacatggacatgagtgtaggaggtgtgttttatgggtcattataataccctaaataaaatattggatcttggttgacatttatgagcattgttgaagatagtaaattaatgatgtggtgtttaatgttcatatcttgttatatacttcaacaatcggtttctgcagggataatatatttgattttagggcctaattttttttttgataaaaatcatacttttaacgaaatttttttttttttggattaatgtgttcatgacgaataaatattaaatttattgttttagatgagtttatatctatttttggatggtcttttttatattttccattgtagaataccaagtttagaggtgtctatcaatagagaaaaaccatattcgagtttatgcacttcgtaatgtttttcgtaaaatgtggatgaaatggatgttgaaaattgatagacggttaaaaatggaagaaagcccccaaaaaatttgacaaaaacggtggttggacacgtcagtttcaggcgggtccgattttcggtcttgtagacccagttcgtcgacccgcgcacctagttttcaaggtcaaggatgacctgtgtgcccgaacaacgtgttgttcaggtctcttgagggtccctttctttttgtaaaacgacacatcattttacaaaaacaatatgtcattttctcgaccagaaaaaaaaattaggggctagtgagggcgcgttaggtcctttttggaccatttttttcctagttttcactcaaatttttctactctatcatttctatactattatgcacaagattaacatatgaattttacttttaatggtatttatatttaatcttttgtgcataaatctaattatctattaacaacaattattgctttttttttttttttattgtggtaagaataagcatgtaaattgtttagtaatgagaaacattcaattattaatttatgagtaaatagcgacataagtacccaaagttttgagtttataaacggcataaatttaatatttatttttagcaacataagtacctaataatattttgtaaaattataattttcttccaatttcgtgacgttcaacctctgttttgtatttgttaaaagaaatttgttaaaagaacatttggaagtaactgatactacatatttaattctagacccaatgatctagaatctgggttttatatgtccactgtacaataacagaatctgtactgataaatttagagacaaagtaaagttttacaaatattgggtacttatgccactaaaaataaatattggtttatgcctccaccttcccaatgaggtgtccttcgtggaatttttatgggcttcgtagacgtgtggcggaaagaacccttcggggtttaattcatgagacaaatgtgggtttttcatttctcttagaaagaaaagtgggtagtgatgtgacgattgaggtgctgaatcgtctgggatttattaattcttgttgtatcacagagaatggtattgctagaggtttcttcttggcatggcgaacaagagttcagattgatgttgaagagattttttatttcaatttttgtgtgaaggtttctcaaagtctaagaagcgctcaatggttgttgttttacatttatgggactccttaaaaacctcaaaagaactctttttaggaatggatgacttctaaagttctttcttgtgctgaccctgggttttcatgggtgttatccatgtttatgtaaggcctaatgcgtggcatttaatgaagaagacaaaattaatcctcctttaattgaagttctttaagactactctatcacagaaaggcttcctcgaacagagaatcatccagaatgaaagggcacgtggaagcctactctcgcctaccttgacttccctgatgcggaaggcgaagcgtctctctcaaactcagaaggatctaacggggaagctcgcttggtttatattcggataggcaatggaaagacctaaagcagatattgaccctcataaagcgtcgcggacgtcgacctttcacacatgctagatcactaaaatgacaattatgctttctctgtaaaagatcaaatcttgtcacacatccgagcatggtagtgcacgtacaactagcaccttcttactagacggacattacagagttctgtttctaaaggagaaagcttggtacgaaacgtggcacttttaaaggttaaacctttgcatgacacgtgttcgaatagtacaaaatggtccctattatccaactgttgcacgcactggcataatgctacccacgggatcatctagttagctctaacattgcatgtgattaccccaatagtgggatttaagcagaaatcatatgtgggtgatgggcctgtccatacccaccaattagcctataaatacctatttgttctcatgcaaaaggggcaagaaaaaacacacagctataactatgttgagattacccttgatattcttcttcttcttcaaaaataaactatgggtaaggagttagggtttcctggaagaatattgtaaacacatcaatatcgcccttaaagtcaaatagactgacttgtgaaataaggtttattaacacctaaatcacataaaacatcttcatctctttatttttgtaagttattatttctttacttcctaaatatttactttccaaaatctcagtaaatattttgatgcattcattgagagctaaaggaagacgtaaaccactactaccgtcccaatttttgcccacgtgacatggcatgtccacatgggcaaaattgatgccgcatggagtacagcctgttaataaaaggaccaagtcatcatgcacaacctaccaattgatgaagagtctaaatactcaagcagaacaatgagacaacaaaatggtcaactagggggtttggtcggaccacccctgcccggccatagtccagcataggccggaaagcttcttttttggcaaacacttttggtgtctctactgctttcaacttgggtagacactctcaactacgaattgaccttaacaacccataaaaaataggggttcaactttatatatttacctatttttaaggaataattaataggttattttcttatatatttaatatgtaacaaataggttagatctcctaattttaagggatgtcaacctactttggcttagatcttctgtaagctctttcctatataaagagcactaggttaaaccaaaaagttataagttctcatttctaagctcttgagttcaagcactcgaaaccttagcatatctctcctatgcgccgtttgttgtgtatgagagactaagtcttcctaatctcatttacctgagatgtacctcacattctcactattgtaattcaaagagagccactctagaattcacaacacttataatatgagtggtattatctctcatatcaatacaactaaaaggggagtacatcattactcactaagagggcaaactactataaaattgttgtgtccatttatttacttattccgattgcttacgtggtgattctgataacaaataacactccgctgttagttgattaaatcgaaggttaacattttggtgctttcattgagagcgttgtctatttatccgatcaatcaccatggctgtaacaaagagaaatctggctaaaacttctgcttcatgaggtcttcctcaagaccccatgactattgatcttgatgtttgttttctagccacaactggtgtttccatgaatctgatggatgtagcccatcctaccaaccctgccaacccagaaggcccaataaacatgaccaacacaacatgtccggtcgaccctcctaacctgtctaatcctaatgaacatcctctactaccaagggtggatctgccattggcacctcatacagagggtttcaccaatgtggagcagcccccacgcacaacgactgactctgttccccagtactatgagggggaaatagggccaggaattggcgaattagtaattggtgagcctcatgtggacttgggagaagtctttgaattttccagagttagagaggttgtaagccaagtcagtgaaactgaagaaccacgaactgttggttgtaatatgtttgcctaacagagacatgagttcctgagatagatggatgaccaggagtacataatctgagctcatcaggcggagctagaccacctaataaggaagctaatgacctgataaggcggtgcaataagagaactatcgggagaggacatgatctcattagagatcctctctgaggaagacttatcgagaaatcgcgtagagcctcgagtatttcttcacacagaaagatttaaatatgaggcagaggcggtggttgaaattagtcaaagattatgactgtgagattttatatcatcctgggaaagctaatgtagtggcggatgctttgagtagaaaaggtctcgggcaggtttttaataccataatggtagcacctcaggttgcttcagatatggttaaggctggaattgagttcgtagttgggaaactacataacttgacacttcaatcagatttattagaaagaatcagaaagacacaattgaaagatgctaagttatttaaaatttaggatgaggtattggtaggtcagcctaaggacttcttgatcttgcataatggaatgtttctttacaaggctcaagtttgtgtaccgagcagtgatgagctcaagaaagagatacttgatgaaacccataccacaccttattcattacacccgggtaacaccaaaatgtaccaagacttgaaaccctattattggtggtgtagaatgaagaaagatgtagtggaatacatgtctaaatgcttaacatgt

SEQ ID NO: 219953 - DNA, 5005 bp, Cannabis indica
ttggaattatataacttgattatgattttctttgaattggtcggtttgtgattgtcttcaacagcattggggtctaatttacccttcttttgtgtgtgttgtgtttataatcgtgtttgtttctaaaattgtgcttttcctcgtttgcttattggattgtattgtttaattcagtcattctgattgaaataatagtttagcctcaaattcaatctcccctccattgttcatgattttgctcttcgttttctcttgctactgaattttacctcttgtagtaagttaattatgccattgtacagtagtctaaatctgtacgatggatcagtgaaaaataagtttgaaagtttagaatcttctaggaggttctgtacgatgaattgtacgttaatgtgcaaatgctaaaaagctatactattaactatgaatattttttttattcttcttgctgaatgttgatgttatggtgtaatgtgaagagaaagaagaccaattgcctttgaatgcatgtttaagtaagatcaacttgaattgggggaagccaatacttgtacaaatatgaaaattaaggcaggataagtagaataagaagcacaaagtgcatagtagcctctcggggcatttaacttgaacatgtattcatgataatgagggtgttatatttcacatgtggaagtaagtaatcaataaacgtagtttttgtttttgaaaaattaataactttttcgtgtattgaggacatgcatgaatattgttgttgttgtttcatttatttcttaaagaaatttttatactgtttgtattgtgtgcttgaattatctatcacctcttcccttttatgtttgtccttctatcatcaagtgctactaacgatttgactaaattttccttaatattgtagtctatacttcatttcagcaatgcatcttagtacttgaaattttagcccatctttgaacaactatcaataaaatgtcattttcattttgatttattaaaataattttttaaaacatctctactaacattactgtcttagatgacataactatcttggattactggtggcatattatagctaaaggttaattctgagtgaacttaatttggtattgttcttgtttctctgaagaaccagatccaatgttattaacaatctcaattaagttcaggaccctttcatttgttaatataaattaaattctggtaaaatttccattacaggccacttaattatttgcttttatttgtttgtttcagtcaattcatcttcgctccagcatgtcaagtttggaggagcccctgggttttgacaaattgccaagtatgagtactattgataggatgcagagattttcatctggtgcttgcaggccaagagaagataacatgggtatgggtaactgctggattgaaggaagaacttgcagcacatccaatagttgcaggtgaatgagaattattctctgtctgcttgtttgttcatatgatatgctgctgcttttcattgtacatgaacaaccatttttgctatatgttctttcacagatttgtgtttacataccgagtcatcttttcttatttgaacaatgaatacacccctgtgatctttgtttttgtttttttttaatgtatggtattttctttctatttaatgcacttaccaaagaccttggaatgcttcttattgcatggttcactttagcttttcttgcacaaatgaatattaatttcattcccttactgttatcacttgtttaaggttttttgtgtacctcaatcaacattcaataccagtacagaacaatattaatgcttttgcaacaggcaacagcaattgcttttttagattagcggttctctttttgggatcccttctttctaactgtgtgatggaaaatattgaaatgaatgagaagtcataaattgattacatttattgtgcatgcatgcacatttcattttagtttattttgtggtattgaaagtaaatgttagtaagaggctgatgaattactttgaaacagtgttgttgctcgagttgatttttatttatttatttattctttttttccctttattctggggtttgtgttacagcgagcaagatgaaagggagatgcaccacagtattattggtctgattcttgtagttaagcataacagttctttataagaaaaaatcattacatctgcctagatttgcttcatgattttatttagatgatgaaattatttgcttaaactttctgtttgcatttcaaggaaataaccaaaatttgtttctctgaattgccttacattgtattgtcataggttcaattatttcatttcatgttagtattcttacatgtttataactataatcaattatctaacatggaattatggaatatctgttgttttgcagtgaagaatatgaagggtctgcaagagaggcatttccatgggtgagacacacaagagacttctcgcagggcgatactgtaaactggagaacttcgagcttaggcaggaatcccaagatttttggaaatggttgtgatacatggtatactccagatcatcaatataatagcaagtataatgacaaagaaaaacagggtctatcaaacaaggtaattaggtattatggtttcaaagtgaagaactgctgtaatagcgtgttgacaattaatattttcttccatctgtttcgatttttttttttttgcacttcttctacacagtagcttctttagtggaattatgtctattttaggacttattgaatagtaatttcctgttatgtacaatatatgcatcttgatatttttttcttttttgatatttatttatctgtaccttagttatgacttggtacttgatggactcacagttttgtagtgtactgtgtttttttaaacctttcacgtgtaattgtactattaattttttcctagttcatgactaagtatgaatttttgcagcactgttacctcattttcttattctttcttcttttttcttatatgaaaaaagtttttgaaaggtattccgaagtttgtgaagattgttgaagttggtccaagggatggacttcaaaatgagaagaatatcgtacctacagctgttaagattgaattgattcacaggctagtatcttctggcttgcctgttgttgaggctacaagttttgtatcaccaaaatgggtacctcaggtaacttgtttatcccacagttcccttaaatctccagccataaaacaatgcagggatggctgttttaaaggatttaatgaatctgttgtctttatgttaattctttggatttttctcttttcattgctcatcatttttttcccttgaaataacattttaacatattcctgtcaccttagagtttttaataacatcactttccttcctcccacattccttttatctgtagctagcagatgctaaggatgtaatgcaagcagttcgtaatttggagggtgctagattgccagttttgacacctaacttgaaagtgagtatgatattatgaaaagtggaagattttaaactttgatatttggtgtagctggaatttctgacacgtctatttcctctagggctttaaagctgccatggaagctggtgcgaaagaaatcgcagtttttgcatcagcatctgagtcattttcgatgtcaaacattaattgtagcattgaagaaagtcttgatcgttatcgtgttgttactcgtgctgcaaaagagctctcagttcctgttagagggtatgctcctacttaatcagtgtatgatcaaccgcagaaaaaaatgggaagaagttcttcctgaaatggatttttcactcattgaaactaatgacataccacccctatatacaaaagccaataaggttcatcaagaataaaatagttaatattgtactcaagatatctggcctagaaatcagatccataagacaaagaaaaccaattgtgaccagttgaagtcaatattctccaactgatttttctacagtttttccatccctcatattttatggtaggacaagtgttgccaccaagaattttccttatgataaccaccttttaaaacagccatcaaggcactgtattgaattgaaagccctatcagacatgagtagaaccagtatatgttatcgtatgagatactattaatcaatatgtgctgtttaagttcctgctctacttgaaatgtgtatttagtatataaaaccagtattggtatcataagagaaactattaatcaatgtgctgtttaagattctgctctacttggaatgtgtatctagtataccatgatttagtggctctttgtgttgttttttctttaaaaaaatgctttcctctgacaattctaacatcaaagtttacttaaataggtatgtgtcatgtgttctcggatgtcctgtagaaggagatatttcaccatcaagagttgcatatgtagcaaaagaactttatgacatgggctgctttgaaatttctcttggtgacacaattggagttggaacacctggtaactctttttttttttggtgcttacactgacattggttaatttattttgcatgtaattatataagagctcaaattgtggatgcatagttgaatcaattagaaaataaacttgagttttgacttgtgcaatgcctctttaaaattttggtaattattcttgaatcgcacatggaaaacatcaaaatatttattccccatatacacagttgtcttctattaggcgaagtgctgtctaattttctttgttctgacgtacacaggttctgttgttccaatgcttgaggctgtcatggctgttgttcctgttgagaagttggctgtccactttcatgacacttatgggcaatctctgccaaacattttactgtcccttcaagtaagccttctcaaactccaaacttatactggatttaaagtcaacgcttcctaatttttatatgcatatgtatgaactttagccaatatgtcatt

SEQ ID NO: 219954 - DNA, 4273 bp, Cannabis indica
aaaaaaaaagtaaaaaaaaagagagatttttctttaatttttacttattcatattttcatctaattattatcaatctttttttttagtaaaaatatattaaattaatgttatgactttttttttcatttagcaactacttcatgagagtcatagaatatgactagtcattaggtacaaatttaaaagtctaatcatttataaatatttatatggatgaggttttaattattatattaaatatgtagtgatgattatatttatatttagtggttggatccgtattaaataattttgattaatttaaaatgtatttaaataattaataaattatttttaacttgatactaatctatttttattttgtagtactttataggttaaaaataaaaaatatttaaaaatattattgataaaaaggttttattaaatttttaattaaaaattttaacttattttaagtaaatagttgattataattaattcagattttttttttttagaaaatagaaatatttattagtaggcaaattgaacatataactcaaaaagtaaaatcatcaacaataggtcaacaaagccgtttacaataaactagaagaaaatcctaacaacaacctcaactaaggatctaataagtcatcagtgatcaagcatcaaagaagtgtaaagtatactaggtattcaaactagatgaacatctcacagaactcacatatcaataactaccagtcaatgatcttccaatgaaaattgagtcataacaacctcactgtttaaatcataaataagaaaaataacacgaccaatcatattgtgaagcttatttgtaaaagattagagcacataacaaatggctaatagaaattcgaaaatcacccaaatcttctgacgaacaaagagtgagactgagatatcctcggccgaaggggatttggattcatcgatgaaacaccaataaaccaataagtgacaaaacttacatcaccaaaatcaatccctactaatgtaatagggtgatgaaaatttttccaaattaaaaaataaagaaaatccttaacttaaaaattctaacccaggcccaacccattttaatccagttgactctttttcgttttgggtctagagcccaattcaatttaagctcaaatttgtaattgatactttcaacacattaatttcataaggcaagttcactttgcaaaaaaaatcataaggcaagttcactttgcaaaaaaagtcataaggcaagtttcaatacatgaaatcaattcaaattattatcataaaatttaaaaaaaaaaaaaatcaaattattggttgtactttttttctgatacagattagtggtttgtactttaagattgcgtttggttagaagttgtatgggttgaactttttgacacaacacgaaaccagcaagacctaaagatacgagcacgactaggcaaaaaacatacgggcttgggtaagacacaacacgaaaaatatatccttaagcacgacacaacacaagaaacacaaaaagcacgactcgtaaacacaaatagactagcctgaaggacacgacacacgataagcttaaaaaacatgacacgacatgttaaaaagctttataatttattattaacactgaaaaataggcaagattgattcttgagattagtcaacaattagtctcgggaagcgagacactttaactttaagagtcagcctaaaaattactgaatcgatacatatggcctgagactcattaatctctcgaatcgaagcatgcaactctcgggatatatccacacaactcagagatcaacccagtaacaattcacgagtgtgtgcatgcataagtgtatgtgcgtgtgtgtggggtcacgtgcgaacacatggtgtgtgagcagttcgcatgtgaggccgtgagtcgtggtgtgtgaggggttcgcatgcgagcccatgagtgtgtgtgtgtgtgtggtgggggtggggggggggcgctcgcatgcgagcccatggtgagtgaggagctcgcatgccagctatgagtgtgtgtgtggggtggagggctcgcgtgcgagcccatgagtgtgtatgtgtgtaggggagggggctcgcatgcgagtctatgagtgtgcacgtgcgagccgtgtcatgcgagacccgtgagtgagtgtgagaaatgtgaagtaaatggagaatctggatatgtgttgaagagaagaccgttaaggaaggaatcaaaagacaaggcttgcacgcggagaggtacgagatcgagtacggtcacattctcagtgtggcttggtggtgacatggtacaagtagtggagacgtgttgtctgcaacccctgacgttgcagccactacacctgcaactcgggaccacactacaagaaaataggttctttacctacatactgtaattgtaggtaaaaattatctaattgtaggtaagcaactttacctacaaataaacaaataatttataattgtaggtaaaagattgtggagaaagatctatacctacaattattcttatttgtaggtaacttatatggtggaccctacaatgatgattaagcaaatgatgtatacaatcacatgtcatcttatgtggcagccacataggacaaaacatgaaacatttttacttgtccacgtgtcaaatttatttggccaaccaatatgggatttaataattttaccacgtgtcacccattgaatggttcacataacaagtttgctagtatcttattattttaataaattttttaaaattatataatatcattttttttaaaaaaaaataaagcagaccaaatttaattataaaatatacattaatttatttcaatgtaatttcaattacaaatctgacaccaatattgattaatatcctaacataactctattttacaaaactgaaacacattttgggaagaaaaaaatttctttcccttctttttctttttttcatatctaaattgtctcctcctatcttgaaatgcttgattgcttgatgaaagacatgattgcaacataaagctgaagaacaatcttgatgatggttttggcgaagagccttctaattaaatcattttcttgatgtcttcaagagttgttccatatggcaagtgctaaaagtataagacaagaaaaattatttagacatatcttaaagtcaataaaattacaaaaaatatgacattaatagtaaaatatggtagcaactgttctcgctttgttcaaagattgggttgtctcttgaaaaaaaaacataagattgggtagtatgagttgatcaaaattatattaccaatttcattaaataatcgtcccacaactaaaactagaatatattggagtagtaatttttgtagcaactaattaaaaacaataagggtgatatcacaatttcttacaattaaagtcatgtatccatggcatataaatttggataataattctagtttgtatacttgcaatatgatggcaagcaataatgtgccaaaactatgttaagaaaagtgtacaagtagcatattaggaattttaaatatatattgtaatgctatgatttacaatcatagaattccaaaatttcaaaatggaagcaagtcaaacggccaatattttatttatatacaatttaattaataacaacattagggaaattagctaacttgagacagaaaagttgacaaatagcatttcaatcttggttaatgattgccaaaatttctcaagttcttcagaatatttattcattattcaattcaatgttataggtacctatacaaatcgttgtttggacattatactttatgccttatcaaccataattagttcatcttcaatacaaattaaattatctaagtaactaatcaaaccctatcgcaaaaagaatattatatatataccaatttgtattataaaattaacctgtgtgtagataggttgttcttaattttttccaaaatcattggggcctaaaatgaatacaacaggaaaatgcattgagcaattattcacaagatcatcaaatatataatagtatataacaaatattagagacaaaagaggctcaagcatctctagcattactagttacacataaaagattacaaaaattcaataaagtttttacaagattcaatgaattatatacaaaactctgagacaatatataatacattctgataaaattaataaaatagaagagactttaaagttcgttgatcgaaacatagagcaaataaaatagaaatattatatatatat

SEQ ID NO: 219955 - DNA, 3787 bp, Cannabis indica
atcctataattttttttaggtgttttaaaatataataatatatagcactccagatgcctaatatatacatcaatattattttttttgctgcaataaatgtatattatcattatatgaattataaacaacaaattatttattatatgtaagaaagagataagagacaaattattttgtccgcacagcgcggataagatcttacctaacaattatgcatgcaattacgtgttgtttttagtcatttataattaaactgcaattacgtgttcgagttttctctttttggggatttcttttctttctttttctttgcaatcaatcttttaggggacttaggtataggtacgtttgagttgcttcttatctgttgatttatttagagcattttgcaggtggtgtcttgtaattagtacggagtattctataatatttaaaaatttaagaatacatatatatagttacataatattttctttttacaaactacacgacaacaacaaaataaaactcaaaatgcaatcagatcgaaaccatttaggttgtactgccacgatatgtacaatttttgctaagccccaactcactgcccctccacataggcggacctaggggtcttgagagagggctaaagcccactctgagatttaaaaatatattaatatacaaatgttatttttatgtatacatagcagttaaatagaacaattggttaaaattctttaaatttacatgaaagaccatgttttgaattttcttgcttattttttttctacgtgtatctacactttatttattaaaccactagaataggggatgctgctaaactattattccacttaaatttagctagttatttattattttagattatattaaatgtataactaagcccaccctaaaattcaatcatgggttcgccgcagcttagttttacttttacctacacaaggtaacaaactgatgagtcgacagacgcaccgactttatgcttaagctgacctgagcccaaatgctaggctcaccaaatggttaagaacgttctcaacggaagtacgaccactataccatatgcactagagtattgactctgtattattgtacttccaggagttatactgagtgttttaccacatgcactccgtaccccctggtactcgtgttggtaatactacaactaccctaaaaccctagactatactaacacccttcaaactacatttttgtcagtgttagtagtgtaaacaaataataacatgctttcattcacatatatatacttcatcctatcttacctcgttttcgtgttcaggtgtgtcggtcagcctgaatggagtagcagctcgatgttttacaggaccctaaatcataacattcataaaattgatgagagacacgttaaaacacttatcgcggacttagaatcaaaactaaagatatccctatcgatgaataacatggcaatacccttttatatcacaaaaacgagaaaaactagggttggcaaaattgccccaactggtagaccggttcctcagccgaaatttcagtttggtgggatttcctagggaccaaccggtcgaccgattgctacaagtccccctgaactggaattccagttcagtgcagggaaatccaaaatcgaccccaacaccacaattcaatcccaaactttccaaaaaactctagaacacctgtataaaccatagacccaattcaaataatagaatttaacaattcacactaaatctcatttcaccattggagagcaaggtttgagttcttaaactcaaactttgcttaaacatcgcaacaatcaataaatccaacccaaatcaacttaaacaactttaaataaacttcagaattttgactcaaacatcaattatcaccacagtaccttaatttccaaaatcatgcatctaaacctaatttaagctaaagggtatcaaagagaagcaagctagggtatcatgccttgtattaaaggaccaaataggaaaacactacctatctcgacagtttcaggtgtggagattgctcaaaccctagatgacatactattatctcgacaattcaaggtaaaactatcgagatctcttatcctatctcgatgattttcaatcaccatttttgatcatgaccttatcgaggcggtcaaatcatcagcagtcaataatcgccgagataggtctattacgagggttcttaacccccgagataagataattttcttgtagtaatgccatctagtatatttgtcaattaatattcaagcattataataaggttcccaatactataaaatgtgtgacgttttataagtgtttaaggattatttatatcatttattacattatgtaaaattaaatattaaattatacttataataatgtaataatataatgattgctataaacactacaagaaatgtcacgcgcttttcattttatgctagcaaaagttctaataccaacattaatttgccaacctccttttaccaacacatcataggtaaattctattttaccagcacaaaaatgtgctggtaaaagtgacatttcttgtagtgaaagtatcagtagtgcttaatacctttagacatgtcgccttgttattgactaacgatattctttaaaaattattacattaaattatatcacacccactaattagtttaaccaatagtaatattaaaacatagaaaaattttaaatactactattggtttttagcatttctttattgtaatacacgctaattaattaaagtagtcaaaagatgccatcgtgatcattaaagtagttctaataaaaataaaactgagagattgaataattaattctgtcacatcaaatagattattgaaagaggacatagctcaattatgagcttcagaaaaatctagcacagaatatatacatggatattcctttccctttcccatatatttgatcataagggtgtttgtggtacaagtggtactgttgtaattttttttttaattcaaatcgtatatgcagcttttataattttttaaactataatagtactgtaagatcttaaaactactaaaattacaccgtaaaaatttggtgcggtttgagcagttatctttattatccaacattataataaaaatttaaaaatcaatctaataaaattttaacaatacaaaaaacaaatatcttattaaagttttaacatcataacatatatactattcattatattgaattgtctctagaaaataatatattatacacatatattacatatgtatttgttcttttagaaaaaaaatgaaaatcatattttaaaaattgataactttataatatacagtgcagtaggatttaaaccacaattattaaatttaaaaacgcaccgcgcaatttgataaaaatgcaaactacaaccatactgcaaaagatttaaaactgtattttttataaagtacgatgcagtgcagacgtacgatttatgtggtgtgagcggtttgatgatcttatcaaagtattaaaatataattatgcatgtataatatagtgaatgatttaattttaatcaatgatcttaatgaaaatttacctttttagtcatataaataattaggtatcaatagctatatatataatttatcttcatatatagtaactaacacttaactataaaaaccaatattaatttttttaaaaaaatatttgaagttttaaaaatttgagaaaaatgaatataaattttaaaaatattaaaattgaacaaactcctaatattaaaaataacaata

SEQ ID NO: 219956 - DNA, 4028 bp, Cannabis indica
tttttcacattctcttatttttatatattaaaaggaaatatatatcacgtacagatacatacctttgagggtatatactatattttaataccaaagagtatgtaacaaaatttattctttattatctgattttattttaaaatattaaaagcccattccgaggatacttttgtcattttcttatttttgccatatgtatggaaccaaaggaaacttcacgtgggtcccacacgagaccatggaatctgagtggtgaatgacttgccaccgccataccaattaaacgatcacgattttattattttttttatttacaatcaaatcccaacaaaaaccttcacttctttttttgaaggatttaaggaaaatggctttgagaaatgttgaatttaccaaattgacacttttaattttcaatatttatttaactaaagataatatcatctggaagaagtagttgatacagttgggcttaccaaaaggagtggttggtttcctatcgttgatgaaatatcaaacggctttgattgcaaaacgatggtaagaaataaaaataaataaaaagacaaaaagtgatactataataagaagcaaagaataaaataatagaccaaaaatatgagaggcgccattttgttgaacaatatgctctttttgtgtttaatcaaactcaattcatttaagaccgaaactaaacccagctcagaaatatgacacgtggagggtattattgtaatttcacatggctcaattaatttaatgttcgtacacgagtgcaagaaaactttaacatattctcggtttcacattcatttaaaagtaccaaaagggaaaaaagactcatgacttgaaaaaaaaaaaaaggaaagacgaagaatttatatcaattttcccaaacaacttgtgtatttgtttgcatttcacattgtttttgcagaattatctctctgatatttcccactcttctttatttttttttcagaaaatattttcattatatcatcatatgtattaattttgttttcttcagttttatatctttgctccttgatcacgccctttgttggggaattttcctttttctttttgtttttcgttttcgtttttatttattttttccctgagagattttgtggtgctttgctctgatttgttcgaaagattcgaaaacttttgtgggttttgattattgagactgcaaaaaaggctctctgtgcttaccgatgccagatactcggcaacctcagaagaatgctgttccaaatcaatccgatggtaacattgaaggtgacacctatttttgtgttctcttttgggtgttttagagatctgaagatgaatttttgtgggaacatatatgatattggggttcttaaatatgatgatcatggttactttatttatttattattgtttttttacgaaatcgcaatgtgtgtaaattgttctaagttagaaattattgatttacttctgcctttttgtggataatgctatctgggttttggtttttaacaattttggtgttgtagctggaatgcatcataataagggttgattagaaacgcttcttttttcattaagttctgttgaagatttctggataggtttggcgatgatacaaatgatccttgatgatttgttggtttcttcttttggagaactttattggttgatctaatgtatgtgagggtttttaagacttgttttattctcttcaaaagtaatattttaaacctcttctggacatatatcatttgggtttatgtgtgtttttactttctgtggaacgtgtaaggtagatgatggagagatcccactgagatatctggtagcatggtctgagttttgatttcaatgtgtttttggcaatttatgttatgctgaaggtggtgtttaacagatttattaaaaattgttgcaatgtgtattgctcttatgcattgtagaagcaatatggcggctaaaaatcaatgatagtcaagaagtgggtggtttggctcaatcaaacccattcccggaccgtcctggtgagccagattgcatatattatttgaggactggatcatgtggttatggcaataactgtcggttcaatcaccctgcttatgctccacaggtaactaaaaattgtcttttattctatagtacttcttccaccactttgaagtgcaatcatgttttgattctgtgactggcatttttgttctcactacttctcaactgttgtgctttaaaacgcttaagggatcaaacatttgactggtttaatcccgaatacattatgaggctcagtacaatggagagcttcctgaaagagttggacagcctgactgtggggtaagattttctgcaaggttcctgaaatggatttattttcttccttcttttacatattctcgtcttatttttatatgaaatctagtgtctggaattcttgaagaaaaggaaacaaagttgatggattgaggtgctatctgtaattttttattgattattgatgtaatttttgtgggaagtgggaaaaattgtttagttgacatagcacatgcttattagatatttctgattttctagtcagttgtttcacaaaaagggtagtagtgtggtatgatactctgatgcttattcttcctgcactttggtggggattgacattatttgtttcattatcaccatctgtttcattatggttaaggttttttcaagttgttacataagtgttttgggttcatgatctctatttactttctctccctctacagtctgcatttaatattatattattgtttttttgtatttcttcttgttgttgaaggcctcatgccaatttaaagtttttctacaatgatattcaatggatagttttcaaaggttacccaaataatttgtcattcttagttgttagcagagggtcccacctgatcctgaatatgataccaatcattgtccatttttgtgcttgcttaatgtttatgggaatctttgtacgctaacattgttcacttcaaatacattatttttcaaatagtattttctgaagactgggacttgcaaatatgggtctacctgtaagtttcatcacccaagagacaggcgtggtgctggaccagtttcattcaacatgttaggtctccccatgcgacaggtcatctatgtcctattattgttttactgctgatataattttatttgctgccatgctactctcatatgtgtttttcaaatttaaaacaattttaaattaattgcctccaggaagaaaaatcttgtccatattatgtgcgaaccggagcttgtaagtttgggcctgcatgcaagtttcatcatccccagcctgcatcccatggaactgcatttcctgttgctcctcctgcttatggatcagcgggctccacaatgcttccatcttcaaatctaccatatgctagtggacttcctgctgcatggtcattgccaagagttccttatatttctggtccacaacctcaaccaccaccttatatgcctgttgttgtctctccttctcaaggaattctatctggaggagtttggaacacctatgtggtcagtatttgctccctaattatcaagctaatttaattgtatatatatgttccctgaccacccataaatgcaatgggtctctattctggttcttcttgtctgtcatttcttttatgcatagtttcggaactgaaatctcttgatctcaacattgtaactagcatggttgcaccatatgagtattctaggcaatataccattgtttcagcttatttttagagttctgctataagcacgcttttgaacacaccatgttgttgaatattttattttatcttcgaagatacttttgagtctttgactggttatttgtcatatgctttggaaagtagttccagaacgtctatacctctaaacaattttagggattaatttactgatgactgagattactggtttgctcctcaaaatataagtgtttgttattatttgtgagttttccatcaagtagatattgtaac

SEQ ID NO: 219957 - DNA, 2946 bp, Cannabis indica
taaaataatttccaacatatattccatcttgttactcattttatcagcctctggtgtaagatggttggtagctccgttgtcggtgtaccaactatcatcgtgaagagtttgtggggttactacaagagctaccaactgagcttatctatcctgttgctgattgttttcagcctgtggtggttgtcccatgtacccttcatcataccgattatcacacgatgtagaagagtgtccgaatttcccacaaacttgacaagtgggcttcaagttgccacggccaccagatatgcctctaccacgagtattgccaccatagttgttacctcctctaccaccagattgatttccttggtattagagttgcttccatagtttctgccagagtagttattatggctaccaccacgactcggatatcctcctctgtttggtgaacttgagggtttctgtgcaaaagcagctgaaggatttccaagatttttgctagtgggtgagacagcccccaactgttcaagttcattgtcgaaactgagtaagaaaccctgtaactcctgccaagtgagatcagtacggtgttcaagcaagagaacaatagataaatattcaatacctaacctagacaaaacattggatatcaagtgtttttctgggtatgggtctccagcaagagcaagagagttagcccacactctcttttgtctgagataatccaccattggttgagctcctttctgaacggttttcaatttggtgcgtaaatcatccatgtttgccttcgagtgtgctccataaagttcttctaaagctgtccacaaagcaccagtagatttacttcccattacctctgatgcaattccttctgacatagatccatacaaccaacccatcaaaagctggtcatggacaatccaagactcatagtctggatttagaaagtctctgttgtaacttcttcattctagtttgtctcgactgtgataaactcagatggacagagtttttgaccattaaggtacccttcaagtctgtgacctcgtattatggtgaacaccattgtttcccacaaaagaaaattactctgatccagcttaagagagaaaggttggcttagagtgttactgaaaggagcaaccaacataggagcagtagccattgttgagcttgactgtgccatggagcttgcttgcgagtttccagtagctgcttttgcaggtgagggttgagttgtttgactttactcagtcgacatggtggaaggccttgaaaaggctctgataccaagttaaatttggagagaaaagaaattggaaaactcaactcaatatgagtgagtgcagcagctttcattatataggcaattggtgaatacaggggaatattacaagccaataaagatacaccacgtggtgaataaaggggcacagaatacaatgcctaacaaaaagttgttacagaaaaggattacagaataaaccttgagattccctcattcactcggtcccacttctcctcagctactcctctgttgattcataagttgcatcatcaaattctttaacaacatggtaatcttctttcttaaagagaggtgtctcgagaagagtgtggttccaaagcattctttaagaagtaatttttttagcaagtagtcaaatatattctatatctaaggaggagagttgctttttttgaaggacaatttcgagcagcccttctctttagtttccttgttgattgatcaaatcagatcttatcatagttctgccaacattttctgaagtgtcatttcgagattgtcatgtgacgtcttttcttcattatgcgactaaatgagtcttatttaatttttcatctattgttttgtacatgtatatgcgatcagacacatttatataattgctcgaaaaatagatataacacatgctctaaaatattgttgtatattttaatatattaaaatataatatttaaatgatgtagaggataaaataaagaagtttatgtatagtataatatatatacgtgtgaggtaaaataaaaaaagttaaatttttatgatatattttaaaaaaatagagtagtgaaaatattaaaagtactctaataataatattcattgtttgtgtttttcctttttaataatacgtggaaaatatagattatattttccaatttatttttattttattttttcgtatacatctcattgtgaggatgtgaagcactttttggttgagtctcacatgattaaggcagttgttgattaattttaaaacaaaatatttttacctttaataagttcactttttcaattatgttgacattattactcattttggaaaaaaaatattaataataatatatgtgactttaggctatttgcccatgttagtgggtatgataataagttatatacaaaaagttttatgcttttttttttgccaactaaaaagagcattaaaactctgtctcaacactcttagttcatgtttgggttatgggaatgaagtttgtaatggaattaaagttgtcattgtttgcttttttttttttgaataaaagcgtttataattgtcattgtttgctttgtttatgaattccttgtaatacttttttatggtaatttttgtttaagtactttggaatagatcatacacccatgtgatgagttttacattattaaaaaaataataaatggaagtaaaatgacatttgtacgtattttcttaaaattaaaactattaattaattgataaatgaatatttttgtcaatatagggaatgatttcgtatattattttttaattttttttaaattcataatttgggttgctctagtagttgttccgaacttctggtagttttaatgtggattactatataaattttggttgtgatttaaattgattcgttaattgctatgtgaatttttgtaaaaatacaaaa

SEQ ID NO: 219958 - DNA, 1682 bp, Cannabis indica
aataaatacttaaattaatttttgtgataataatatttaaattatttatttaaaattggaagttaatttatatcataaattcctcgtataaatattgtctctcacaaggtgtccttatctttttttcttttattttttatttatttttttcaagtagaatttggcacaggcagatttccaattctctcctctctgtttttttttccaaataaaaaagtagaagaattaattaattacaggagaaaagaaaacaaaaaataaagaactgagctaacgtcaggagttacgatttcattggttccaatatttcttttgatattaaaagaaaaatatcttttttccttctcgtttttttggtttattaaattgtagaagttaatttatatagccatgatgagaatgagaaaaagattttctttgcttctgaataagtaaatacgagaagaaaaataaataaataaagaaagagagaaactttgaactgaggcccacgaattatggtatcactggttttgagtttaattgaagtatgctgtccaatttttctagttgacagctcgaacgacactaacttctaggacattcactcgtatacgtgtatgcatttcaatatctatactatacaaccatataatactctaatataaataaatatacaagactaaatttataagcttttatttattttagtttttctattttgaaagggattttacattttagttgtttcttattttcaatgattttatcaacagaactaggtttcctaatacgtacaatgggcagactaaaaggcatactctcagatcatatttctccatgattttctttttttctctttcttctttcattgttgattatttacaacactgccatcgttaaaatataaacaaatcataaagaccatcttacagtttattatctgacaaaaaaaggttatgaaatgttaaattagtgttactcgagcgttactacgtgctttattttccataaaatgtcaaattaaggccgagaagagaagaaagttttggatgtgtcaatatccaaaaaacaatttctgcctaaacaaaaaaaaaaatatacctttctctatcaaagtgaaatcacgtttctatacaaggatctacaatagtagggtatcaataaagatagtaaaagagttttcagtttatttgtttgtggtcctcagaggggaactctaattattatattaaaaacaaaatatgaggctaaatttccgattgaagaagagctttccaactttctctttggccttaagtaatctgaatagaaaaccgtgaacataatttgggaaatcttatacctttataatgacatagtagaagaaaacactatccaaaatcagagtataaatataagaaatgatagttaaagcatgaaatgaaatcctctgtgatcctaatttttcaattaaaagtttctttaaaagaacaagttcattatactaaacgaaagaagtgagattaaaagggacaatgcccaaccatcagttctaggcatggaggctaaattgtcctcatcagttaaattgaatggcactatgatagggtaaaattttccaaagaaagatagttgcctttgccactataaattatgaatggcacggacaattttcattaaataaagttaattaaggattcattattatcatgaaggtttta

SEQ ID NO: 219959 - DNA, 1679 bp, Cannabis indica
aatgcttgtagtaatgaattaagattatgagcaaacagtggataaaagactagacaaaacaggcaaaactgatacaactaaagtaagatggaacattcccaatcactacataagtcagagaaagggatatctttgaattctttagcattaaatagccatacagccatccgatatgcaatcatttcacatgtttgaaggcaataagtgactggacataattcatttgcattttgtattccttcagctgctaatacttatgcttgatcagcaattattgaagtaaaattaaactattacattcttgaatcagataccaaatgtgtagctttgcatatgcatgcaggccatgtgaaaattttacatttattctctattggagagttaggtctaatatagaagatcagttagccatgctcatgtgtagaactttcaactcttttcttatttcatattcaaagaaaagtgtcagtgaacaaagtagcccaagaatgccctgcattttcatgttaaaattgttagcagtgttaattaaaccttggcatgttatgtaagaacctcaaaagtattaattatcacaaaaatatttattaataatgcatttgaaactattactttttcatttgaatttgcagttttattgacaatgcatataatgaaggcgtacccgtggtcatactaaccgcttactgtaaaaatgctgatgacgttgctaggtaagtttggtacatgccttaagtgctggatacatggaagcaaaatgcagttagactctagcacatcattgtctttgctacagattactgaattttcttttaaagtttcagcaatagcttctgataaatacccaatttggtataacctatgctaggcgtaggtagtagtagtgaggggggctatgtatggaaagtttgaattaaatgggaatatcttttgttatctgtttagttttggaatatccgagattaaactttttgagattattctgtattgaggcttgatcctttggggagaaactaagaggttgtttgactgtattttcagttttcagaattctgttttattaagtgacaatagaaaatagtttttggtcattttaaaaatttaatggtatttgactcaagttttttaaaactatttttaggttttttttactaaaaaaaattaaatattctacaccataccatgacatgaactcatcctacctcagaccggacccctgacctggactccgaatcggaccaggacctcggaccctagagccagaccccaacctcggaccctaaccctgaactcggactcggggctaggttcggggtccggggccagggtctgggtccggggtttgggtcggggtctgggtccggggtccgggccggggtccgagtccaggtccaagttcgggtcgggtccagatccaagtctggggtccgagtccatgtcggggtccgggtccgaccatgtcgggggtcgggttcggtttcggagttcggttcccagtccgtattgagggtccgggtatgtaagcaaaaatgtaaaatataatatgttagaccaaaaaataattgtttttgaaaatagaaaattacattttgatgtaatctgtttttaaaaaacttggccaaacgacccctattagtttttaaaagttattttctgttttaaaaactgaaaataatttt

SEQ ID NO: 219960 - DNA, 3324 bp, Cannabis indica
tttgttcgtgaaaaaattcaacaaggcctgatctccacaggatacatgaagaccggagaacaaataggagatatttttacaaaagctttgaatggggtgcgagttgattatttttgtaacaagctgggcatgattaacatctatgctccagcttgagggggagtgttagaatattagttgtaaaaattagaataaatcgtatttagtagtttttcatttagtctcctagctttgtatataaatatatactattctatggaatacaacacacaattctattcacaattctctaccattaacattaattgaacgttcagttttcacctacattcttctccaagcactaaatcaagcaccagaacattacatagtgacataattcacaccaactactgacacagccatattgacatgatgtacaaactgacaaacctgggtatcattggcttctgatccactgttcgtaaaaaaagcttttgccattttgcttgctgtaaaagtttctaagagttccttggctagatcctgtaagatgaaataataactcagtatcatgcaaagagcatgtaaaaaaaagtacaaagaaaagtaatttctattttaatataaacaactaaatgaataataatgttccaaagtatatcttagaaaatttgactatcgaaagggtgtgtaactgtaactatattggtacaggattgtagttgtaattttgacccaaaaaaaagcttttccgatttatttttttttaaaaaaaaaaaacaagtaaatgacatgaacatgtaaagtgaatggataccaatgaaggttttgttgtacgattccagaaggagtggtaaaaaggcaaggtattcaactgtttggttgcagcagcaacaagtcgaggttcatttccccctgtaaatatctcagattagtaaatacaataaaatgtgtagcaatcaaaagcattgaaagtaaaaaaaagaatatctatatcaataatctaattaaaaaacaacactgaagcaaataacaagccaagaaatagaaaatgtcaacaaacataggcaaacctaatgctgtgcaccaaagaccagcaagtgcatcaagatacttctttccattagagtcataaacataggaaccctgaaaccataatgaagtaagttatagattttaacaagacaaacagctccagaatagttatggcatatgaacttttattgtaaaggataactttatgaagttcacctcagatttttctatgatcaaaggatgcacgtcagaagactgccacccagcagtgaaaggtgcaagcatatcatggcctttgaacctgaaaaatccaaaaacgttaaactacgcacactggttcagaaattgtgtctaagcatgcacatttaaatagatacaaacttataacaaagaaaaattaatgaagcatctgttacccttcaattccacttttcagatcagttgccgaatcttccttttggacagatgcatcagtgctgtgatgtcgggcgaatgaggaaacctgaagagtacggtcctgcagaagtctagaagcaacagcatatttcgtgcacgaaccaagctgaacgaatacaaaccggattaattggtaacagaaagaaatcttggatgagcagcagtaaagcacagtagctaaaacagagagaagttagtagagcttgcctattcatgtttttgtattgctatttacatatgttatactacataaaagatcacatgcacttaatacccttatgaatcaagccactatagaaacgttgatgtcatccaagcatgacatgcgccataatttatctaagcaagacatgcttaatttctgaagcattcgtgtaagaaaaatctaatttttaataaatggtcaattaaacattatagaaccactcatttcagggcaacttgatttgttattatgtcaaagaaaaattaatgtaagacttaaatgtttgactttcacaagatgcaaatatcatggcgatggtatcttgagacctaaaaaaagacccagagatagttcaacgcaaaaattaggtaatggaacaaaaccaataaaagcacggcttacacacattttctttttcccattttcacctatatttttcttcttagcatctaaacaaaaaagttgagtaccttttagaaccaaatcaacatagatctatagcaagatgtgcaaaagcactttgacctcaaaagaactatttaaatattatcgacaacagcaatgatctataatcagataccatgcaacaatgtgaaaaagaacaggaagaaaagtcaaatgagataacagaatttcaagcttttccatcttaggagcaaaacaacagtgtgtaaaagttaaaaaaataataaaaaatggccaaaagaaaagtttattagaggaatatttagaagaatctaaacacagaaattgatccatagggaaaacaaacaaaggtcgaaattcaacagaaaatccaaacaaatcaattgaaaaaagaagaagaataagagtacctgagttctaaggttggatcgaagaagagtactgatacgattcattgtgtgggattgtccttctcagctgcacaaatcagaaactgaaaggagtggcttcccagactacctcactttatatgctatttttttaattataatgtaattatttattattattataattatttaaattgaatagaatagtcttaccttttcaaaaaaaaaaaaaagaaaaatagaatagtcttgtatatttatcctaatgacgtatcactgactacccaaacgtgtacactgtcaatttttatcatacaagtacacaattcatatcattcattttcattttttatacattgtctaatacatttttatttctattattgttgtaggtatttaattttggtgggaaagatcaaagatgggtagaatttgttagtttgtttcttttgttactttttcagattttagccttcttttatctagctttttttaaaggcaatattagttagcttttctaaggcattttcgcacgtgatgtgttttattagattattgtccgctaaaagcatttctaatagtagtattcttaaatatgttaaaaatttacacatcatctccaatgccaaagtatgaatctatgcttgagaattgagagcctacttcaaatgcttgagaaatttcttctaatgctagtcgtgtgcgtgcggctaaaacgtttattcttttaagtaaacattttgtacctatttaactcaaagaatatcatgttagacttttaattgggcttacattaaattttattggttttattaaaacttgggttgattg

SEQ ID NO: 219961 - DNA, 3542 bp, Cannabis indica
caatcgtagaaggtaagctttatcgaagaagctatttcatgccacgtattactagaaaaagccaaaagcatcataaaagaaatacatgaaggtttctgtgaggaccatgctggatggaaaagtttatccaagattataattcgacaaggatactactggccaactattaataaagatactcacgagttcatgaagaagtgtgacaaatgtcagagattctctcatatccctcgaacatctccaacaaaactttgaatgatgaacttaccttatccctttacattttagggaatagatctaattttcattaccaaaaaggcgaggaagagctaaatatgcagtagttgcggttgatttcttcacaaaatggacaaatttgaacctttagtctctatcattttgaagaaagtcgtagactttgtaatgaaaaacataatttgtcagtttgaaatacccattaagatagtgttggataatggaactcaatttgacagtgatctattcacaaagtcttatgagtggaacaagatcacaaaaagtttctcatctatgtctcggccgcagacaggtagaggcagcaaacaaaaatcttaaaaacattataaaaaagaagcttggtgcaaaacaagaagcttggtgcaaaaaaaagaagatggataggcgagttaccacaagttctttgggcccattagacaactaaaaaaaatagcaataaggcacacttcgttctcgctagcatatggcttggagtcaatgctaccaatagaagtgaatatcgtgacttagagacgtgaattctatgatcaggataaaaaccaagaattgttgatggaatccttggacctgctcaaagaaaatcaaatcgagtcgtaaatacgcaatgcaaagtatcagtaaaaaatcacgaggcattttaataaaaaaaaagtctacgagagactctttaatatcagtgatttagtattgcgatgagtattcatcaatatgaaagattctatagctggagtgtttaattgaaattgggaagattcttatataatagaagctgtgataggaccaagagtgtataaattggcttggccaaatgacttgctagttaaaaatacttagaacaacaaacatttgcaaccttattaccaattattaaatttcttttaagtaatttttaaattacaagattttgtaatatgtttcatattaatagaatctatatctttcatttctcaagtaatcataaagtctttactttaaaattatttgggggcatattattgataattaaccaaacttgcataaccatattatttatggggctaatggttaaaatgttaatataaaaagaccaacaaaatatatttttaaaagataataaatggcatctgtaaattaatattttttgcttccatcttctcaaattttttaatatttttcctcaaatttttcagttgatttatataacaaaaccatgaacacatcattcttagagccatatgtcgaggagagcattaaattttttgagaagatggaagcagaagagaagggcatgccgactgaagaatttgtccaagagatagaagccaaggatgatgatgaaacaaaagtcgctgcttctaagcctctacaaaaggaagcttagtttttattttattttgtcaattttaagaaaatggccttcgagccaagacaaattacttggttatttcttgaccattttttattatgtaattaattttacctagttagatgccaattcagttatttatatttaaatatattaacttatatgcatattttcactttatacatgcttcttaaaatatgttttccactttacttgtataaaacttaggtgagttatgccaaaaacaattcacggcttaatcatttctatgaagcactaatgatttaaatctttacgtcattcatatggtatctcaaatttattactcattttccatcaagtaataaaataagtgtaaacatctcatacaactatttcaattttttttgatgtatttgttttaaatatgcaagcaatttgttcttttgttcacacttagcttttgtactattatcaaaattgaccttggaaatctcgttatgataactgctacttattattttttgtttaaagataagatacatacatcaagaataaatactgatgatattttattaatttttcaaaaaaatattttgctagtatttttatattaatattttaacccttagccccataaataatatggttatgaaaatttggttagttatcaataatatgctctcaattaattttaaagtaaagactttatgattgcttcagaaatgaaaggtatagattccataaatatgaaacatattacataatttcataattaaaaaattacttaaaagcactttaatcactggtaataaggtcacaaatgcttgttgttccaagtattttttactagtgatccatttagctaagccaatttatacactcctggtcttattaaaactctattatataaggacctttctaatttggattaaacactccaactgtaggatcttgcatactgttgaatactcattgcaagactaaatcactgatattaaagagtctctcgcagattcttttattaaaatacctcgtgatttttagttgatatgttgcattgcgtatttgtgactcggtacatttttcttcgagcaggtctaaggattccatcaacaattcttagttttttcctaatcatataattcacatttgtcggtcgcaatattcacttttactaggagcactgcctcagagccaaatgttagtgagaatagagtgtgccctgttactgtcttttcagttgtttgatgggcctaaagcacttgtagtaactcgtttaaccatcttccttttgctgtgttgagctacttcttgatagtgtctttgagagttttgtttactgtctccaactggccattagcgtgcgcccgagacacaaatgagaaactttttatgatcttgttcctctcgtaaaactatgtgaatagatcactgtcaaattgagttccattatcccagactcttaatgggtattctaaattgacaaattatgttcttcatcacaaagtctatgactttcttcaaagtgatagagactaaaggttaaagttctgtccattttgtgaagaaattgaccgcaactactgcatattatgctcatcctcgccttgttggtaatgaactaattagatttattccctaaaagaaaaagggataagacaaggtcatcattcaaagttttactagatgtgttcaagggatatgcaagaatctctgacatttcttacactttttcatgaactcatgagtatctttattaatggttggccagtagtaaccttgtcgaattattttctttgataaaatttgccatctagcatggtctccacagaaaccttcatgtatttcttttatgattcttttggcttcttctagtaatacacactgtaatagtggcatggaatagcttcttgtcaataaagcttaccttctacgattg

SEQ ID NO: 219962 - DNA, 2586 bp, Cannabis indica
ttacggagaattgtattgagttccatgccgtgtatttatgaattttagcatctttatgtcttatgcctgacaatagtgaaaatcgacgacttagccaatagtgtcacttaaatacagtttagtatcttagaattagtagaacagtaaaaatatcggagtgatgcagaatattggattatgacaattttacccctaattttagagataacttacaagctaagtaaagggtatttttgtaattttccaaattaagttatatttggataatccttagtggattttgtagtaattaaaggaataaactaatttatgctaaatgttttaagagattgcaaaataaacttaactaaataaatcaatctctctctctctccttgtttttcctctttagaccatagctaaaaaccaaaggaaatcatgaagttcaaacccaatttatcctttggaacaaggatttcagttagatttgaaagttattagccaatttaaggtgaaactctaagctcactattctttatgaattttaagaagaaattttggtttctatgcttgattttatgaattcgtttctatatcaatttgagggattaaaattagctttggagcttattttatgattgttcttagtttgtttttgagactggtagtggttgttgtagttggaaccaagttttgagtttcgaaaactcaaagcttggtctacaatagtggtttttcattcaggaccttatgattgcttttgactgttgaaatatgtttagaacttgattatagagtgttctgtaaagtttgagcaaatttggggtagatttgagaaagataagtttgagtttgggttttctgctatgaaacggtccactatttttgtagaaacagtgaatcatttccctaggcaggccttaaaaaaatagtgaactatttgggaatccgtttcacaaatttgggtgatttttgagtacatgtgtttttcgtattttcttgatattttaggtattttcacgctatatatcaatagagcaacttttagttttgattttaagtccccaaaagtattttaatgagacacttaccaggttttcgtaattgtgatttagggaatctgaccatcgagaaatgtttccacccagtttagccaacacacttgattatagaattgaggtaagatttgtatagagcacacatatatgcacatgtttggcatgcatgtttttgtttgccattagattaacatatcacagtattggtgatgtgtacgtagagttacactgagataccgacagatgtatgttaggaaaaatataaagccatcagattaacatataagggtattaatgatgtgtacatatagttgtactgagattttgacagatatatgctaggctttcagaaagtacgaactaatgctaccaacacttgtacgcctagagtactgagtgcatgtggattatggttaaccatactttagttaagaatgttcaagactgagttttagacttgtgagtaggtgtatgggtgcatagttataagtcgattgtatgtttatgttttatatttttcattgagtttgtcgattcacaaatttattttcatgtataggtaaaggctagggttggacaacagtgagtattggagcttagtgatatttttgttatgttcacatttaaaaaattgatttcgggatctcaaattttgtaaacagtttacatttacaatgtttatctatgagaatattttattataataaagttttaattaaatacaattttatatcaagccctttgattagcaaaggttagcacattataatactgtagcatatctaaactagtagggcaatataatttggtattagagtcgtcaagttattcttcgaagatctttgagatatgtacaaatcatcatcaaagacaagctcgattcacatcttagtaagtctttacatgttttagtagctttaatcagataagcatgattagaaaagcatgataggaagcatgacagtagaattcttatgttaagcatatgcgataaatattgattctaatacttaacataataattctattagtttattttaagtaaaatagcataataaaatacaaaaaattgggtgaaaggggtgcataacatgattttagtatagaaaataacattttttggagaaccagttcaaaacgtttaaagtttttcatatgcatagtttcggccttctcttattttgtccattcattttgtactttcacttattgtttcattgtattggtctccaaaaattatatgaaaataagtggtcacattgcagaattggttaagaaatgaaaaaattatatcatttcaaacctattaactgccctctactaacttaattttctacaccccataattttgatcattctcttatttaaaccattctttttctcatcatttcattgcatctaacttgtttttttttattctataagaatttcagtacaaagttccgttatgatatctcgtacacacatcatcatttggtataaggtatatgtttataagaagaatatttttttttcatatttagataaccattaaataattaaagtaatt

SEQ ID NO: 219963 - DNA, 1931 bp, Cannabis indica
tattattaactttttttttctttgatgagacaataaatccaaattttcttatgaggattactaataatttgtatctgaattaatgtatttttgatgagggaagatcttaaacacatcagactacaatatagttggatcattggttactacattggaagtaagagtgatggccataagctcagaactaatttatttgggatgcaaaaaaggaagtgtggaaatttggaatagggagaagttgaacagaatagacacactacaaactggttcaaattgcagagttctttgcatggctcttgattctactgaagaagtcttggtgtttggtacttccgacggtcaaattcaggtaaattttatgaatcatatcctcaacactacatgttatgatgatgattgcttttccacttgtacagatttttcaaaaaagaaataaaaaaaatactaatttgcctctcttcaaaattaaataaagaacaaatgattgaagagactccatattattgtttctttctttggaaataaaaatcaatttttatattttatattttctttacttttgttggtttgcaggcatggggattaagctagctaaaaatagaggatgttgcaaattttggataaaaagtcatcattttttcttgtagagttgataaagatatgatattcatttgattatttatttgtttgagaacaactagtgaaaatgtaaatagcatatacaaattacaaagtaccaaagaataacgtactttatgcatcgtatataccaagtacaacttaagtacaacataagcctatagaaaacacatcacagatcaattatcattcctatttttctgtcttctccttccttaaataagggtcagtgcagttagatttttcaatattaataaaataaattaatgtcttaaaattattgtatctttcagatttgcttgattagtcaagaggtacataacattgattctgaaatggtaaccattttaattagaacaatgcaaaagtggtacaaaagtgtttttaatttcatactaaatttttaaattttctcctatgcgcacatgatgtcaaatgtactaaatgccattactattgttttttatcgtcaaatattattagcactaatctttacaataattatgtttggttcattttttttttttttttttttgacgaggtaactccaacaaagaagttacagaactggaacagaaccattccagcatttctccttgtctagccctaaagccttccttgccaagcagtgagcattccgattaaaacttcgagcaatgtatcgaatggaagctgtagggaagtaagacaaagagagtctaatgtcctgaataacatcagagatagcagagaggtctgactttgcacttcgaattttgtccactaaaactttcgagtctgtctctataaccgccaatgggattttaatgttgtaacaccagagaagacttgatcgaagggataaggcctcagccattaaagggttgacattgccaggaactggagtagagaggcctgctacaattctatttttccaatccctgataactgctccaaagcctagcttacctgattgcacatcctttgctgcattagtattgagtcgatataagccttgggaaagtctgctactgctatattgttgtgaagaagagggctgcagagctaaagcagactgcttttttaattgagcatcctgaaaatctgtgaaaaaagcactagcccaagaaacaacatcattaggaagcataaaaaaaccagcaaataattttctgttcctattgtgccaaatagcccagaggagtcccaagaaatgcataaggtcctttttgggtagatcagtgagagcagtaaccaaaaaccatttgatatcttggtgacgattggaaagaaaaaaggatctaaaaggtgat

SEQ ID NO: 219964 - DNA, 2966 bp, Cannabis indica
taaaatgcacctatattaccaacaaataaataattatatcatgcactcaaaaaattgagaaactaattttcgggtaaataaactaaacatataagaaaaatctcaataaaaataataaaaattaaaaacattatataaaatttaaataaaaactactttacttttgtaagacacaaaaaaaaatctcatgtttgaaataatttctacaaaatcaatcaaaattaaatgagaacacacaattccatcacaaaatatatatatatatatatagctacattagaattacctaaaaacccataaaaaaatatgtattcactatgtttttttagaaacatctagtataataaaaaaaacaaacaaaataagaataaaaaaaaagcactatcaacaaaaatcatacaacaaatacatccaaaaatcatataagcatcagattcactatcaaaagatggaaaagttttttcgcctgtacggataaaatgacatagtcttactctatatatacatacatatatgtataaatttagatatatatatatatacataaactaatattttattgaatcgaaatggtctcagtgagtgaccctaagtgaatctctatggtcaatatgaccttacaaaatgcgtaatttgattatggttttggacttaatggttactatgcatggtgaaagaaggggatgtagaggagatagttaatttgattgataagctggctatggagcaggaagagaaatgggaagttgatgaggaacaagttgtggagtttggtgagaaatcgctaataaggagaataatctcgaagcaacttgtgaatgaaaagttattcaaaactatttttagtagaatgtggaaatcaattgctgattggaatgtgaaagcggtggatgaaggggacgatcataagttatttgatgtaatatttgtgactaggttggatgctaaaaaaatagtggacaaataggtatgcttgttgaatgctggaatgctagttttagaaaaatggccactctctggacagtgtcgagatgcaaaattagataagatctcaagttggattggaatgtgggggtttcctttaaaatcttttactctgaataatgtcacacacttgggtaacatggcggggagattgaagagattcgatggagcaatcctccacgagtatttctaaatggatctgtgtgtgttaggattggattttcaatagaacaaagagtatttgttgggtgatacattccggttgatggataaaagaactgggtgcaatttaagtttgacaagttaccactactgtgtttcacttgcggattttaaggtcatgagcaaacaaagagtatttgggatcttgttatcgaggtggacaaagatggcgttcaagttcccaaatagggttgtggttaaaggagaatgaccctagtccaaattgcattgtagcttattgctaactcctattgctaagaaaaaggccgacaatgattgatgacaagaatagaatgatgctacaacagcagtctatcgtgatggaggagtaatagctgaagggggcgacataggaatgtgggacagcgtgtagtggtcgaaagagcagtggagaggccattacaatcaaagagtgtaactgcatgggatcgtggaagagtggggaagttaaggtagttaacaccacacaaaaggagttactagagattcaaacacatgtgggccatgatttgagtgtgctgaaggggcctcaaagccaatttattcataggttggggcttttgagaaagatttaaatggattggaggctaatgggtcggccgcaaccaataacataagcatttggaaagggtttttgttaatgcagattttcgttaactaaatttgagcctcacaatattgatttcacacagaaaaataaaagctataaaaataaaaatatgaacatagggttttttacgtggttttgtagttaaaattctgcatagtccacgagtcaatcttatttagatttttgattgtttttttaggaactctcttggatgagtttttttgtccccctttttcatcttgtctaccactatttataactacatagtgggcagtagattacaaaagttgattgtaatcttcacagcaattactccctcaaatcatgggactggattacaaatcacgctaagtaaatgttgtaatgcccgctttgaaacttactaaattctaagataatttcataatataatcactgtataaacaatgggtcgggatcccgaatttcaaaatatagttaaaagtattatatattatttattattaatttttttttacgaacaaaaggcaattaaattatatttcaaaatattgaaagaccgagacccttcaggttgcactgtcgcgatatgtacaatcactgccaagctccatctcactgttcctccagcttagcttttcctttacctacacaaggtagcaagctgatgagtcaacagactcagtaagatatgcaaaacatgtatataagtaatgctggactggcttaaacttaagccgctctgagctcaacaaccgagctcaccaaatggttaagaacgttcttaagggaagtacgacccctgtaccaaatgcactaaagtaccaaccctgtactcgtgttggtagagccattattgtacttctgggaattactaagtgttgtaccacatgcatgacgtaccccctggtacttgtgttggtaacactgtatccacatcaatatcctacactatactgacactcttaaaatcacataaacaattcgtgttagtagtgtaaatagtaaaaacaagcatttattcatatataccttactatgctatcttacatcatcccgtgctcaagtgtgccggtcagcctgagtggaaacgcagctcgacgctttacagggccctaaaccataacgttcaaaatttgatgagagacacgctaaaacacttattggggat

SEQ ID NO: 219965 - DNA, 2722 bp, Cannabis indica
gagctaacacttattgccttttgggttattgacaactctacaaaactcaggagaagaagtatcttctcgatttgcaacgagttgagggaccacagtttctattgttagatttttgtgctacattcattgtccaactaatgtcttctagtaggaagtagcaatgcccatattgcttatttcttattgttttgatagaatgcttatttctagttagtgaaaactactatcacagaatgaaaaaaaaaaaaaaaaaacaacacacgcacaagtactcacgaatataattcaaaaaaagaaaactactatcatttcctgattatatatggtaatatttgtagaattgacttaatcacttggttacacgcattttcgtgcctttatgatgtttgtgaaaatgaattttctttatgataatatgtattttttttcttcagttatgtaatagaatttgatgaaattagtttaagttatcagttatgcatgatatttttttttgcttattaatttttaatttgttcactttacgtaactagtttttgtgttttgctgtgtaatgtgattgctctatttttttgtagtgttttgtcttttatttttaatatggtcgaaactggttttagaggattcgttatgattttgtatgcattcacaagttttattataattttttatacgtacggtgatcaaacttagtttcacaagattcgaaattggttttcccacttatattttattttaatatttatgttgtgcattatgtgttgttttgattatattcgtgagtacgtatttgtatgtgtttttatttttttttttcatttagtcgattaatgaaattggtttcaatgatctttgctatttaccatttatgatttgttatgatttttatatataaggtcgaaactgatttcatagggttcatcagtttgaaaatagtttcagagggttcacatgttttgaagtttttgcaatggagttgctatattttatgatgttattgtatattttttatttaaaagtttgttttattattttgtttctaggtttgaaattacttttcataattatattttacttttagttttttgttgtgtattgtgtgttgttgttagtttttttaatttttttttgtgcgtgtttttttaatttggttggctgatgaagtggtttcagttatttttattgtttatcattttatgtttcgttatgattttgttccgaggttcacaggtttaaaactggtttattgttgtacgtaattaagctttaagtttcttttttttttttttagtttaagaaactacagtgtgaaatttttaattagtttataagagaaactagcttttaataatttaattttataagttatttattaaaaaatgtgttatttttttaactcgtttttgtgtttattttttttttttattgcttagttgttctatgtctattcaattgtttacgtaatcagtttctttatttaagattattaattagtttttaatgtaactgattttttatgttagatttttaaatatttgttcaatgtaactttgtatttttatactatattcatttagttgtttaatgtagttaatttctctgtatcaaaatttttattagttagttaatgcaactcatttcgcgaaaaccgacgcctaaagggcttaaaaaccgcctctaaagggtgtttttgtagtagtgatttatctattaagaattctctttgtttttttttttttttttaattaactagtttttctgtttcagtatcattttattgttttgagtttcttatatttttgttttaatttttttagttaattgtattaagtaactagtttttgtatttaatttttattttagagatttaggtaattaatttatgtgagttagtttttaatttaattattttacataaccagtttctttatatcacttttttgttaatttgtttaatgtaacgtttataggtctttgttaaaaattctttgatggtatgtaattttttaagtaactggaatttgtaattgatatatattttcattactttaggcgtcatatttttattcactttttagttgattgtaatatgagattggttctgtattaaattattactttttattatacgtaactggttttaagatttagtttttaatctggttaatctacataatttgtttctcaatgtcatatttttaactagctgataaatattagtgatttctctttgtcaaattccaaggtccaactccagctacaataccaacttccagcatcgatcggtgaaaactttgatgtctaactacggtgactttttggtagggacgacttttccgaatttatttcggctaatattatattttagtgaataatgaaaatattgtgtagtgggttgatggttgaatcttagagcttcttagaaatttgtaactagttttaattttagtcttgtgtttggttttaattttggtagtgggttggtggtaagtcttatagaatcatgtaaaatttatatatgagttttggtattaactgtaattgatttttttcgtaaaaaaccagtatttaattatataaaattaattagttcatcattaaattattgtctgactaaaattattttagtactaatatttcaatttctgtaaaaaaaaaaaaagccttcacttgagattttctttttcttgatttcagcattttttttaaaagaaaaaagata

SEQ ID NO: 219966 - DNA, 2787 bp, Cannabis indica
catgtcaaagtttaggggagaaaattactaattagccaaaaattaatatataacaattatttttgatatattatttttcaatagtatgagtaattattttactaaattttaattattttttacttaaaaaaataagttaatattataaaaaaaattcatcatacattttcttattttttttttagaataaaatcatcaactttatttaactgcaattattttcttattcttattgtttctgttatttttgtaagatggtctgcaaatagagttgctcactcttcgactcaagcatcctattttgttgttgatcgtactcttatgagcaatgaggtttctattgatatacattttcttaatttaaaaaaaataagaaacaagcatatatattcaaatattttactaaaaaaatttagaaattaaagaatttccacacaaaatagaaattttaaaaaaataatttataaaaaattaattatatgatttcaaaaccgttgccatcatagtatgtaatcatcattatattcaatgtcgttgtcatcaccactatattataaaaatattcaccgaactattcacaatattataaagtggttcttctactaaattttgtcacacatacaaataatacgatgatataattatttagacaatgaacgtgtcgacgccaaaattataaacataattatgaaaattgtaatttgcgcccaaattatgcattaaaacattacacaaaaaaatttcttaaattttgaaacaaataagggtatatcgatattttttgataaattagtggtgcctaactctttctagaagtgtcatcatcttaccatttaacaatattttctaaaattattacattaaattatataaaatttgatacttaattacaccaataacaatatcacagttaaaaagaatattaaacacaagtaataccttttaacattattactctttcaaaaaaaatcttaattcaaaaatcaaataatgttttgcaataattggagaaacaaaaatggtaagcacatatagacagaggattcggctccatatacacacacacagttggttcatatacatatatatatatatatatatatatattataacgttaacaactgtggctatggtaacgtctctttacatttattttccctctttttcacactttttttgaatttgtaaaaaccttaaaaaagacagagtacggatcttccgcattctaacactctcttctttatgccatggacacaacatcaacacaactcggcttcaactcggctccacctttagtctctttaaccccattcacgccctcctccaaacgccgtctctccagctccttcatcaagccgactccacctgttccagcagctacaccactctcttgggtctcccttcaagggcggctcctccacgccgatgaggccagctcggctacctccataaagggtggcttgctccccgatgaagccgtggcttgggaactctttagccccattcaacgctttctcattgtagccgtgattggggttgctgttgctgagtctaagaagaatgggatcattttccagctcaaaaaatcagtcgcatttagggtatgttttgatgatgatttaaagaaatgatttttaattaatacccattgattgtgattttgatatgagtaatttttaaacattcaaattcatttcagacaaaagggtctaaactgttcttgtgtatttcatgtaaaaacatgtttttttcttggcttagcactaatgatgagagaaagagagaaatcaagtgttgtgtggtgtagtgataggaaagattttactatcatctttctttgtttgggtcaagggttcgaatcccaccatagtcagggtagcctgctctcgaggttcataccgatgatccaattaaagtagaatgagcgataagtggtcatcgggattgtcaaagctaccgaaaaagtgggaaaatgacctgcaccacatgatctccttttttcagaaaaatgaaaatgaagagagagagagagagggagctcaattattttgaattttaatagtagtagtgtactgtacaggatcaggttttatcaagcatgcaacaaaagctggattgtttgtgtgagcagctgatcaatgtgaaggactattcaggaattgggggcattgaagtttttggctctgacaaaaacaagcttgtctcttgtggttgttcactttgtgatcaacatcataacctgtttaacaaattggaagtaagaagaacaattcattaatccattgtcagagttagacttttcttggctgattttgaaatttcaaattgttaatttttctttatgaatttgggaacaaacaaacaaacaaacaaacagggcaactctttcagtaaaggtaacagtggagatgagattcttcagtataagatgtctgcttgtaatgttgttgagcaagaggagcgtcgaatgtctgatttatcagattgggcttcaagtgtcacatctgctgctgaaactgaaatccaggtgaggtttcttaaatatgtgattttgctatattttagaatttcttcacataaatatgtgtaagtgtcattgttggttctttcttgataatctgatttcatgcatatcattattatacagttgaacaacttagctatagaacaagacatttacaatctcaaaagggattgtgaagacaaggatgctaccataaaagaccttaccaatttactgcattcatctgatgtagctggctcaaaggtactgtttttctattttat

SEQ ID NO: 219967 - DNA, 1663 bp, Cannabis indica
ggcgatgtgagattgcacagcttgcccaatacttttccttacggatcacgagtcgactactgattgtcacattaaaaaagccaaaattgtcataactaaaagctcaaccaaattgagcctatatatatcaatatcattatgatgatcatcttcataaaattgttcatcaagatcataattcatatattatccaattaatatccatttggctttatatacatatgtatggtttgtttgccaccctatttgccctgcaggccccattgcctccggcatttgtctatacaaatttacaataaaaaggtcacaaagcacaatatggtggatgactatatgaacctatatgggaaagtgaactctatgaaaggacctcaatccactcatctcaccctcaactatatctatctatacacacacagatatatatttatatataaatatctataatttacaaaatatctcttttttgaagttgtacttttggcttaattttggtataatttattttgccaaaaaaataaactctatttaaaaatttgatcaaatattgattacaaaatgttagaggccattttgcaaaaaattatcgaaattaatccatcgtaaaaaataacctaattttgcagaacaactccttataaaatcttaactttaatttgtgaaattgtatggttgtcaaccctaatttgtttgtcttttattttttaagaaaataaaataaacttatttatataaatccaaaataaataacattcttcctcttcttcttttttctttcaaataatatttttatatatataatgcatgtactatatgtatatatatagaagaataagtgccaaacaaaagcgatgactcatcataaaaatttaatggtagtccttattatatattgatattgtatgtgataatatttatgtgttgtactttcgaatctcttagcctgaaatgaattagccaaattaattatataacttaatttgtagctagttatatataaagaatatacacactaattatatatatatatatttatatatatatataggaaactaaagcctttgattattttaaaatgctatgtgatatgactataatgctatagagacatactttttcttaagatgacataatttttaagatcttcttatcttaaataggatcaatatatatatatatatatgtatattaattttaaagcagtgtagttgtatatatatagtttaataattaagtgcaactttttgtgtgttagtaaaaaacaagggattaattgagtaattatttctattaaaatttattaatgttcaaacaatattgtttaatatcgaaaaaattcagagccctttataaatttttataaattatccatgaagtagaaaaatattttattgagtactcttagctagtgtgatgtatatacaagcttgtttgattaatttccactttttaatttttaattgatattgctgtcaaagctcactaatataggttattagttttaagtaatctaatcttgtatattatataattatatcttaaggaaaataaaaataaaataatgaagcttttttttttttattatgtgttagctagtaataattagtttttgtatttatattatattaattccatttttggcatatttaattgacaaaaatat

SEQ ID NO: 219968 - DNA, 5333 bp, Cannabis indica
atagtgtgtaagactgtaaaaaatccaacacttgaaggtgaatcaggctcagatcttgataatactctgcgacagaaaggaacaagggttagagatctgagtggaaggagttatattatttcgttgcaatcaatgtaaggttctttaacttatatgtgtttaaattctattgttttagagaattcatatttagggtgttaatcaacatacttgttagtaaatctagatcctggtaaaagaatacccaacaaatatgacctgttatctattgttgatattttacatcttgtttctaacctcttctccacttagagactttcaagttttttcttgtttgttgtggaacttgtggcattgctaggaatgaaaagctctaacatcacaaagtctccgatcctcacttgactattcattggacaacgaaccacatacaccaatatcaattacatatcgtgacatctccatcttcatcggtacatctgcccaattcttccccctcccattaaataccgccaccaaatggtcatttgaagctgaatattgatgtagctcaagatataaaagttgtaaaatgggacttagctttatcgtaagagattgtaatggtgttatcatgactgttgtttccattccttggtttggagtcttctcaccacttttgatggaagctctctctcttcaacaatctcttaagtggtgccttgaaaattcccttgaaattggttacatagaattggattgtaaggtttccatagtcagtgccaaacaatctaccactaccaatttctatttgtaaaattttgtttctaacattaatagcatgttatcttccctctctcaaggtaatgttagctatgttactcgtgagacaaataatactgctcattatttagttaagtatgctttagacttagataaagaaactatttggacaaaagaacatttgtattctgaacttttaactctttatcaatgtgtacataaattttaaataaataaataaataaaaataatttaatttgatttttagtctttctgatcatactcttgtaattgtactataaaatattaattggagttggagatgataataatttgaggttaaaaaggtgaaaaaattgaaaaaactcatttaaaatgaaaatgtaattggaatattatatatattttttgttttatgtatattgaaatgacgaaaatacccaaaactcgctaattaatttctcgagcgatctcgagaagcttcccaaacccctacaattcatttcccagacaaacatactaaaagcctaaaaccctaaaccccaatccattcattgtcttaactcaactccaaactactcacctttcccttcattcatctcactctactcactcaccatgcacaggctttccaaccgatccctctcctccgtattgcgccatggcggttcacgttatcgtaacgctgctgctccaatttcttctacctcttcactctatgaaacggtacatttcaccattgttatactttcgtttgcgtactcactcaattgcctcctcttttcattttctgctgctgcatttggttgtttggttcatgtatttcaatcgattacgaatttcattttgttggtgctgtctctgttttcattttagtattatctagataatccgaggtagaaatgctgaatttttactgcttccagctaattgcttgtctgtgctagagaagtatattcatttttttggtaaaccattttgccgttgattgatcttataccacggtatttattgtgttatggtgatttcgtatgtccaacttcagttatttgctgcatataaattcggtttggattatttttattagatgtattacatttatacatatatgtgcgtgtgttctgatatatttcaatgtgtttggctatgcgtaggtcgcagaaagagattccaaacaaagatggtactcggtattaaccaccgggaatcgtactgccatcaattctccaactcagataaacttaaaaaatgacttctttttgagaagccgatatgagtcgactgcagcagcctctgattcatcagccacaccaccagctgagaagtatgaatatcaggcagaggtatgtatttaaatgctgtttgataccactttgcaagtttcaacttcatcaaattttaaaacatttgccccttttacgcaggtcagtcgccttatggacctcattgtgaacagcttatatagtaacaaagaggtgtttcttagggagcttatcaggtatttgtgtgtttcctcatgctaccgagtgtgctttcttttgttgtcttgattctcattcagtaacttcagttagaactagaggactgctatagtccatgttggcaggctcaaggggcagttgccctctgctccggacctggtctggcatgtttttttgggtggactatgttgggcatgcgcatcaggctgtgttattgtgcttaatagcatgatggatagggcctggtgagggcttgttgacctgccactgctacacgtggaatttctcatgccttgtacccctggttgacctagcaaaaagacacatatgcacatgataattttttaatgatgaatggtatagaattcagaaaatgtgtttataaaatagatatcgttgcatttttgctgaacttggttttggtgtacttttttttattatttatttatttttaaaagtctatcttgaatcatatgtcagctccaattctcaaattcttcgatcttgaatcatagaatggtttccctatctatatgatttcattgttctgccaagagcatggttgaatgagataaaatggttgggatggttttaataattttctttactttcggttttattatatttacagtgttggttctggagcaagagtatttttttgggtgtttgttatattcatagacatcttttttaatattcaaattggacagtgttagtttacgtgaagtatctgaccttcttaatgtatgaatctttatatagtaatgcaagtgatgctctggacaagctgcgttttcttagtgtaacagagcctcagttattgaaggatgcagcagatcttgatattcgcatccaaactgataaagacaatgggattataacaatcacgtaagcctaatcagcttctgttaccagattgctctaattttttattttttgtggaaagaagcctttcaattctttctttttcttgcagtgattctggtattggtatgactcgacaagatcttattgactgtcttggaacaattgcacaaagtggaactgcaaagttcttgaaagcgttgaaggtctaatacttgaactagtgtagttggacttttgtttaagttgctgcttgtgctgataatagtataatattttacaggatagcaaggatgctggcggtgacaataatttgattggccaatttggtgttggtttctattcagcattcctggttgccgatcgagtaagttctttagtgggagttgcaaacacttgggctattatgtttttttttgtaattcttgcctcatttgtaaaattttttattgtctttgcaaccttcttgcttgtaggttgttgtctctacaaagagcccaaaatctgataaacagtatgtatgggaaggagaggctaatgctagtgcatatacaattcgagaggaaacagaccctgagaatctaattcctagaggaacacgcctaactttgtacctaaaggtcagcagaaaaaaattgctgcctaacagctcttttggtttgatccttcaaactgagttgtgtgcttccaatctattttcagcgtgatgacaaaggttttgcacatccagaacggattcagaagcttgtaaagaactattcgcagtttgtttctttcccaatttacacttggcaggaaaaggggtatactaaggaggtaaagctatcctgtacacatgatgtgttgctcttaagatacacccatcttgcaaatgttatatgtgtttctctccaaaaagtaaaatgtttcgtgtatattgggcttccaggttgaggttgatgaggatccaactgaagcaaaaaaggatgaacaagatgaaaagaccgaggtactcatttctgcttcttacactttttttttttcagttgacaaacttttagttgttataaaattcagcttaccatttttcgctgtggacttggttcattattatattgcaacagaagaagaagaaaactaagactgttgttgaaaagtactgggactgggacctcactaatgagacccaaccactatgggtaagcattagcttttatttatgtgtgttcggcatgcccagtctggtgcacactgcgtggtgtggctgcagcgatgcacacctgtggcgtgtgatggttgccacttgtggtgggaggaatactgattcatcatttgtttaactgtgcagctccgcagccctaaggatgttaccacagaggattacaacgagttctacaagaaaacttttaatgagtatctagatcctcttgcttcatcacactttacaacggaggtacagatgatatatgattattttttaacaggagtcactgaatatcaaaaacttattacacgaaatcctatatatttaactaagcctaatatagatatgctaccctccattaaagcgtaacattattttcctacactagaacacaatattacgccatgcatttcttattttgtcttataaggtaccattgaattagatcttttatctttcatggtttcttttcacatttgaaataggaaacaagatttgaaatgtcttaccaagcaacctcaaatctgtttttttttttgggtttggttgcagttggccaagtttataaacattttatatcaaaaacttatattgattgaaaagttgatgacataaagttttttgattcactgtgttatccaaatttatttatagagaaagaagcaacatttgttccgtaggaccaggtgtaagtgtgttatgttgcacaaccttctcacattggtctcttatctgatgagttgttattacagggtgaagtagagttccgatctatactttttgtaccagccatttctcccacagggaaagatgacttggtgaatccaaagacaaaaaatattaggcttcatgtgaaaagggtgtttatttcagatgactttgatggagaactggtaggaaaatctatagatttttagttgattaatgttatttatgtgttgtaaaatggaaaatcatgcatatggtactaacagtctacaatcattgaatacgttcccacgatatctaagctttgtcaaaggtgttgtggactcaaatgatct

SEQ ID NO: 219969 - DNA, 3406 bp, Cannabis indica
ttttttcttttatcaatattttgttgggttcatacacttcattagtgtaaatttccactcaaatggaagaatgtatctggtaccgttaagattgatcgaatttttaattagtggaagtgaaaaaagttcgaaaagaaagaagaatgaaccacttgaaactcttacaagacttgctaatagtttaagacaagtttagatagttgaagtcaatatgggatgggacagaatcattttggccaggaatcggttttagatgagctgggcactcttacatacttacataggcagtgtaaatggagttttctttcctcaaaggtggaaacaaatgtccccattcctataaaggcattatatttcataaaaattattataaatgatgtaaaaatacaaggtacatactacatatgttagaatccataaatagtcaacttataatccctcaatgtacttaaatatacatagaaaaagtcaacatataatctggactacatatcagtcaagagaattaaagaagctacaagggaacaccctccctcctggccaatgttttgcagctcaaaaacatattcttcaacttcaagacatctacatacattggcctctaagacatctaactcactatcaacaattagaccaggatttaagcattttcatagccaccaggaaatttgaattttgaaatgatgtataattaaaaatacgtctcaggcctcaaactaactttatttcatcgtatgttgcacataactcagccactggaggagttagggctgagacggacctaggtactaacccctatggggctgtagccatagccaccagtgaaaaaaaattacacttcaaaatgctgaatattttatgtttaatttgataattacactgaaatagccgtaaatattttgttatagcaattaagttccccatgaagtaaaattcttgagttcactggttactggttagagctgttgaacataccagaattgataagctataacaacacttcttccatatccgttaaccaatatgttactcaaggttgtgcgggagaaaatggtggtctaagacagggtaaaattatggggccttaaatttatttatataattttttttagatatttcattgcaatagaaaattttagtttagtaaaaaatgtctacacagttgccactatacactaagttaaatattttgttttatattagagtaatttacgacataaatacttaagtttaattttcggttttatgtaggtacttgacagttaaatgttaagtcattatcaatgttttattttcttattagtatatttaaactattttatttttttaaaaaaataaaaatgtaatgatttacttaacacttaacatcgaggtacttacaaaaatttcagaattataaagttaaatatttatttgtaactgaaaattaaacttaaatatttatgccacaaattattctttatattattatttattaagttttattatgtaaaaataaattgaattattttttgggggtcggtaagcgggccctagccacactgactatttctaaaatcgttcctgatgctactactctcattgctcactcccactcctactaacactagatacacaatacatttaggattgagcatcagtcggtttagtcggttttttttctatattaaaatctagaatttggtttttggtctggattggtgcaaactgaaaaccgaccgaccaatctagaacctatcttaaaaccgaccgttttgaacatcggtttaaaccgttcaaagtaatcgatctttttttttcctttaaaatatgatccaatttattctataaacacattattttacattttacaactacaaacatacaaattaattatttaaaaactaattatcttattcttttaattttaatattaataaaataataatatattattagtaactacaatagataaagcaaaataaaaaaaaaattaataaattaatgtatatgtataacgcttggttcgattttttcgatcagtctattgatttaaaaaaaccaactaattaatggtggttttaaccgttaacggtttttcggtttttggttccgtcagttttaattctaacagtattagataagtcggtttgaacaattttttcaattttctaaattttatgctaagccctaaacacatccttctttcttagagaaaaaaacatccacgttaatatacagttgaccttgaggagggaagggattttacttttcttattaccatgagtaccactgaagtcattcaaatactttgcactccaccaaattctttacagtcgggtcatgaataaaattagtctgctattccaacttgacaagctcattataaaaagattgaaatcagcataagacaaaggtttagcaatattagacagaaaactagttatagcattatcatatttattatattcttgagaccaagtgttaagaaacactccaatagtaaaagggtaaggtagataacaagtctttacaaaaaaaaaaaaaaaaaaggtagataacaagaataaaattaatactataatgaaataaatttaatgaattgtattaaaattgaattacttttatttattccattccaactaaacaaaaacacataatgtgaaacaagacaaaaagaaagaaaaaaagtagtgagtgtgagtgatgtgtgattcaaatatataaattaaaatttgaaagtgttactcaatttctgtaacacgtgtaagccccatacagtagagtaggaaatccgagcgtggattatgattggagtgagtgaagaaacacccaaaaaccacactcctcactagtcactctctttctccttctttccttatcttcctttccattttcttctccttcctaacaaattaatggaagagcggaaaatggcggaatgggaagaaaagtcgccgctttatgaggcctacaatgagcttcatggcctcgctcaggagttccacactcccttcgatgcccccgccattctcatcgttggtcaccagactgacggcaagagcgctctccttgaagccctgatgggtttccagttcaaccacgtcggcggtggcaccaagactaggcgccctatcactctccatatgaagtacgatcctcaccgcgagactcccgtttgtcgtctcgtctccgacgccgacccaactctcgccgatgacaagtctctccgggaaattcaggtgctttcggataattgatgtatatgtaattttatttgttgaatgtggcatcatataataccaattatgggaattgttggatctaacttgcctgccatttctataattttggggggtttattttaaatcctttgagccagtgattttgttgtggacaatctgactgttattattttttatttttt

SEQ ID NO: 219970 - DNA, 7325 bp, Cannabis indica
aaaaccatttttatagtagtgatgccatccagaaatacgctgtgcttgaggtgtatcttgtttggacgagctatttgtccaacatccataaggcatgacttcgctaatggatccaattcattatcttggttggatctgcgattaggcatggaacaacaaagctaaaatcgtcttaaaattctatgtgtcttttccttctaaaaacatgaataacaacactcatatgtaccctgaacattgtttcctaactaaacatcaaaactactaggaaaaaaactgttttcaaatatgtgtgaggaaaatattttgaatttttatttttatttaaaaattaacaataattataaggaacacctatcagtaatgtccaattttcattgatgttcacttaaaaaaaataactataactattttagaaatattaaaccattatatgttgctctaatgattaataataaaagaaaattttgagtttctatgattaatttagctacttaaattaaaaaaaaaaaacattttacactatgaaaagtatgtttatatcaaaaatatctatctctaatcaattttctttatccctctctctcaattaatcgatggaacaaccacaggtatatagtagtaaatgtaatataaaaataagatatttcaactaatggattatatatactgtaataggtaaagatatatcaacaaatgtaatagaaaagattaaacaagaaaagattaaagtaacataccagaacaattgtgtcaagtatttcgtaagaacaagatgttcccactctaagcaactaaggctaatttagtggtgagagatgggtggaaaaaaaaaaaggaaatgcataaatttgaaccaggacctctaaattattaattgatatgtaataataaaatgctacactaatctcgtttctataagttgccaaaaacttttggattctacatagtgtgtagtgtttttttttaaggaaattacattctatatttatttttatttcttattttaatttttactttttttattattctttaatttatatacaattttataagttatattctctttgtgcgttaaggactctaattttaataaattataataaaagaagatatttattaattaaaattattttgcagttatatttaaataatgtgtaataaaaaatgatatttgtaaacttatccccgttttttaaccaatattactgcagtaccacatatgtgaatatggatacacctcgattgattatatttttccttagttttgaattattttatgttgtctaatgttttgtatcagcatattttgttgagaatcctagaaatgacagtatactcttcttttcattgattttttaagaatatagataaacaaataataacatattgttgtaaggaaatgatatattttaagtgtttttgaatcagttgttacttgtgaactttccttaataataataataaaagaaaaagttggaccgacctgagtttgagggccagcccatccaaatattataaagagcccaatttaaatcaaaatgtactattatagccactatcgtccttgcaaggaatatccaataaattttgccttaaaaacttttacctgatgctgctttgattttagaatgagaagatttcaattaaacttttctgaataaaagtcaaaaaaccattaatgctttgacctctgattacatttttaaagcaatgagtccaaagtcactataatctgcaaattatttaaacatttaatgtggacctaagttttcataaagcattaaaatcacctgctgctgctcactgaatgtgtattgataaaatcagttgtagcctttacaatacaaaagtcaaaaaaattaaaaaaaaaaaacattatactgaattaaatcagtaaatggtgtaaaattacttaagattagttcttagataatcattctaccaattcagagtctttaaaatatcaaattactatttatataacacaacacatcagacaccggtggaaaaaatctctaaagctaagtcactctttaatttcatttctaatcctgaaaatcatttactacttgcccagtgcccacttagtagtcagtattgaatcttctccttaagtgttaagcatgtcgacagcgttcatcctgagcgagggtctaactttccatgagattcatagttgcattacgtatagcttccttgttcatagacaaagcggattcggaattgtctttcattccaaggcataacttgtatccatatatagttagaaaaacagacaatgctatttacaccatcccatgttgaatcagaattattaaagcttatcaaggtccccagatagctttcctgaatcctgacacctaaaacatgtaaagaaaaaaggccacacctttacaattgtgggggaaagggtaaaaaagaatgaaggggaagtggctaaccttatattttctctggtatatacagctattcatccatagctaatttcatgcacaaaatgcagtcctcgtatttcatggaacataaagctccttcggcttccagccacaaattcaataaagcttgttggtgtatctcttcggcaagctggtgattttctttcattgcttttctattattaaacataaggtacaaaaatatgataggtaattgtcacaatcataaaatcaggggtgaacaaaccacattttcttctttctaaccccatagacataacacacaagaatatacccttcaaagttaacacattaaaatatataattccacaattatactaggttgttagatatagttagctaacttcttatatctcaaggatgagtaaacagttctaacataagataaccaaccacctagcaaagtaataagcaatgtaaacacccaatagagtttagcaaaagagacagaaggaagaaattccatattttttcaaatcagactcaaaacagatatgcacacttccctacctcatgtattgatgtcaacttatcagggtagtccagagtgtctgtatgtgccaaatcaaacattggattattttctccaaccctgtgttttataagctcataaagattactgattatatgttggatcatttcatgctcatcctcattcattgaacctaaatcattgcaacaatttcgaaaaaataactccaacagatatcttattatattaaccatggtggcaacatttactttcaggcatttagacagactgagataggaaatgaagtagttcactagaatcatcaacaacaccaaccccataagaggatatgtttggagtgctccccatcacaaggatagatatattgacattactattgtgcgcatcatccttagttctatctgcaaagccttcaacatttacttctgcaacaggcatcttttgtgatgtgaagactctgtcatcaagaaatggtttaacccttaacggaaaaccgagtgaagaactgttgtgtcagtttctaagcattacgaaattattttccattgattgcagtagaatgttggtagccctttgcattgctgaatgcatgaagctttgatccagctgcattgagcagtttaggagccttcaatccagctgcattgctcgaaccaggaatctttgatctagattcataagaatctttaagctgtttctctttgtatgacaatttaaatgaatattctgtgttcacgttggatgaaaaataaccttcaacgccgttactcccaaaatgatctacattttgtttggcacaagaagggaaaaattgaggtgcttttgggttaatcctgctaattgtctttgtctctaactcatcatcaagagagtttgagtttaaagactctgaaactttgaggtgagatttcatagaattctggactctcattgcaagaactaattgatcaactatactgtcatgcacaacatccttagctccatatgcaatgccttcaacattcacttttagacatctcattgggaagactgtcagcaagacacggtttaaccatttgcagcagcaaactgagtgcaaagctacttttagtgtttttaagcatggcagatccttttccaagtctatgaattacattagaatgttgataactaggaggctttgatccagatgtattgctcaatccaaaagtatttatttgggatgcactgcgcaattcagaagactttgatccggctatctttagcggttggtctttatatgatgaattaaacatttgaattctcacactccaagaatgaaaaactataatcttcaccatagtaattctctatgttatctacatttcctttggcatgaagaggtacaaattgaggtgcttgcatgttcaaactgctacctagcaccaactcattatcaagagaggatgaccttaacaactttgaggcccgggagggggattttctataactttggagtccaacttcaaggactgatagataaaccttactattaggcacatcattcttcaatccatcagcaaacccttcaacattcacatatgcaacatccatctcctttggtaaaaagactctttcagccagacttggtctaaccatttgcagcgaactgagtgtagaactactctgtattgttttaagaatggaagattcttttttcgcattcatgtattgaattggaatgttgatagccagttgcattgctgaatccaggaggctgtgatccagctgcgttacgcaatccagaagtctttaatctagatgtgttggacaattcaggagacttcgatccaactttattgcttgatctagggagctttgattcatcttcaaaagaatcctcaagtttttgcgctttgtatgatgaattataatttgtatgatcatctcccaataatgatgaaaaatagtcttcaacacaattattctctaaataatcaacatttactttggcataagaagggacaaattgaggcgcttgcaggtttcaaattgctacctggtaccaaatctttatcaagagggtatgagctcaacaactttgaaactctcaagaaataatttctagaattctggagtcccattgcaggaactgctagatcttttgtactatcatgcacaacaaccttagttccatgtgcataaccttcaacattcacttcttcaacaatcatctcatttgatgtaaagacagtatcaacaagacatggtttaggcgaactaagtgcaaaattactttgtgaggttttaagcatggaaaattacttttttgggttcagtaattgcgttagaatgttgatagctagttacattgctgaacccaagatgctttgatccaattgtattgcttgaaccaggaagctttgttttagaagaggcaggtggtagtttgaaaccacaagcacctcgattgttatcaccaaaccagattcgttatcatcaaaccattttgaagagttttccccgccttcctcaatgttgaattgttccatcactacatgatcagtaggattatcttttaatgtaagttgcagcttagatttttccaagacaaatagattagtacccatataagaaataataatcttgacattggttatttcttttctcttttctgtgaggctttcattttggtcatgaagctccctcttaccatatgcttttttactagaagaactctggttactagtactgacagcatcattttcagtcaaaattcacagctggagacaaaatgttgcttgatggtgaaatggtcttggcaatgactaataatccaaccatgggacctgaaaactcaaggagttagacatatcaaacgtataagacaccattcaaagaggcaacacatgatacaataacttaccaaggatattcttttgaagcattaatgaggaagacacatttaatgaagttgaaaccttagaagagctacattaaaatctactacgaaaagagagatattcattaagcatatcctcactcaatacaaaaaaaaaaaaaataaatgggtagtccatttataatataaacaattgtgctttcatgtatataaaaaaatttcaaataagatttaaatttgagagcaatcaaattttctccaaaaaattgtaataacaataaccacgccttcagaatgaaaattaaacaattttgactttatttgtatataaagcctcaaatgatcaccaaggttgaaaaaaaaacacatgtcagaagcaaaatatgattcactaaacttgacaacacaaggtattgaaatttacaaagattccaaagaaagctttgaaagccaaacaaaaagtaacctttgtaaagaaagctttcctaaatcctgagcttgtgatggagaatcccaatattcttgggatgaaagaaatgggtattgagggaacacatcatggtccaccaaatccgataaatcagttaaaaaaaaaaagccaatgtagcaaaccaaattgatgagaagaattaagaacaatagattttggtaatggttcgacttcatcttcccaattgacgctaaagaaagcagaatcagtataataaaaaaaaacaatgaggttgcttggaacaggggttaagagttcatggctgaaagcactggtcaatgaattcaaggtcagtggttgacaggaaggccgactgctcatggtgaagagttgagccaaggctgacaaccgggaacgtgaaactgcagccgccgtcgccaacaacgatggtgatgaagacgaccctttcttgcaacccatatgagaaaagagagaaagagagaggaaaaattgagcaaagtctttgttattactcaactgaattttacaattagtgaatagagcttatatagctcagtttgatcaagaaaatgttggttggaaaataaccaacttgtaagagaattatgacagctacaaccacaagatcttaactaacttatccaaaggtgaatctaaaagcacccctcaagatggattgtagatgtttatcaaacccatcttggagataatattggaaaaatgagtaggtagtagagctttggtgaatatgtcatcaaagttattttgtaaagatacatgaagtagcttgatggagccttattggaccttctctcggataaaatggcagtcaatctccacgtgcttagtgagttcatggtagaccgagttttcactaatgtgaatggctgcggtgttgtcacagtaaagtagtgctggagtataattagtgacaccaaagtatttgaggagagtaagaatccaagtgagtttagaggtggcatttgccatggctcgatattctgcttcaacagatgatcgagatacagtttgttgtttttttgatttccatgacacaaggga

SEQ ID NO: 219971 - DNA, 1614 bp, Cannabis indica
tgttaattttatgttcttttcgtgttattttttggaaaaccgtaaaaatgtaaaaaaacattctttgaacgtaaaaatgtaaatattttacaaaaaatagtgtcttatgtaattattcctaatagtgtcttatgtaattattcttttttacaaagtgtgtagcctacatgaagaaataaagccttatttataggttaaaattgggttctcaagtgaatctggacccgttaagattttgtacatgaaataagttgattgatgaggtacaatatattataatattaactttaggtcgagtaagtgatatccaattgaggggtaattgtcgtccatacaatgtagtactatttgatgttgacaggtcgccatgcactgccgatcgtgtacaataaagtagttgacgttggaaaaaatgtatgttgttttttgtgtgacacaggggacaaacccctaattctgtgagatttggtgtcagatggatgccacataggacagcacccgaacacctctttaactactccttcgagactatccttgaaggtatccagttgtgtttctctaagtctctacttttctgggtgaaagtcatcctttttggacgaaagaggtctgactttatcgagacagggttatagctaaacccagagccgtagtcggactccgtttatgggttgacccattgctttgtttgggcttgacagatgggctcatgaattgattttgggccttgaaagtacacaagtcctccatccaggaaataatatggaaaatttttagtaattacactatgtaattacactcaattctcatttctcattagggtcatgagaattggagagtgtaattagaacccttcaattacctttaattatatagttatagcataattacatggttaaataaaacatgccaaattacataattacattaattacacccaaatccaattacaccatgacttttcaaactcgccctaaatatttagggtttgtttggaaagccacagtgtaattagatttgtgtgtaattagaggtaattacacaatttgatatatttttctgaccatataattacattgtaattgtgtaatttaagtgtaattactaaatttttttctattttaaacattaactactaaaaatattatttttcgtgtaattagtaacaattttgccaaacaaaatattatgaattcatatacaattacactttatatctaaacacacattgtattttaaaatatagtgtaattactaaattgtgcaattaccactctaataattacacaattacttaaagcataacaaatcatgttgtaaataattatagaaattagagcaaaaaaaaaaaaaaccatggtacaaaaggaattcaaatacaaattacacgggatgcgatgaaaaaaaaaattgcacatgtcgaatggatccgaaaagataagatactcctacaaactattcgagttattattattattattattatttttacaaattagggttgttcaattttttattttttattttttattttataaatcacaccatagatatttaattaggattgcccaaattaaattagtgagtaaaaaataaaattgtaatttttttaca

SEQ ID NO: 219972 - DNA, 2227 bp, Cannabis indica
ctttattgatgttgaataaaatagattacattgaaatggagttttatttagggcataaaacctaacacacttcccacacaatgacccactagtgcttaaatttcaaatggctagcaccagggtggatcgaacgttggttgacaatgagagtttagtagatatcctatactttgtagccataaaaagagatgggattgggacctaaagacctaaaaccctgcgcctcactaatatgggttcaccagtgactcgattcaactggaagggatgatagagttagccttgatgattggtgaaaaacctcagagttccacattgatgttcaccttcttggtagtggattattcgatagcttacaattttgtgttaggaaggtcgtcagtcaactggttgaaagcaatcacattcgtatatcatctagctatgaaattcccaactcttgcaggcattgtcaccttgaacggatagcagaaagaagatagagaatgctacaacatgtcactcaggatcgccaccaaacctcgagagctaataacgatgacattccaccgaggatacaaccaagttagggaaactttatcagaactagaccccaagtttgtaaggaagtgcaaattgagtcggtgaaagaatttgaggaaataataatttttgagaagattgtaaaagggcttctcaaagtccttaaaatagaattgaggaagttctcagaaatgaatgtagacgtgtttgttaggggacatgaggacatggaagaaattgacccaaccgtaatgtgccaccatctcaatatagatctaaacgcaagcccagtaaggcaaaagcggagggctctaaattttgagaagtatgcatccttgaaaagggaagtggaccaacttgacatgatcaagtttattcgtgaagcattttatccagtttgagcatcaaacaccgtgttggttcccaaacccaactggaagtggagagtatcattgacttcactcatttgaataaggcttgcccaaaagatagctttccactgtcgcgcatagatcaactaatggaaacaacaacaaggcacgaattactttaatttatggatgcatactcgaggtacaacaaaatacccatgaatcttgcagacgaggagcccacctcattcagtattgatcaagtcttatattgctattgggtcatgcctttcggtctcaaaaatgcgggggtgacatatcaaagacttgtcaacaagatgtttgccagaaaaatgagtcataacatggcagtctacatagacaatatgttggtaaaaataaagaaattggaaggtttgatcaaagatttagatgaaatatttactactctccccaagtatcaagtggagttgaatccattgaaatgtctatttggtgtgtcttccagaaagttcttaggattcatggtcaatgagagaggcatagaggcgaaccctgaaaagatcaaagctttaataaatatgaaatcacctaaaaataggaaatcggtgcaatgcctgactgggcgagtagccgtgttgaataggttcattacgcggtccacagacaagtgtctcccattcttcaacaccctcaaaggaaacaaaaagtttacttgggatgaggaatgtgagaaagcttttacgagcttgaaagagcacttgggaaatccacctctattggccaagccaaaaaagggagagtatatgtatttggctctctctgaacatgccttgagtgttgccatagtaatagaggaaggaaagcaacattagcccatgtactacattagcaagtgtttcatggacgctcgaacttgctaccctcaaattgaaaagttggtctacgcgctcatcgtggtgacacaagagttgatgtcgtatgttaatgcgcatgtgatcgtggtgctgaccaatcatcccttgagacaagtcttgtacaagcccaaaacctcaaggtgcctactcaaatgtgttgggattttatgccataaataaaatccaatttcattgtaaccttagttactttcaataaagatcaaaaatcatatcttgaccttgtcatatgctttgttcacatgttttatacatgattataggtttaatatataagttctattagatccagaacatatagctattcataattacaatgatgtcatcagagtagaaagtaattgtgattatatgcttcaaactatttactctcataatttatcaatgcattggatttac

SEQ ID NO: 219973 - DNA, 4689 bp, Cannabis indica
atttgcagggggtccaagaagctgataggtcaacggaagggttttacatccgttcaggcgtaacagtcgtactgaaaaattcagtaatcaaagatggaacagtgatctaagttttactacaagtcttcaatcctataccctttttttcccctttctttttgggtagcattaggattggaaaggagcgaattaagaaataagagctactatgttctgtaaatcaaggcatccctagttctttactatgtggattggaagtgcaacatgcttattgttttgtaaaaaatactgcaaaaatgtgtttccaagccatttgaagtgaaaaaagaaaaacactaatatttcaaagttaccatcaactctcgtattttctttttctttaatccgaaaccctcttaatttttgagctttgcaaacacaagttacaaattaaaaccttgagtcttgtgcaaaacagacagttacaatctagggactattatataacgctaactaggtcaagtaaaatcttgaatatcagaactaagtagcaaatcatgggcagaaggatgttccagggctggttggatgggttgttcaacccgcctaactcacaactcgggttgatatgtactaactttgacccctcaaaataatttcacttgtgcccaaactaacagtattaatagttggtttgaaaaacttgtgtttttctctttggagttttcaggttattaatagtttgggagctttaggttagtcgggttgtcaaattttattaacaattcaagttttgaacatacttctttgttgtgaagagttagcttaacttttctgtataatgggatagccagaataagtcaactctgcataaaactctatataagtagctcttcacagttaaacatcaactcattttcgtatctttgcaaaacaaacctctcttctgatgttaaaatgttagtgacaaaacatttctcgtctgaaaatggttttcttcctgttcttcctgcccgatgaagatagttagtgacagttcttggcagatcaaaattgtatatgtgagtagtttccggcaggtcaactcctctggcagctaaatctgttgagacaaggagataaccacctccttgtcttagttcctacaataaacaagagaaatatatcagaaacttctaaatgataagattagaggcattgacataatcggagaacatgactggaacttactgataaagaagttgctctcaaattaaaattcatgtcttcttccaaaaggaggatatctgaatccccattataggaagctgtcaaaaaatccattaacagtgtagttgggggagcatttcctgccttcttcgacttttcagactgtattcatacgatatatcaaaaacacaatcaatttgctttctttggtgcaaaaattaaaaaaataaaacattttaaaattaaataaagacctgttctccaacaaaaataattccagactctggtgcatcagtctgtaacaaagatagtaaggtatgcagcctcatgtttttaccacatatctgttaagccagcaagcacgatagaaagatttttgagtaaatcatctttcaagagaaatcaatacacaaaaatatctcataaaataaactattgcagagatttgaaactggaaaacttataaatatttgaggaatccattgtgtaaacaatccttaccacaaatctatgatgtaaacatgatggcatgggctcaactggattaacatggacatgaactacgttgctctgaaaggtacataaacataaaaatgcagaatgatagcaagaacaagtaatattgtaaactactaacgaaaataacatggaaatgaaaagtttatactgcgaaaccttggtccatttctgttgtatacagtcatgtacaaatcgtctgtgttgtgggattgatgcactggcaaaaatggtctggcggttattgatcgaggagtatgatgtcaagagttttcgaagagaactgacttcttttgaagagttgaacatgaaatcaacctgaacaaagagggaacataaaaataataattgaaaatatgtacattagaaaaaacttcccctttttttccttctctttttttttttcattattattagattcttgtcatttgaactacaccttgcaaacattttaagctgctttcattgacaggaacagaaacaaatgtagttcgagaatatgttttcctggtcaggacaaagaatacttttctagaagatccgtgtctttcactaaacagacagtagatcacacattttgcaacatgattctgctaaatgggattgacatttaaaatcttagatacaagatagttcagtcagcttcaataaatagctaaacaaatactaaacattagtatggatctagtttacctcgtcaattaccaaaacctgcattgactcaagagtaagaatacgcttttccaacatctgacataaactccctatggttgccactacaattgtaggaggctctgcctgtaatatggaataccaagaaatgtccgatcactaatgagcaaggatttgtcaaaagatcaatacaaaattacagctagaattaggttcaaacatttaaggattagacaccattataggtcaattgatgactgaaatttatcaaagttgatcaagcatgaattagtcatcctgttctgcatcggatacaaacatgtcaagtccagagaatataaactattcataaatgacatctttccgacaaaagttggaaccctcataaccaaatagcccgattaaagatataaaatgctaatccagtgaaatttaagaaagtgggtatctatatgctgtcgtcttccatgacatagaggtacaaactacaatgcattacaaggtaacaagaacagcacctttagccaagtcttgtgtctttttaatgatccaccatctaaaagagccatgatggtagatgctttctgctccaaatcactttctgtgggctttgcagccagagtccgagcaactttggtaacctaaataaaagtgaaaaaggctaatcatactaaactatacatagttacttcctacccactatacgtactcaaaaactgcaaccaagaataaaagttgcatttttgttttcctccttaaatagtatcttaaagaagaatatgtaaattccagttttcctctaaacgtattcaattacaggaagaaaaaaaaactccagaacggtattcttacttgcataccaagttccctggtgggcaccacaatgagtgcttgaacagctgatctttgagtgtttataacggaaaatatcaacaaaagatatgtcagtgtcttcccagaacctgtctacagaaaaagaacaagtacaaaaattaatcttctaagttataattgagttcacacttatataactcaacaatgttacctgacatagtttcttgtttagtcttacaaattcaatacacaagttacttagccttctcaaatatgattcatagcccaaaaatccagagcttttttggagcgttgcaacgaaaagttgagaaatttaaacgttgttaagcaacaatgagtatacattcacattgagaaatctgaataagatggaaatttgacctgagcatgaagcacacagtcgagaccagagaacagagtaggcaaagcttgtctttgtacattagttggtattacatagccaacttcttcaaccctgagaaaattattacacattcaaaattgaaacgaacctcattacaactggaagaagaaagaaaaacgaaaacaactcacctgcgtaatacatgatcggggacatggtttccgcaaaggtctctgagagttacggtctcatccaaaccaacttcttccgccatagaagttgagttaagaagctccggagcggagcaaattgcacggttttcagagatgacaagcctagagctagggcttcgtgatgggaaggggaaaccgtaagcatgaacatggagttttcgagagaggtaaacaggtcgtggaagagagagaagctgagtggctgaaactgatagagtcgccgccattgacgaacacactcgaagagctagtgaggtccgatgatgaagacgatagcatagctaaggattttagctaaaacgggaagaaattgttgtcgtttccatcttattaaaacgacgtgtcgtttaaacagtaaacgacataacaacgaacgttgtcgtttgatgtgtagaaaactcacacggacgagagtaagccgaaaaggacggagcggaaatatcgagaatcagatccaatggaggagaataagtcacggagatcgtaatggacggaccagatttaagtatagatcatgtgtagtagtatgcactgtatttttttcttacgtatttattattattatttttttttttttttgacaaaatgtatttcttaattaattaattaggtgggagaaaatatcgtcgatctagattcaccgaattgagtttgtgactttgtgtggtgcgtgaagggacggccaatctaattagagatatttactatttaccaaaaattaataatgataatatgcagagatattcaacaataatatttttctttttgtttaaggggttacaattacttcctttaatccttacaattttctgttctcgaaaaaaaaacacacaccttcagagaatatagtattatttattt

SEQ ID NO: 219974 - DNA, 2791 bp, Cannabis indica
agttcattaagtaaagagaaaattggtgatcacagggggatcaccctccccttgaatcacaacattagattgtttagaggctctaacacctctggctaaagcatccacaaattggatttgattacggttaaaataaataaacttacaactattaaatttgcttttataatctaaaatttccaaagacttgtgcagtagtttccattctttgagacagtggttccttgccaaagcttggattgcgatttggcagtccgaagctatcgttatctcctttcctttttcctggaaaatccactccaatgccatagatatcgcgttgatttctgcctcaagagcagagttcgtcttcatgaaatttgtttttgaagcccatacccctgttctgctatttatcccaactgctgctagacctccctcacctttggaccaagaagcatccgtgatcactatccattcagtttgaagattgcttatctccctccgttgagttccttggtcaatcttgtaacaaacttcctctgctgcattttcttctggagtaaagtttaagtattcttcaaaagccttcgatactctcgtacgcagatcactcacattcactctagtgcccagccggttgtactgatttcgactctgccaaatttgatcaattatacatcctaaataagtcagaatctcctttttcccaatacctgccgcttccacttcctgtaccagattctgcacaaaacaaagcatatctgcccctgggatctgctctattctcaacgggaacctgcttgagaaccagagggatcttgccatgctgcaatctctgaaaatatgggcacaattttccagatgttggttacagaaagaacactccttatctacaagaaaaggtagcctttccttgaccggtattgcattattcagtaccctccaaagaaggactgaaattcttggatgtaaccccgaattccatagccatttccacaccatatgattgtctctgaatctgaaattctggtccactatgtatgcgctcttgactgagaaatttccatcttgttttcctttccagataaccgtatccatgttaggataagggagcctaggattctcaaggattctgtctcccatttccttcccaaagaattgtaacaccacttcttcattccaagtattccgcatggaaagatctgccactgtcctcgcagtatatccttttgttctaagactattcattaactctttgaagtccttgaactccatccacggtatccaaggttgattccaaatatcaatcttccttccgtcagccggaatagccatagaacccttcaggattatgtttcgcacatccaggatacacttccaaatataggaatcacttgtcttctttttgacaccccagaaattttcgttgttgcaatacttgcctagaagacactgaatccacggcttatcccttccttgagctatgttccaagttagctttgctaaaagggctctgttggagtcttctaatcttcttatccccaggccgccggaggctttcggttggcatattgtgtcccatgccttgtaagccataaacttaccttgcctcacttctccttgccaccatatttcctcatcaatgcatctaagtccctgcaggttgataatggaactctatttgttgacatagtgtaaattggcattgaagatgccactgttttaattagagtcaatctccctgcgtaagacaaaagccttgtcttccatccctctaatcttcgaagcatgctctcttttaacttcagaaaactctcttttttcctccttttaaaaacaaaaggattgcctagatgtctctcttctccatctgattgcttgatggtaagttttcccagaacttccttttcttttcaggtcccaaattgcttgagaatagcacactagacttgtctttgctgcagacttgtcctgaccagttctcatacaaattaagacactgcattaggttcaatgcctcttccttgttggctcttgcaaataagattgtatcatctgcgaacatgagatgggaaattggaatcgccgctcttgcgatcttaactccgtgaatctttcctcttctttcttggctttgaatgatcttcgaaagaacctcttgacacaaaaggaatatgaacggggataatgggtctccttgtcgaaggcccctatgtggcttgaacttctttaggggagacccgttcaaaataaccgagtaggacactcccgtaatacacgacattaaaaggctgcaaacacgatcttcaaacccatttgcttttagaacccgacgaacaaagtcccactccattctatcatatgccttgtgcatatccaatttgatcgccattaatcctcccaaacctcttttcttccttattgtgtgcactagctcctgagttagaattgacgactcagcaatccagcgacccgggataaaagctgattggagaggtgagactaaactttccatataaggcctcatcctattagctaggatctttgcaataaccttgtatggaaagttacataaactgattggcctaaattgctccatccttgttgggttattaaccttcgggataaggcaaatgaaggtgtaattcagattcgaatgaacttctcctgaaataaacgcttcttgtacagccgcacaaacattgttgccaaccacatcccaatacttcctaaaaaacaacccggagaccatccgggccaggagattttagagggtgtagtactgaatacagtctctctaatttcttca

SEQ ID NO: 219975 - DNA, 3364 bp, Cannabis indica
aaggaattcgactaaaaacaatagctagtgatagatattttggtgtctctgttggaagcataattaacatccacgaacccttctaattctaatttgttgcccacctttttaaactttaaagaatagttcaaagttgccttcaggtaccttagaagccacttcagtcctttctaatgttcttcactaggattggacataaatctgctcaaagtgctaacaacatatgaaatatttggtctggtactaatcattgcatacataatacttccaatttgcttcatcatcttttagggattgttctgtagtgaacacaaaatgtaggggcacatgagttttctttctatctgccatgttaaacttcttaataaccttatcaatgtatgtcttttgtatcaacaacaaccttgatgtctcttgaatctcaatacctagtatcttcttacaactcccatatctttcatttcaaattcactattcaccacatacttcaacttgcttatttagttttggtcttttcccatgatgaacaggtcatctacatatatcagtaagaatgttacaacttgtgaatacaagtttgtgaagtatagacatgtgtcatactttgatttgatgtagcctaccttggtaacaactgaatcaatcatcttgtaccattgacttggggactgctttagaccatatcaagatcttttcagtaaacaaataagttctccctccttggattccaccttgaatcctttaggttgttccatgtagattgtttcttcaagttttccatataaaaatgttgtcttaacatccatttgttgtatgtcccagtcaagttgaactgctataacaatcatcattctaattgtcttcatttttactactggagagagaggatttccaagtagtctactccttcaacttgagtgaatcccttagcaaccaatctagccttgaatatctttagttcaactttagttatcccatcatggactctaaaaatccatttacaccttatgatcttctatctttcaggctttaaaaccactacccaagtcttgttcttcttcaaagaactgatttctccattcattgtagagttccacttcttagagtgcttgctcgtaataaattcctaagagttccttggcaccacttcctttgattctttggctatagatagatcataagcgatgatatcaacttgaccatacttagcaggaggtctgatttcccttctaattctgtccctatctaattggtagtctcctaggtgttttgcttgactttcttcttctacttcttgatcaatttcaccttgttgttgtgtgtctagagtagtctttactggttccacctcattttcacctctttattagcttgggaattgttacctaaaatatcaaacaaaatacctttctcatttctattaaagggaaaatcatttttatcaaaaataacatctcttctaatcaaaatcatgcttgtttcagttgataagtgtctataatcttcgacaccaacttgataacccaaaaatacacatttaatagatctcttacccaacttgtcttctacactgtgtgtatatgctgcacaaccaaaagttctgagatgcaccaatgagggaggtttaccattccacaatttctaaagagttttgagattattaactctactaggacttctgtttattagataacatgaagtgttcaaagactctccccaatatttctttggtaatacagagttaagtaagacacatcttactttatttaagaggttctattcattctttcaacaacctcattctgttgagggtttttgacaattgtattatgtctttgaatacctgtttctacacacaactcaacaaattcatcattaataaactcatgtccattgtttgttcataatgattttacccttttatcagtttgattttcaacaaagattttccaatttttaaatttgttaagacaataattttgttttaatagataaacccatacttttcaactataatcatctataacagttagaaaatattggttacaaccaggggtctttatcctgcttgcaccccaaagattatcatgcaactattccaacaccttctttgctctattgttgctgcttgatgatttaatcttgtgttatttcccctgcacacaaatctcagaagatggtgaaattacatgagtataattcataaataaaccatgtttagaaagctctactaatccttgtttactaatgtgacccaatctgacatgccagagtttagaatcataattgcaattagtgactgctacaactagtgcagagtcattgttttaccatctaaaaaaatacaaaccataccttttgatacctctcaaacttgtactgattctctagtaattctcatggttcctttaccactcttgtattcatatccctcatcatctagagttcctagagatatcaaatttctctttgttatcctgttttttgcaccatgacgtggcaataggaataaatgagatgtgtcccatattttcgatacctggcggaggaacatactcctagcaacccagttatgattgatcaatatccgtcgcgcttagatgcccgagcaagttggtgaggtagatgtccgaccaagatgcatatgtgcttatgtcgagcgaagcacgaaagatggaatattagagattaatctcgttgtgtccagacgcaaagacaatccttataatcacgggattgagtcaaagaataacatcaacacatcctagtttcctatttctcatgttgtaattatagaattaatattgtttcctattttattcattatatgcaaaagggaaaccatccctcatgtactaagtccctataaatagtggcctcgcctcacaatgaagaggatcgaaataattgcttcagaaatacattctatagagaaaaaaagtgatctaagagagaaacttactcaaagatcaattgtaagagctttcgagaggaataacaccttgtatctttgtctcaagtcaatacaaatacaaggggagtaagctattaccacacttatagggccaaacctctttgaaatctggtgttagctttattttattgttttttctttcttttatttattttatctaatcgcttcatctttgactcactgcgttggttagaagcaaggtttggtgctttcattgagagaaaaaacacaagtcctttgtcttaagttttgagaggtaaataagatggttgtacaaactcgtaggggaggccttgtcgatcagggcgacccaatggtgtttataatatcccagaaattaatatagtatttaattggacatattttgttaaatatgtaattattttggta

SEQ ID NO: 219976 - DNA, 3732 bp, Cannabis indica
tttgataattacttttaattattaaataaataattttgacatttaagtagttaaattaaaaaatatggtatttgtaaaagaaatatgtgacccacagcactacatgagccaaacaacctttaaattggtcagaaaattatggttgagtgttgtctcataaggccaaaaagagaacccccaatgataatattaatatacatggtgttgacttgcttacattatatggaatttcttgccctaattgaggtagatttagtttttaataagttcaatataaaatatgtccgactactatagtatatcccatcacatttttttgtgaaccatagctagtaagctttcaatttattgtgtcacgtatcgggattggtgtgtaattatatatgtaaatactatcttaaaaacttgtgtgttgatattgaattgatgcagaaactttggtgcgttctgtacccctctctgccgtcaaaaagtaatggacaacgacgaggaattcaaataagagttgcagcattttcgtgaaactgtcttgaaagacaacaagaactggggtggtatgtaatatcaacccagtaagtctcttatcttgctcttgggaataacagtgaaagtgaatggcactatcagatttttttgtcttgttcatacatccatctaaggaggcctataaatagagctccatctttttttttgttcatgccatcacaaccatcacaagctattctaaaagtgaagagtgaggctcttgagaaaaaaatagtaaaaatacctcttagtaagtgaaatcttagagagtaagaaaaagcgagtttctacaaaattgtgagaaatattttgtagagagatggtgagattacaatactagtgagtatgagagttttgagtgtagtcctccagtatttgtcaaaatttgagagtgtaattttgtgtacccattattattgttatagtagaaagtttaccatggttttgtttagccatgagataatttcatagcgtgcatttggtgctttgattattattcgtaaaatactatttgcattggaagaaatccaaaaattttgaatatgccctgtgattgcagctgtgactgatcttttcacatcagaaagaaatttcagagtaaatattgatcttgatgggaaattgagaaactgtccattattcccaacaaatctcactctttggttgacgcggacttatattatgtagattggagaaaaccaatggcagctatggccaatattgtgttgttgcaatgaggaaccaaattttacatgaacttttcaattataaactatggacttatattgctaaaggacgtatttatacaaatatgagcgcttcaatagctacatggaagtgggtgtactaccgtccgacgatcttggttaaatcattttctatatccatctttcatacatttctagtcctaaattatagagaaatgaatgaaagataaaggaagtaaagtcacttcttaaattcagtgtaaatttgtaactaatgaaaaaaaatattgcaatagtggaacatacctcttctagagtttggcatctttattaggactttgtattactttatcaagtttttacgatactcaaaactaagcaaaatgatccctttattgctatttgatacattaatcttattgtataggtttggggcgtttttatgcagtcgtaatgtaatcatagcattaaaacccaatcaatcatctgtgtcaacatctgcgtttttcatgaaaacccaagtagcgagctgcaagtccttctcatttttctctttcgtgtctcatttcatttgaagtcttaaataataaaataggattattcatacacatattatagtgaaagaaaaaaaaaatgaaaggtagttgcaaaacatacattgtaatgtaattcaatgtagaaatgaaaagcatgcaattcattcttatcctatccttaattggcttctcttctcacaatgaaatttcacaagaaaaaccttacatgtgaaatcctcctgtccatcttctaaaccttctaatatcactgccttgagaaactgccattccaattcctattcttcctccatttccaacacctctataatacattctccactcatcttcttccccatccatctgaaccagacaaggcgatccaacttctttgctgtcccacccattagcaccggaagcctctaaaaccccatcatcttgaagccttgtccaatccttaagtccatctttagacaccgctaacccaatgctcttacctccattatcagaaactccttcatatgccatcaaataatccccatctttcttgttcctgacaacacaggcatttaaacctcccagctcatcaaaagcaccacttttccctccctcaattatctttcccagcttaacccacctaatcccatctcttgatctagcaatcccaatacaaaatttcccacgtcttacatcaaatgagtggtaatacattctgagatcaccacttccgtggaaaacaacctgtggtgaagcaataaataaagaatcccattcattctcagaaccaacatcaaaaagagctccactatggtgttcaccttcaattctagcccaatacctaccatcttggctaatagccaaaccgggcagagacttataaatcttcccagatctaccactttccttaaaaaccttttctgggttttcaataataagatcaaatgagttaccggaaatatcaacttcttcagaactgagcccagtgtagtataaccaataaacagcactcgatgctctgacctttgtactggacattatcactacctcagagggtctaatgctggaagtatcaaatgcccaccaatctttgctacaactcattactgttcctacatctacgctggtctggaccgatcccacacctcgctcccaatggacaccattgctcgaagtagctaaaccaattgaatcgaaacctgggtttgaattggacctgccgtagtaccacatgtaccacctttcttcttcatcactcagaaaccttttcacaaccggagacccaacgtcttccctgtcccaagaattcccagctcccaaatcgaacaccaagcccccagaggaagacgatgaagatggggaaataagacaaggttcgtcacttgaattgagctttgtgtcctcatgcgattctaactttgtgtcaagctcagaggtggagttttggtcctcagtattgatgttagactttgtggagcagcgagtaagagagagagaattgtttctggaatttgagaaaaaagagagtgcattttttgatttggtaacttcgtatgaatgccttgataaaattaaggtagttgggttggctgtcctttgagtggtggaagacggaaggaagttaacggctttcattgatgaagttgctatccaagctgcatccatggctgtggtggaggatgggatttgagttttgggcttgtgcaaaggagataaaattttgacacgtagcaattagtgggatttttattaagtattttgttgggtgataattaagttatatatagtgtttgaataaattataaggcaacattatggtaggacttagcgtaagtttttactggtagggaagcttttttgaccattaattttagatcatgcggtcaatatcatataagatatatacttttacaatagaactgtttatatacaattaaaactttattcatattataataatatttaagaat

SEQ ID NO: 219977 - DNA, 4621 bp, Cannabis indica
aagtcatgaggcctttgggatctacataaccacgaatgaggaatatccaaagtttgagcaatagtaggcccaatgtcaggaatcatatcactatcttcaggccctaacgaaaagtctggagtaggaatattcaaataattaggcccaacttcattagtaaccatttccagttgcctattgcccacgttttccacatttcgcacaagcgtatcaggttgcaacgaaataccatctgtcacctttgcaatatcttttcccgtacactgcagatcagccatggggatagtggacgtgccaccatgaacatctttacgtttttgcccactccccttgtcctttgtaccaacggtccccttctccgtcaccatctgagattctgacgtagccccactcgccctttggcctgaaacctccactgagtcaatttctttaagagaattcatttttctcatccatttcattcgccacttgtaaatcataacttgcatatttatactaagctactataatttacctcattatataaaatctaagagttcccttactcatgaccttagtaataaagaatgaaagctagaacaattaattaattatagtagtttggatgtacctatatttgtacaaatgcgtagaagacttgtagtagaagagaagttatcaaaattgactccaagagatgttctattatcatctacataggaaatatcgatgttgtttctcatcagacaagtcataatactacatgtcatatagtggaagggttttaaggaactcaacttgttataatttggataataaaatcaacttattgattggtgacactagtgacaataaactattgtcctttaaacaaaaaatggtaaaatctgataaggaacaaatacataaaatggatttcatgtattccaattccattatgaaatcttgtagtagcactgagtgactttagagccattagatgctagcaaatctttagggtcagtagtacatctaagtgacttcattagactttagggtctctaaggccaatgcctattcgaccatcgtaaaattggatagaataggtatcggtggaaaaatgttgggaaaattttcccgacagtgaaaaactgtgttggcaaactattattggcaatgattttgcacaatcggctatatcaaaacttttgagtttcatagcaaaggttttttttttgacattgcgttgcaaaatagagaaaaaatgtaaattttatgcccacattattccaggtgatactcaggcctttgtagaagactgtgatcaacacaatcgaataatgagaagattcaggttcagatcttgataatgctctgctacagacaagaatcaagggctagatatccgaacggaaggagacaatacattatgttggaaccactgtaaggatctactaatccatttatgtgttgctttattgttttaggaaattctttatcagaatgttagattagaattaatccagcatacgtgagtagtaaataagattctcgtaaaagatttttcaacacaaggtttggggttcgggtcaaggtttaggtccaggtcgagatatatcggggtttggggtccaaggtctgggctctggggtatgggttcgaggtcctagtttggctcgagctctgaggtacaggtttgggtaagggttagggtcggggtcacgattgggtctgaggttcgggtctagggtctagggtcgaagttgattcctacttcaagcaatttgattaaatgggatgacagtttctcattttgtatttgtaacataattttttattaaatcacacatcacagtataccaggtatgggtgtacatgaacttttataaaccacccaacttgaataacctctccgaaccaaactaagataacacgacaaaaaataaaaattggaggaaaatataacccacccaatctttatattgaacaggttaaaaataatgtcaactcgaactaatctggacaactcaataatgaagagagttttatatatatacatgtgtgtttttattatatatttatgtataatatataatttacatacatatttaatatatatatataagttcaaactagtatgttttttattcatagatttaaactttgaatttaaattagtctcattatcacaattaattaaaatataacaattgaatttgaagacactacaagaaaaagggcttttgctgacgcattttatgaactatgccgataaaagtcaacttttgtcggcggttcattaacctcgctggcaaaaggtggcaaaattatcccctatttcactttgggaaacttctataccagcgagttattttgttggcataagtgacctatgccagcgaaataaagtaatttcactggtaaaaagtggacggtaaaccaactgccaaaaggaggtaagttttggcgatttgatttcacttttgtaagcaaaagttaataaatatttttcactttttccgtgcgagtaaatgcgctggcaaaaattgtgaaatttttagcaatttaattcatgcgcagtaaaaacgtgcacaaaaaattaggtgaaaaagtttttccggcaaggttaagctcgctggcaaaatattttgcattaaataaaatgttgcatttcagttttagtttaggttaaaacttttgccggcgagcctaactttaccagcaaaagttaaatcaacaaaattcgaaccaaagctcctttttccccatttctttctctcttttcttcttcatcatctttttctttctcttattctccaccaaaacctgggcatccctaccactatcatcatctccaccatccccgatcatccccaccaccatcataatttttagctcttattttatttaattttaaaaactaatcttacattttagtttttaaattaaaatttatcagaaaaataataattttaaaattctaacatagttaaaaatataatattataataacaaaaataataatattaaataaaataaaaaaataatataacactaaattataaaactaaaaaaaaaaaataaataaaattaatattaagtaaaataacaatttaataaaagaaaaaaataaaatcaattgttaaaaaaaattataataaatattttattttactaaattattttaatattttaaattcttactagcaagcatgataaatcataaagtagatattttaggttattaatataaataatataaaatgtgagattttttaagtaaaatatatttattttatagaattttttatgtgatatattttgtgtgaatcattagagttgttacaccaaaaataaaagatttttcactaaatttgcatagattttataccatattgttgtgtccatcagtctttatgcatcttgtatatggtatttagtttcatatattatcaacgtaggactctttaatatttatatagtcatttgagtttgcatttgaagttcttgcatgccaaacagacaatttctagattcaccaatagtaatttaactagataatgtcatgatatttaattggttaatttcttttcaggcatgtaaataaattaacaactaaatcaaaatattatgtatatattaatataacctcaataaacattctatattaagttgactgctgaatctaatcatcagagattttgtagttaaatttgtggccaagagagaaagtttcaatgagaagaaataggctaaaatcactaactttagccaaaaaagattaaaccaactcaatgatcaatatgttccgtagagttaaaacacctccgaaattagcattatagtaacaatatctttacccaaaacaagggattatatgtataagattttaattgagtcacaaaaagaggtcaccctcaaattatttggatatatatttttattttattactttactttttttaataaacgcgctagcctcctagctagggaggctttttaattctggtaatgaagaaatgattataggaactaaaaattaagaactcttttcaatttagtttatatccatatatatatataattattaataatgtctagattaaaaatttgccataccattatcagtctgatcatatctttttgtctttatgctgtgatcaattgtgaggccaaaaaaccactattgcctccaagtcgtgatacgttaaggggtaccagattgggcagtaaagctgttcctggtgagaaaatatttaatgtcaagaactttggagccatcccaaatggaagaaaagataatacacaggtaaggaaatgtatatatttgttttgtttgatcagaaacttattccaagaatgattgaaatagcattattgtaactctctattagatattgttgttagaaaatgttatctttcattgtaatgatttcttagaggtgtcattccactatttggaagatgggcataagatttagtagcctagctaccctccttgtcttattcaaagacatctccttgggagtctttttcctcttgagatttctaataagaaaaaaaaatttattattaaaaaaatatacataacatgttataagaaagatatgtaactaataaaggccggctaaaactagccatatctagctagcacattgtcata

SEQ ID NO: 219978 - DNA, 1453 bp, Cannabis indica
tctctctctctctctatttctctgttatttccccattaatagtatatattaactatagttattatacatatatgggtccagtacacaaggtaatgcgtgcttcgtctcttgtagtagtagtattgatgatcattttttgttgtggaatgatcatgtctagccaaggaattaggactacgtttgtgaagaacgaaaacgacgtcgtggaaggtcatcatgagctcatgatcatcaaaggtacctttggcgatctcgaccgtcgatcagttttggaagatctagataataataattttaataataacaataatcagggtgaggctgatgagattaaggtttcaaaagcagtaaagaatactgatgatatcaggcctactgccccaggccacagtcccggggctggtcataatcatggaccctcaaccgttccaaactcaaaataataaggttacatgattcaatatattactaagctggcatggtccatcgagttaattataattatggttaatgatctacgtaaagttgtaatagtatacgtattattatatattatttcgtatgataaatattgcaatattaattctctctattttgtagtctttaatatgcctcatgccatgcactacattaatcaataaagtggaattttgttatcagcttctttacaatattgcatagatgttttattgatcgatattgtactatatatatatatttattctgggtatgattagatgaaacgtatttttatttttagttccttttcacacaggcccataacataattgcttgcctgaaacactaaaatttatttctttatataatttattctcgaattataattgttgacatatgattttgttgcataatgtaggaatgtattttgtggtatattagataagtctcagagtacattagatgggtctcacggtaagttaccattttttaactttaattaccctagatcaacaccaaccctcagatcaaataactcttctaacggctgcagtacatcacggaatacattccgtaaaagtatgtcacgaggcaaaattgcgtctcatatatcattattattatttaaagtgtattattgtggaaaatttacaccactgttgtttttttcatttttattttcatttgtactgttgcacaataattatttcttttcattgtgtttactgtcttttcttgaattttaatatgtttatacatatatataaaagggactaatagtatagtaagaattgggtgttatacttatggataggtataataatttctaccgatcaattaaatggtttacaaattaaactttggaaacgacaacttaattaatatttttttatttataattaattttaaatcctatttataatgttcgtgtaacaaaaattccaaatctaactctaaatttaatttttatttttatttttttatttagttttat

SEQ ID NO: 219979 - DNA, 4669 bp, Cannabis indica
gtctttaggagcataagcttcatactaaatataagaaatacgagttttgttggccctaagcaaatttcttaaagcggatgtggacataaatagtatctcgatagacttggcaatgaataagtagtttagaattagcttcaactcaggtctacaaccgaggtaagaggttttcgtggattaatgggatgttatggaataaatgtttatggatctctatgtccttagtggaaattaagccaaaagaattgaaacagaggttaaccattgcaccaatgttaacattaccaatcagtaagaagaaattatgaatcgatgttacccttctgaacaaggattaggttgtattctgatacagtttaggaggcttgttgcctgtatacctagaccattgaaggagtatggacatggtatttcagtcatgatattgagtgtagttgttttgcactgaaagttgggcactattatctatatggtgaacaatgtgaagtctatatggatcacaaaagcctcgaacacttctttttttggaaggatttagatatgaggtagtagcgacgattggagttaattgaatattttaacggagtgattcttaaccactccgggaagtagattagtagtggattctctaaatcgaagaggtctaggacaagtttgtaaaaagaaaaaatctcaccaaaggtagctggaggtataaccagaacagagattgagttcgtggtttgaaaacttattaatatcacattgttgtttgatttattaggaagaattcaaatagcccagcaaggtgactctaaattacaggggatacaaggaaagacttgggaacggtttggcaatggacttttgatttcgtttgaaggactttatgattgaaaataggggctgtgtgtaccaatcagataaggatattaaataaacagttctgaatgagtcttatattatgtcatactctttacacctaggagtaactttgatataacacgatgttaaaatcctctaatgggtatgaaagatgacattgagaagtatgaattggatgttcaacttgtcaaccagtcaagaaaaggtagggcttcatgattttatctaggtgagtaggaataggtgtacaaagtcagtacaattttctgtatgaaagcggaatatgattaaatcagattaatgtgctaatctatttttcaagaaaatagtatctcagattaagatttaagtttatctctatacgttgagagagtctgtgacaagcatgtgtgatagattttgaaagttcctaaaataagcataatctgttgaatgcgttttcatataataacaattatcagagtactgttaatatggtattgatgtagtctaatgattcaagttcatatgatgcttatataagagatggaagagctatgatgattcaaggtgtagagatattaaattctaagttgagaatttaacctttcttcaggtggttccaaagaaagggaaatttggaaattagaaagaaagggaagttaagttccaggttaatcagttcattttgagtttttgaaaagggtaggtcaggtagcttatcagctagccatactccttgtttttatctgatgtttacaacatatacttcgatgtttcagaagtatgaggtagaagatatccatttacagagttacgagaatattgaatttcaaacagacttgtcatatgaggaataatcggagcagaatttgaacagaaaagagaaagtgttgcagaacaaagactatatcattagttatcgtgttgtgaaagaacaataatattgataggtgatgtggcagttgaagtcacagtggcgggagctatatcccgagttgtttgagtaaattttgaggacaaaatttctataaggcggggatagttgtaatatcccgaaaattatattgataattatttggctatattttattaaatatgtaattatgtggatattaaagtaagattataatcttacttaagctagttacgagttaattagtggaatttgagtaaatgaatattatatttttgaaagaataacctagtaacttagaaactaaggaacatcaatgcatcacctctccctctctttctcgagcatgatagcaccagccaaccaggggtaaattcttcacaatttttcttgaatttgagcagattttgtacctaaactcaaccttgatgctattgaggtaagttctatgctttgtgaattgagaattgtaagttttgagttgggtttaggttagggtttttaattttgaggctgtggaaaattgggttgaggttgtgttcttagatttgtttttgagtgtgctggagtttgaattgaatggtttctatggctgttgaatatgattttagttagatgaagttaaaatgagtttttcttcacttaaatatgtaattttaactcaatggttgaattgttgttaggtgatgggttgaatactttgatttatgctaaatatactgttctggagctgttggaaatgtttggaagaagtttggctcaaaattgaggaagaaaacctatgtttttctggtctgccgaaaccggtggatggttggttcgggtgcaccagaaccggtcgactggttgtcctgcaggaagaattctcaggttttcttctggttctgttttggctcggggcattgcgtggtacctatttgaagttgcttatgagttgtttgacctattttggagttgttgggagttaggttatgtttgttttagaattagtgttttgtttcagaattctagattaaggtatttattaagtttcaattgtcgtgacataggaccgggattgcctatcttgatttccacttaggtcggcccgcaagcttgagtttttaattgaggtaagaaaagtattaagcactgtttatgattaatgatatgattgttatggtctcgattatgattgagacaccgatatgtatttgttgtgaaccttcatcgagattgataatatgtatttgttgtgactcgatggtaatcgaggtaatgatgagaaatgattatttttgtttatgaattgtttatgaatgagcgcagaacacagttatcaacgtttttgtgaatgaattatgatacagtcattaccgttatgagtacttactcttgaaaccacggataggtttcttacttatcatttgtgttaatgggaaatgatagtgacatacgcagctcgtggataacgagttgtgaagattggtaacggtcattactgttaaaagtaattactcgttgaaaccatggataggtttcttacttatcgttcgctttatcgggcaatgatagtgacgtacacagctcgtaaaaaacaagttgtaggggagccttaatgaagctctgagaatatgtgattagagtcctttataaagcactgaaactatgtgtttatggtaatgtataattagaatactttacaaagcattgagattatgtggcgacatgctgaatgaatgtctgttttgtgaaaggataaaattgttcatagtgagttactatgattttcttctactgtgaattttatgggttagtattgatgctaatcaaataagcattgaaaatataagtattcatatcacataataataaacatacttgtgattcaatacctattcagcatgcatatgatctagtaacctttcttgctgagtcattgtgactcatagatgctttgtggtccaggtaagaaggaaagcagttttgttctaccctgagcctgaggtctcccagtaatgtacatctcagtcgtggtgtcttggcttccaggttgcaagattgacccattttctttgattagaaatgtaacctatttttgtaataacggttttttaattaattgtaaaagcacacacgtcgcgtccttgagtgtcagggcgttacatttaagggctcatcatgcagagattgacaatcgtagtcggcaagccaatgtgatgatacccaaagcttatcaatctgtcgggcagcaaccctcgaatgtcatcccccttggtgaaacagacaaagatccagcaatgaatacttctcaaactataaatggtcgggcgccaaatctccggtcacaagttcagtctgtgggccaagcagtaggtggaaagaccttgtctagtaattcatcgagagaagtcgtactcagtaattctaaccaggtaaatggtgtcggtcagcacgttaaccaaaacaattaatcactaagacagccaggcgtttttgtattcaaaaggttggggacgactcacgatctcagacacgatctgaatagaaggagaggagtagactgttagtgtcattattttgtgacagtgtttgttctgttcaatgtctagtcgtatctggatttttagtctgttatatctgcactagcgttctgttacgtgagtttcagttaagtattagttagtgccaggtggacttattttgtggatatataaatagtcggtttctgttagtaaattttttatccattaaatcgttcagacagttatttcggttgtgtgtggagatagagttgtatcttgtttcttgttgttgtgattacaggtcagatcttggagcttgaggatgttcatcaatggcggaatgatctgaatctggaattgctgagttcaaactgaagggagttcagtgtcatcttcatcatcagat

SEQ ID NO: 219980 - DNA, 1836 bp, Cannabis indica
tttttatttttaaattttttaacctacaaaataaaattggtgaaaattatttaatttgcatttattattaactacatccaccacgtgactcattttacgataaaactgaataaaatatagccaactattacaacatctacccgacgtagattagcccgaaggagttgaagtatttgttggtgttgtacgtactgtatgaccaacaaggttcggggggagccctctgcccatgagattaattggttttttgatctcaaattcaacctctacaatcacaattcgatgtacttttacttttctcttcttagctactcgtggctgatgggtacaaaagagataacaaagatgggaggttatgctcaagattactttatagcgatggacatccaagctaaccaacattcgttccaaattgtcaagccattctttcgcccattgctcaccttggagttgaggagtagggcccacaagatagtcaggctttccaaggaggctagggacatctctacatatgccagagaggaaaacttttacaagtacgaactctatccatccactacaggtaagaagaaatccaaataggccaaagggaagtcctctactgcccaggcagtggtaaataaagaaaaggccatcccaagagatcctacgcctcctacccaaccaactcattcaaatataaggataaacaaaccagtggttgaggctggttgatcccttacgctcgttgttaagggcaaagggaagaaagtggtggaagaagagccgattcaaaattttcagatgacgaatgacccattgtcattctttatgatgacactcctcggataattgagagagttgacaacatggatttttactttctcttgctttgccatatatgtatgttgtacttaacttcttttttattttctttttttactaagtgttttgtttaattgtgcggctacgtcgtccaagatgttaagttgactcagaaagaagaaggaaggcaattcttccactcataagtattcagattagactcatagacaagcttctttagtccagggaggaaagacccccccgggcaagggagcggtccttgatgctcagatcaatgggactcaagtcctacaaagggatattattgacttggacgacccaactccacaatctactgagcagactgctgagactccctctagcacccgacctcacactactcctacttccaaacctaggaggtattttcaggcgcatgtccccctttctcattaggccaaaaaggctaaggagatggtgaaattttaccatgactaggtaatatttgaaaccaatgtcttgttaaaggggttgttaaattttgggttaaaacattggtcgggggggctccctagggagttgaccaaggtaagaattttacaagtcttttattttagctcaatatatgcctatcagtaatttctaactgcttctctctttaggtaatcctcaagctcaggcattgctactctcaagtgaagtattcgacgtcttaagttgagagttcctccaaggatctccataaggttgctcatgaagaaatgaaggagcttgagagaaaaatggggcaactgggtgaggtgaacaaacttttgagcactgttaacaataaggtggtcaagctagagaaagaacttgccgaccagaccaaggttgacaagttggagaaggcacttgaaggtgaaaccaagagagtcaatgagctagaggacgaaagggaaggctttcgtcggctaaattacgctctcactgaccaggtggatgagctggcgaagtccctcgaggttgaggaagaggcccatcagaaggaca

SEQ ID NO: 219981 - DNA, 3056 bp, Cannabis indica
tagtatattatatatatatacacatatatatacatctatatatatataatacctcctccgcccactatatagtaactttaaactttagtaagacgccgacaaatagacaagactcacatatatatatatatatatatatatatataagtgtcctttttattgcttgatcttttaacaactatatatatatatattcattcataattattattagtcaaggtttcttttgactttgattctttaattaattagtgtttttctacttttgatatacaatttccaattcttatgaaaatcaactcatacaattaatgcacatcttgattgtgacacaaattaattccaaattataaaaaaatatatataaataatttttattttttaatttatcacttcactgctactgattaataaaaaatttaattacctgttaatttttaatttattaacgattttgcttctgatttacttgttaatagaaattctattttaccaataattaacgatgtttttatctaacaaaattaataaaaaatattataatagcgataaaatacgaaaatctttctcgattattgttttctcggggcttctctcgcgatcttctctatcacgactatttcagagaagccctataaaatcctaatgagaaaacaatgatcgagacgaggaataaaatcttcaatttgatctatgaaaaaaaaggatgaaaaaaattgatcataaattaaatattatatataacaacaatcaacaacaaataattagccctaaccctaattaaggatgttttgtactattaatagtaaatcaaacattgatcttaatattatgtagttttaattatctcatcagtgcgttcgtcataattaattatatcaccaaattaggctatatatattgcaataatatattgtacgtgatatacgaaagaattattacaaagaagaaagtcattgttaaaagtggacttttttaagcacgtgttaataaaaaaaataaaaataaaagaagtgggcgcagaaaaaacaaaatttatttggacccattttgtcaccaagtgtagataatatattttttggtataaacacataactgaaattaaagagccacctcaagtaaatttataagagataatatacatatatatattttttatataaatatatttaaacctaactgcctaatttttcctacctataataatagttcattcccatagtctaagtctatagctattaatacaaattatttattaacttataaataaaaaataaaatcagagattacgaatttgactatcacttatgtaataaatatagatttagtacgtggcaccgacttataatatgttgtaattaattctctaattattattattattttttatgaacaattctttgtgtattgaatgtacaattatataatcaataaacaaattttttgaatctttcaaaaaaaaaaaaacaaattttttgaatgtgtgtgttgttggagaaaaatgagacaaactaagtaaaatgttattattattattattatttggagagggtttgaatttttagttatttatttattagtagaaatgtattatacatcattaagtattattttatttggttacatcatcatatgttataatttaatcatttgtagcatcctatttttatttaagtatttggctgaataatataattataaatggtataaatatgacttgtttgagactagtatatatagaagatttgaattttataaatcttaattattattatattaggaaagctattttatttaatttaactaaataaaattgaggaaatgattttaaatggataagtattattattattattattattattattattattattattattattattattattattagctaatgtgagactctacgttttatacacaacacatgaacaatatttgaatattaagaatatccaacattgcaaaactagctagacctgctctgataccatattaggaaatttattgaacctaactcaacttaacaaaattaacttattaggagaggattgtcctcaccttattaagtgaatcgagcgtatactaccagccaatgttggactctagtaattatttttatagttaaacaaattattgtaacttttttttttaaatttttttaattttaagcactacaaaaaactaactaattttagttgacaactttttagtcacaacattaatttttttgttgtactaaatgtgacttttagtcacaacaaaatattacttgtgactaaaacatagtatttagctacaagttgtcactaatttagttttagtcacaacaattactgtgactaaaaatacatttagtcacaacaaattgtaatttttgtgactaatacctttagccacggaccttttagtcacaacataggaataataatctataattagtcacaattttttcacttttagtcacaagttttgttgcgactaaaagtaaaattttttgtagtgaaggaagccaaatgttccattactttaagccttcctaaaattgtaggtcaactaaaaaactacccttgggtacattatctctgtcccaaatttcatatgatgagaagaatacataatatgggagttaaactttatttttttttatgaaccaattataattttcattactccaaatgatttcgtacaatctaatagcctcaccaaactgtgtaagctaattttatctctatacatgtttttatttacgttataatgaacaaaattattcatctctatgacactatcattttttggccacatacaaaaaaactactttgtttcacaacctccttaactctagttactaatctgtccacatcttcatttgtagtattccaaagtttgtcatttttagccttccacaaatggtatactaagctagccgttgctgtgcaaacaccttctttttgtactttgctacatttaactctctcaatccacctcaccaaccttgtgactgatatagtttgcactttctagctgagccactccttcacttttgctaa

SEQ ID NO: 219982 - DNA, 10572 bp, Cannabis indica
aggtcttaagcaagacctcctaggccagccaaggtaagtttttgaatcccaatgtgtatttttctttcaaaactcgaatatgtgcctcatattctttatgactcaaagagtcaagaatcatagtgaaggccaagattgaatcttttctattaaaaagtcacatattacacattccaaaactattatgaggatcaatataccaaagagatacaaactaacatgaatcaaaaagtttccaaatgcttaaaaagcttaaaacttgttaatggaatgtacgaagaagagatacccaagaagagaagatgagacgtatatagagagagaagattaaagatccaaaagcatgtcaggtaaaaagccaacacttagccagataaggctgcttaacagagactactatagacaagacgatggctagaaagtccctatctgactagacgttcgaacatggacttgggggcaaatgttatcccaaattttgtccacctgacgtggcatgtccacgtaagccaaagatagagtacaggtggaatacagccccgccaatagcagaacagagcctccatgcaagatatagcgaaactgtcaagcagcaaccgaatggtgtgaagtgagccctcaaagagttgtatcaacatccttggccagcaaagagaagcatataggctgaccagggtgagcctataggccagccaaggtctgtgcacaagctggccgaccaagaagtgactttcagacctgaggagactccgttcgcgaccaagggaatctaacctcttcaaggaaataatgtataaagctgtcctcaacttgcaaaaggctagcttccacaatcaaaggttggcctcctcttggtggagctatattgacctgccatgtcctggcaagaccatggccagccaggattgacctggcacgaccatggtcggtcagacatccttataggtctataggcagctagggttgacctggcaagactccatgaataattctacacgtggacatcaaaggtgggctgggaattgggccctaaaagcccaacgaaatggctgaataatatctataatcaagggcatttcggtcttttgtaaatatctaactaactatgctattttcaaggaatttaaattgtaaacctatggtttaaggcttcctatataaaagccttaacctatagttgaaaacctaagttgactctaggtcaataagcttcaaaattattctaagtcaaaaccctagtctctcgtcctctctctctgttacacgcccccaagggctctcctctcttctctttatctctccaatacgcctttaagacaatctctttctctcattagagatctacctactgattcatgatttgtatctttatagagagctatatcagattctacctatagtaatctgaatagtattatctcttggtatcaatacaactaaaagggaagtaggtcattacccgctatcacaagggggtcaaacctctataacaaatctttgtgtttattgcattttcattctgcttgtgtaacacgtggcaagcatcagatctatacgactcagctattagttaattattttttgaggtcaacaactttcattgtgtacctgatttagtaccataaaactaacacaaacagctcgggagaagatctcatgatcaagatgcagtagactgttatatgataaagtagccttgagctttcctctttgtccagtagcctgcacattctgcttgttgaagacttgtcttaagacaaatcttcctccaataccagatggtatcttgcaggagttggtactcccagaagatcacctcttttaagtaaatcatatttacccacttcacctataacacatcatgttttttcatgattgtccaaacaaatttagcaagaatgacttggttctacttggaatcatctttaaaacccaaactaccaaactttataagaagacaaacaaaatgccaagaagctaagtgaattttacttctatttacatgttttgttaaatgccaagaagctaagtgaattttacttctatttacatgttttgttattagttataaaattgcacatgatttcatattaaaatttagtcaacactaaattaactatgatattcttagaataattttcttaaaaaaattcccttgcttaattattttatttgagctgtttaattatttgaatatacaacttggatatttacatatgtacagttttatttataatgtggacaatgttaatagtactgacaaccttttccccctcgattttaaattaaataaagaaataaaaaattagagggaacaatagttattgaaactcaaatatcccttagaaattattgcctagatatgcatgttgaaaaaaagtggacaaagcaaagactacatgccaaaaatttgaaacttttattaccttttgcaacattttttgttatacatacaagtaagcaggcttatattacaaacttgatatttcaaaagaagaaaaacattataattaacagtactgatgaatatgacatcatcatgttcttcttcttcttcttctttcttcaattatataatcaccaatagaatgtgatcatgatctaattttgatcttcaatttctttttttcactttggattaattaatattattttttactaatgacaaacgacatcttcaacgtcatccaatcccatacccgcatcggcaagcctcttttccttgtacacgtaccactgagtacacaccaagaaaatgatcatattcaaagcactcaaaatagccaacaaccaataaaaatcatagagctttccttggttgagattatcagccaaccatggattcttcttcccagtcaccacatgaactatagacactaatagagagctaaagaaacaccctaatgccaatgtactcaaaaacagtccagtgctcatagtcttcatccctttaggacactccctaagaaaaaagtcaagttgaccgatgtaaattaaggcttcaccagaacccacaaagaagaattgtgggaccaaccagaatacacttatgggaatctcagccttgggattgttggtaagaccatgcagtctggccacgtggatgcgcttgacctcgatcaaagctgcaaccaacatggctaggactgacaggaataatcccgccccgatgcgttgcaacggggtgaggccttgagggttttttagaaacttcctggcaattgggactacgactcggtcatagactgggacagttaagagaatgctgccaacaaagaaggctgtcattgaggcaggagggattttgaaggacttggtaatgtggcagtccatggtggttgcttgggatactgagaaagttgacatttgggcgtacactgtccaaaacattatggtggtggcccaaattggcagcattcgaatcaacaattttacttcctctacatcggttagtgttgcaaggttccacttgtttatcttgtttggggttagttctggcctgttgattgctgctttgtccaagcaactaaaaaaaagaaagatatgtagttttaattgataattaatccggtactaatacacaataaatataagtattcaaaaaaaaaaaataataataataataacattccaataaagtgttgtgtaagattgatcttattggcttaattaatgcatgcgattactcggcaacgaaaacatgatatgattggagtaattactcgatcgtacacgtagggtatgctacatggggtcacatgtttttctttcttatttttatttatatatttatttattgatgggaaagaaaaaagatggggataaagttaaaagggagaaaaagggttcagaaaaattaaatatgcaataagacaaacagagtgatatattctgtagggagatgattttgttctgtgattgtactttcatgaaatgtatttcgtgatgtatgacagccgttagatgagggagttatttgatctgagggctgaaattgatctaggggtaattagggttaaaaaataataacactcatttaatatactctgagactcatctaatataccacaaaatatattccgtgaaagtatatcacgagacaaaatgaagaaataattattttgtaaagtaattaattgaaaacagtatgtgataacagggtgcatgtgaaaatgaagaaataagtaaagatagagtaggcagtgactaattaattaatgcatccgtgactgggctatatacctgccagtaatacttataataataataataagtattttttgtggtgatttcatcagttctttttttctttaaaacaatttgttacacgcttatatatatacttctttctatatttaattatgagagttcctatttgcccacaactaatttcactcgtgattctttggactttggttgctgtcttgtaaagtgtagcagtactaccagtactctctctacattttacatataattaatgactattttactaccactatagtacattttcttcttacgacaacactacgtacaagtattaatttgtaatctattctcctgacttgatgtatttgtttgtttctcattctttattccatattttctctcccgatacctaaaaagttatttatttaagtaaatacctctttatgtttatttaatatactcaacttttttattttattttaggcaaaatttttatgtatatttttttacgtaaatttgagatattaagtttttcttttaggcatacaatagtcattcaattaatatttaataaaattatttaacttgggcttccaatttacaagaaaaggaattaaacttacagattttgcaaccaaaaaaatatataagattaaatgtataaaaattaaaatattagacaaattactctatttaatatgtaattgaattagttattagggccataattgaagacatatacgtggaagctagccacgtggcattattgtctatctcaagacaacaaattggcgttatatatgcatatagatagctgtacatgtaacatttgggatataatacatataaatagttttctacaaagatatatgaatatatatatgaaggggatgtaaccaattaatagacaaatatatatgtaataatactattatatatgtaataatacgtcaataattattaattttatttcttgtttggctacattataattagtcgacatggatctattgaatcgatctacaattggtgatggtgattttattcgatcaagaatgccccactacattatttcatttttatattatatgtatgattaattaattttaagataagccgactctggttgtcagcacctctctcttcaactacttgttagtggcaagtcctaattagccaacgtgctttagtaattaaaattaatctctaatcatagatatataaaatactaattaattactcttcaaatgatttcttttcattaataaagtcacatgtttatatatactgtgctaatatcttcacacgcaactatatatataccaatccaaattagcctagctagctagagccagctaagcaagtttgatcgatgatcaattattcaattatggactatctatgatatatattgatcatgagtaaaaggacttcatcaataatttattcaccaacaatataactcaacctaaatataagccccggccccgaccacatgatatatatatatatacgtagcttaattagctactctatatgaaaaaaatgatcgaaattacaataattattgttggttcaatcacacttattataaatttaaaataataacgtgtatggtccactatttttctttttactgcatattaagtcaacaccaccattatgatgtggcattataggattggtttattatataattatatttttatgattagaccctcacatatctagtcacatgttctcatgtgtgtctattagtatgaaatttcttctttttctgaattaacgttagtttgtacatgtactaaaaagtaaacaataatatataataataataataatataatgattaagtaataataattataagttataactggatcgactaacctgaattgctttgaatgagggagcttcatcatcatcttcttcttcttcttctttccatcagcaatgtcatcgacattatagaacaacgacgggtcagatggcgactccagtctccgattcttccaggcggcgacaacgacggcggctatctgagtcaagggacttccaactagcttcttgaaacggtaacgtctagttccggccaagaagacaaagaggccgaaaacaatggctaaagcgcatataccgtaaccccattgtcttccgacgttgtcttggatgtatacaagaacggtaacggcgacgagtgagcccatgcttatgaagaagaagaaccagttgaagaaggctgtcatttgggatctctcttccttatcggtctcatcgaattggtctgacccgaacccggagacacttgatttcagaccaccggttcctagtgccgtcatatacagggccgtgtaaagaaccgttaactggatcccacttgcagggatgcacgattcactctccttcgtgcattttggtggttgtaggcttgggatcatggtcgataccgttaatattgtcacaccctgaaaattaatttatatattggtttggttaaaataactttcctaataattttcaaagaggtgagagatttcttacggctgcttgaacggtggagaagatggcaatggtgaggtagcggccgaggaaggtgtcggcgacgaagccgcctagcaagcagagcatgaaagaggtgccgaggaagtttgtgacggtgttggctgaggtagcattgcctaagtgcatagttccggtcaagtatgtcaccaagttcaccgctatacctaacgttgtcaacctttcacatgcttccactcctgttaatgcgtatacaacagttaattacgcgtgtatatatatatatatatatagagagagagagagagagaattatgtatgtgggaaaggtaattaacctaaaatcatggcggcggaggtccatccgccggatctggagcgctcggaggggtgacctcggcagtcccaagaatctgggagggttttcccctgagtttggggaagatggccgacatcactggtcatgatggtatgtatctagtctaactagtattttgtatttatatttaattaatagagtcgtagagataagagagaatatatatatatattatatatatatatgagattgagagagagagtatgtatgtttgtaatgagagactatggcataaagaagtgcagatgtggtggctttatatagtagagaggaacttggagggtcccactttctacatgaaatctatttatatgggcggtggcttattcataaaagacattttttttaccctaatgagactcttaattaattcattgtattaacctcgaacacatcacaaagttaatatcttgatgatcatatatatatacacttatttggttttacatatagtttatgtttgtatggtcttaaactttttacatacttgagttttagattctattattatctttaactcttctcaactaaaagccactaagtaaaattgttaaacgaaacagttgtttctctaatctctgttattataaacgtaaagtaatatatgtgtgtgtgcggaaagaagtttgaaatttttttcagatctctctctatcacacattaattattttgtgcctttatgatccatatatcaaacttttattaaccatatgccgtggttgttaattattagaaattattatataacgtgattatttttctttcttttttagtttgtttggttgttatattgactatctaataaactagtttatttgataggttgtgatttcgatgggcgaatctcctgtttttcctttttatgcagacgtggaaagtgataataattaactaataactgtttttaataatccataaattaataatgttacctcaaaatactaaaaacaaattacaaaaatcatcatacataatgagaaaaaaccgcttaaaatggacgataaataaataagtgatatactagctagtatatttgtttattttcttgcaataggatatagcatatatttttataaatgtttaacccttaacttaggatgaatctaaatatatatatatatatatatatatatactaagtatcactaacaaaaaattttagttttagccaatataaaacttatgactaaaagtaaaaaaattgtgactaattataaatcatgattttatgttgtgactaaaaggttcgtggttaaaagtatatcacaaaaattacaatttgttgtgtttaaatgtatttttagtctcaatatttgtattgactaaaactaaattagtgacaacttgtaactaaatactatgttttagtcacaagtaacattttgttgtaactaaaagtcacatttagttacaaaaaattatgttgtgattaaaaaattgacactaaaagtaacatttttttgtagtgtataaagtcgccctctaaagtgtctttattttactttgtctttttttatacatttttttaagtagtattaaatataaattaacctaaaaaaataaattaattaatctaattatatatatcaatacctaattaaatttataggagattatagtttattatatcacttataaaaatatcattttttctactaataataatattattacttttaaaaaataactttatgtatatggatatgaacgttatgtcgcatattaatcggtcatcactagtgcaaaatgcgacaatcatcatttgaattagctggttattaaacaattaataagctgtcattattcatttttttatctagtactactttataatttttccaaggaaatatatttgattaatcaattattggtactcgatatctcatcaattagtgaaggctcagtttcggtcaactatatatataattaataaacatacaccacttatatatataaatattacaatataaaaataaatctttgactaattcagaaaataattaccatttaagtattctaaaaagtaataatacacacttaattattatcaattataatgtgtaatttttcctatttatacaattccggatccatatatgataaggtgcgtaatttgtattagataatatgtaaattaaaattgtgtttatcgatcatgattatgaatagattattgccataacacttcaaggggccaatatatagcacaagaaaatgacagtttatgagtgattatttagcttatttttatttttacatatattgaataaaaatatctatgtgggagttgatatatattgaactacttataccagagcgttggacaacttaaaatcttctttaaggaagtttttggttaaggaattttacagttaaatttttttagagtaatattaggttaaaattatttcatatatatatatatataagatataagatctttataatatatggaacatttctaaaaatgagtcttacctaatgattgttattaaatataatttactataaatattaaacaatattgatccataataaaattagaaagtttttttttttttacttaatttagttacttaattataaaataatataaaaaatattcttttttacactcttatcaaaaatatatttatatacataatattttaactcaaactcaacattttatttatatttttaatttttttttcagccaattaaaccatcccaacacatatatgatgtaaaatttgagatttaatttttaattaaataaaaaattcaaaattcaaaatttaaatttttttaataacaatccttcataaataatacttattaaaaatacatccattcatgaagtctttccgtttggggggcttgaaattataaaaggattctgaaaattaaaagaatgaaagaaattataaggtataataccacagctcacaaatatatggtaatatatatagaaattaaagaaagaaatcaagttaaacatggaaactatatagtaaaactactaaatggtggttagtattaatccaagaagcattggccggtctacttatatagtgacacttaatttgttaaacttttatttattattacaaaaatatttctcagtgatcttgttgggaattgatttcatccactactttctaaaggtcacgtaaagaaaatgattattgatataacgttaaatagttaaggtcttttttttttcttaatccagctaagtacttcaatattattttattttatacaaataatataatttaaattaaataggtatatgacaaaatgaattagtatttagaaaattgaatttaatttaattagtcaagatgtaacatttttaaaagggtacgaaattcgatagtatatttaactatttaagtttgtatatatgacatttcatatttctgttgttagtgatattgttacttgtattaagaattcattgttgttcagtcctaatctggtcat

SEQ ID NO: 219983 - DNA, 1429 bp, Cannabis indica
tataattataaatatatgcgtgtttcgggttcagactcatatcgtgttaaaagatctaactcgtatttacaacactactaataatatcttaataaataataagttatattagagtgtaatgaaatgattactaaatatgaagaataattttaagttaaaaaaaatagtattttattatttattaatttatgaatatgataatgcaaaaattaaaataaataaatgttttatatgcttccgcgtatagaacgcggccgataccccatgctgaggtaaagctacacgacttaactaattccttccaattctaatttcttaaatattaattttaatcttaatcctaatcctaattatgactaatttttttattatttatttattttttaatctttttttttttttgctatttgatttgattgaattattatattatatttattcaataagtgcttctactatttctattgtaatattaagtcataaaaggcactaagttaaattccaacttctcattattgttttgtttattaatgctcctatatggggtctacatttgatcatataacatgcgacaatcttagatcatcattatatttttatatataaatctagatgaatatagtaacatttgcttaatttaatttttcaaaaaaaaaaaaataaaagtattaaatctcatattatttaatttaataattatcatgaaaacattaaagtagtattgagctagctttttattttatcacgtgaaagagactattacattaaattggaattttggtacaccaaagagtacgaaaatatagatatttttgagactatcattgtgaattttattttgctaagcgactttatatattatcatttttcaattgctttctctttttgtttcaatgttttaaaaagaatatttgatatcacatatacaatatgaaataatctatcaatctatctatataattatttataaaaaagagaagaatgatgagatatcatctcatatttttaaaaagtacttttactaattggtaagagcttcaagtcttgtcttaagaaaatgatcatatgatactaatctaattttgtaagaaatctaacattatttagaaaatattgtaggtcttctatatgtaattataaataagagtttctttgttatttttatttgtccaaaaattagtatattgcttgttatactcttataaaaataacaattacaatgataacattttacgtaggcatctaggtgataaaatcaccatgtcggcctcatcacctcaacctatacttaggtggtggcacgatgtcaactcacttttcccaaagtcgaagtactctttatcagggcatcatctcagccctagccgagatgcacatcttcgtaagtgcattgtaaatacagactaatatgtacatatataattttttt

SEQ ID NO: 219984 - DNA, 1750 bp, Cannabis indica
ggagtcagttactgtcattcaatggtaagaattttgtttgaactatccttttgtgatagatatacatacatatctctaaagaactgcattgattatcaactttgtcattgtctaattatttaatatatgacttctggcagcaaatatgtcatagagatcttaaacttgaaaatactctcctagatggcagcacagctcccagagtgaaaatatgtgattttggatactcaaaggtaactgaaatgatataaaaagattaagcatattagatttttaagttgattaattggtgaactttgttgtgtatatagtcatctgtgctgcattctcagccaaaatctactgttggtacaccagcttacattgcacctgaggtcctctctaaaaaggagtatgatggaaaggtactaactccattcttaattaatttaacctcattttcttcaaccatggcatttagtgagtgatatgatgttaaaaattatagattgcagatgtttggtcatgtggggtaaccttatatgtgatgttagtgggtgcttatccgtttgaggatccagaagacccaagaaactttacaaaaacaattggggtgagtgagtgattttgttaagagcacttctaccaatttttttttgtgagtttttataactaaagatttctgggatattatgacagcggatacttagtgttcattactcgattcctgattatgtcagaatctccctggaatgtaagcatcttctatctcgagtatttgtggccaatcctgaaaaggtaaggtacactaataaattgatgtaaatatattttgaactctatttttgttacttgctaagtctgtgtttttttaacagagaattactatcccagaaattaaaaaccatccatggtttctaagaaacttgcctatagaatttatggaaggagggagctaccagagcactgatgttaataacccatctcagagcattgaagaagtggtttctattatacatgaggcaagcaaagttgttgaggctcccaagcttggtgggggtttaatgggagggagtatggatcttgatgatctggatattgatgcagatgtagatatagatatagaaactagtggtgactttgtgtgccctttataaaatatataattaccatgtaaataaacacattgtcacaaacatacatgttcttctgttgtacaatgtacactttggctttggggaaactggaaaggagggattccctttttctatgaattttttccctctgttagcatagttttttttggtgatgtccattttttttttggggctaaagtgtgtgcgagtactaaaataaaatcgtattggttaggtagttattggcttccattatgatatgtgtacactaaatcccttgacaattagcttgcattgcataaatttataaggatttataatattctttagccaaaacaataatttttcaaatactagtattaaaggaaaactattattgttattacacttagtgaggcaatggaattgaatggagaataaataatttttattttatttatttgcttggttgtatattaaagtattagaatgtcattctaatgaattttttttataacattttggtgaaatgactattctgttttgaaatagaaggaaaaactattccaattcaagatgagaaataatttaataatttttatattgttataaaataatataaaataatataaagtagatgagaagaaagaagaaga

SEQ ID NO: 219985 - DNA, 4054 bp, Cannabis indica
gaacatgctactttatcaaaaaaaggaaaaaaaaacaaacaaacaaactcattttggtacctaaaattaagtgttttgagttttatatcagtacaacatcgtttttacgttaattctagctttcaagatcacttttcgatagaacatcgatgttgtaatatttttgcattgattttcacttccaaaatatggtttactatcgagatcattgcatgaacatcaagttggcatcactttttacctctaaaatcaagtttcaatgagactatcacagactatggtttttaggcctctaaaatcaagtttatatggggttgtcattggagcatcgcaaactatcattttatcgttattttttgcctctaaaatcaagttttgttggactttcgttttagtattattttaataccttaaattaagttttcaaggaatcatcgcatgtcgtcattttagcactgtttttcgcctctaaaagcaaatatttgtcggattagtgcaaactattgttttagtattattttttattataccgtcaaaaagtatcattttagtattgattctaaaattgtactgaatttcacattaaaaattacgaataccagaactaataaatgatgcaagatgtgctcatgatatttaaattagtttatggatatgttttacatcaacgatatggtcaattatgaatgttattatttaactgtgaaaattgaaattatccttaaatgttgaagaaaaaatagcataaagcaatttttttgctattatgaaatgtttatgtaataagggtttaagtaaatattttctcaggtgtgtgttctatattgatgttgaataattaagaaattaaaagaaataatggatgctttaatggtgagggggatggtgttagtgataggtgaatggtgaggaatggcataaacaaagcaatggggatttctgtacattgtctagtggtcccaattattaagacaactcattatttgtgtaataattgtataacaaattttgttaggaaaatattcattctaccccctgtattgtattgttaccctttgtatacgtggccatctataatattcttgtaattggaatttgcctatataatgaaagcgatacagcttattcttttggagctaagcaaaatattcattctacacacattttctctctgtttttaagttagtatcagtgccttcactgatgcgttgtcatctatggcggctccaggagagaagacaccaaaggcctctattgaaggtcacaatggtgctcagaaagtaacaacatctgcaatggcttcgaatgttgtagctggaagcagccaaccacagacttagtttttcaatgctgtcgtgcctcattttgggagaacactaaatcaaccgtttgcttaaagttggatcacaaattcacactatcgaaaccatagcttttgaaataacgtatggacacagacttgatggctatattaaagatactcttcctagaccgcaagattttctctatgctaatgttgatggtagtgaagtgtccacaagtgaaattaatcctgcctttcagcaatggattgtacacaaccagttgcttttctaatggttgtatggctccatgactgaaggaatcacatctaaagttatgggatgtgattcaacaacctctttgtggtctgtactcgaagccttgtatggagcacactcaaaaatccaaaatggatgaatatagaactaggattcagacggttaggaaaggagctttcacaatcctagattacatttgacagaagattcaatgggttgatgctcttgcccttataggagacccttacactgaaaaactacttgtaggtaacattttctcaagattggatattggatatcttcccatagtactgctttttgaagcaaggccatccaccacttcctacgacctttcctccctttggctatatcgctggttcgaattaggaacagtaggccctttgccacgttcaaggtcatgaataggcaaattcaagtcgagcccatttgggttgttttcagctgagtgttccctatgattacaaagaatattagtacagtcattatgacgcctagtgctgttagttacctgatcatctgtgcaacgttaagttgggacttgtggtggatgtcagatccgaatctggatccttcatgtgactttctacctataatgcatgcatctgtttctacattatagtgtattatgcagttaccagtttaatgataccctcgacggcgtgggtaggtgttattggtggaaaatggcccacagccatcggcattgaggtttctatagtgtggcctaaaaatataagaaatagattgaggggggtcgtggtagtactccctactcctccaacagaagggtcaactagagtggttcttttcctagtaatcggaacactgatagtgtcaatgttgatagtttcattgttattgttgttcgtgtttatctgttttgtagccattttaattctcctccaaaatctgagaaatgttataaaagtgattcccacaaacgatgccaaatattgtcaggagaatttaaacaacaccaaaaagtgcaagtattcaagcaaagcaagagcactcaccaacaattatgcgagttgacaaaattcaggctacgaaatgggcagtaacaagaatagaaatataaagtagacaagagaattatagtggttcagtcagagcttggtttgcttagtccactttgtgagatatacatgccttgtttatttgatttattatttgattttgatcacccttttatatagaaagcatgtgtttattaatattacataattgatcaaattgaactgttattacaataattgcacaaattaattaagataaacatttaaaggcataattataagaagatattcatatgttcttgtcttgattacagcaatgtctgtaatttgcgaagtcacacgtcgtctatccatattccaaacaagcaagcttgaaggctcgatggtgttggactcgcataatgggcctttaggcctacttggtttaaggaatgtcaacaatcagccttgattgcatatttggacatcctaagttgataacttaaaaaatgtgagttcattatgagtcgtcgaatactagtcattcgaaccaaacctatgtaaagaagcgatctttacttgtcgcatgagagatatacatgctaatcgcatataagatatatgcgtgaccagtattaacttctcttgatcctgcttatcttttgactatgtcagcaatggcgggcttaagatttaaagtgaggggagcgtaatttttttggtaaggcaagggtaaaagtaaacttgaaaaggagaaaaaaatactcttagtgggatttaaacccttgtcctctaacatatatgctatctaccttaaccattaaaccaaagctaatattatacttataaatattatcttttattataagtatatatcgtaactaactaaaatacatacattttttccctaatttttttagggggcgactgtcccgcctcgcttctatacgggtccgcccttgatattggacatagtatgcgactagaccttatcttggtcgcatcctcccataagtttaaattatgtgaggttggctctacaagagctatatcattgacacattatcattttctattgggaactggatccacatgtcaatttcttacgaggttttgtaacttgtatttctaggtaaaaaattcgtacaataacacaaaatttaagaaaaaaattaagtaacatatatataatatatatatatatataaactctacctttagtgacaaccttttaggcataatataggaatatggtgatttataattagttacaatttttttacttttagtctaaaataatattttttatactgaaatatatatatatgaatgattattcaataattacattaaaaatgtaactatgatggttatatttttttatgatataccataacaagtaactaataggtaaaaattatccttacaaaatagaaaaaaaaaaagtaaaaattc

SEQ ID NO: 219986 - DNA, 2355 bp, Cannabis indica
cttcaagtattatagttaaggggataaaaaagaattttgtccttaaatatattatctggaaaggactaaaaaattagaggaaaagaaacgggaacaaattcgaaaggtcaactatatggagcttcataaaagaagtagttggcacttagcacaagaaatcagcccaatgaaagtcaactatttcctagatggaaaaataaaatgcctttctccactagaaagtcccaatgagaaaaggctttttataacacctgggaccatcgataagaattgatttctatccttttagggtaccaaccgaccccttttatatttctatcttttaacatataggtcataatcatgcatatatgttacatttttattttatttgatcatttttttaaacacattttatttaataatttaagtatactgtatttataattttcacagcagttgctagttagtgaatattgttaatactatacaccagaggaggagaaataaaatatattgatataaattaaagtatatagaaccccttataatttaaaatatcattttataatttggtccatatagctaggcaagggttattattattacagcttctttttattcccaccaaaaatattattccaagaatatatataatatacatggacgcctttttttttattagaaaagtaagtaattaagaaaaaaacaatgttctataatttgtatttgtatttaatatttataaaaatttgaaagtttagaccttggaaatggtggagcatatctctcctatagagaccagtacttttttgtgtgaagggatgtcgagtgtttgaggattggttgaaatagaaagtttgtctagtaagagagctttttattttattctattttaatatttttcacattatacctacgtgtagtaattataactttccatgcactagtgccccttaatagtattacaagtacccaatacgacaaaaaatagttggccagacacgtgaaaatgtttttcattcttcaatttccaagtttcttaataattatatataactatatatgcatacaaatttaattatttatatagatatgtgtgtgttgatctttcatttctgctttatattgttgtagccaacaaatgattgagaatgaagaaaaataaatgagtaaatatatatatatatttatatatatatatatttatcatttgaagagttactggggagaaagataaaataatgttgttaaatgattaattataggatatgggcggtgtgtgataattgattacattacatctttctcatttgatctagtgcaaaaagtagtgaagattcttgaatattattatagtaaagatcatattaggaaaaactaaacaataatagaaaaaataaataaataattccggctgtcaaatcgtggtattcaatattattgtgtgcggtttatttggtttaaagacaaaaacttaagaatatatgatgatgatgatgatgaggagacataatacatgatcaaaggttgggatcatgtatagggatttagtatataagtgcctcaccgaaagttttggctctctcctacagtccaatcaaaccctactcattgccttcatgtattttcatatctgaaatttaataaatattttctctagttgttatttctatcacttttctttttggaaaatgataattattttcatgatccactataacctttcgagttggttaaagtatataatacttagggtagcaatcgtttctctttgctttctcactttaggagcttataatgaccttttcctttttcttctacctttaatttaaatagagatttggttaaaagagatggtatataatatatttcaaatttaggattaaacttgagattgatagttaaaaaataaatggaatatgttttgtcaaaatgagttcaatgaattactcacatttcatttagccacttggacaacatttaggtgcattctaaaacaaaatgagacctcaccaaaaatgtaaaaatacacaggaaactagggagtatacctaacacaaataatagaaaggagagataaagatagacaatcgtacctcacttaattacgattctataactaggtcaagaacgttctcaataaaagtatgactaatcacgaatctaacttatactcggtactttaatcatattgatgaggtagcagttaattcatactttttgaaagcctagcatatatctgttgatatctcagtgcaactctatgtagacttcattaatattctaatatgctaagctgatgatggctaccgatttggctaacatatatttgttgacatgtcagtgcaactctatgtacacatcactgacacc

SEQ ID NO: 219987 - DNA, 2510 bp, Cannabis indica
aaaaaaaaaaaaaaccgtttaaataagtattactcacatctttacttttagctagcaaactacacattaggtgggacaattgcatagataaatctcatcacattgttgtctttggatcttcttttgtgagagaaaaaataaaataaaataaaaaataaaagcttccttaatctaaaatcaaatgactttatatttgcctcatgattataactagtgtggtagtagtagtaagaaattgacacaaaaaactgaggcctaaaatagtggaaattactttcattagcagggtatgaacaagacaatcatcattaaaggggtaatgatttattttcataaaagttggtgagtaacacaacactggaaaaaacaaaaggtaatggatggtggacctcacaataattcttctactagtttcctactgattttcatttccttcttttgcagctttaccctgttaaataaagcataaaaagtgtatgaagaagacaagtagctcttttatatttttatatgctttgatctaactttgttaagtttggtaaaaattacgaccaaaatcttcacacaaatctttagaatgtcaactttggaggtttgcttgtcattatcataatgagatacgtttctgaagcagtcttaacactcactcactctctccttattaagctcaaaaaaggtttcaaaaccatagccaatcatcaccaccattcaccaaccaaacatcttccattttattatttcatgtgctttcttccatatcagtaaggtgagtagtactcttgaattaaaaactaatactccttcatgctccaagaagttccctctttctttctcatttcatagacttttgcttaaagaagtaactttttcttatgaagataataaattagcaagaaaggtgtaattgttaccaaaatcccataaagataaagctgtcttttttttttcttttgtattgtgatctttttgacatgtccagttcgcttgcattcaagagaagaaatggtactgttgttcacccaaatcctcttcttcctcctcctcttgctccaccactttcaattccttctaatagtgttaatggagaagtagtaaagcccacaccaacacaagcaccaaccccatcttccttttctttaagcaaaatcagcccaattcttcttttggtcataatacttttaactgctatcttcttcatttatggtcttgtccacctgcttctaagatttctcatgaaaagaccatcaacttcaccaatcttccaatctaataggtacccagaaaactctagctctcatgttcttcaaagacagctcaggcagctctttcggctacatgattcaggtctagaccaagccattatagatgctttacctgtattctattacaaagaaataatcatgggctcaaaggaaccatttgattgtgctgtttgtctatgtgagttttctgaccaagatgagctgaggttacttcccccatgtggccatgcttttcacatccattgtattgatacatggcttctctcaaactcaacatgtccactttgtagaaggacccttttcagatctgaccttttgttggaaaatccaatactctcaaactttgacgattcttttgatatgtcaaatgtgctcagaagtgaaaatgaggagagtagaggacattcaagcaaccaagaaagtatgaatgggaacaagagagtgttttcagttagacttggaaaatatagaagtgtcaatggagttggagagaccagtagtagctgtaacttggatgctagaagatgttactcaatgggaacatttcagtatgtagttaatgactctaatttgcaagtggtgaagcttgtcaaggagggagttcatcgaggcaagttttcggtgaataatggagattttgagggtaagagaatcagcagcaggcaaaagggtgatagcttctctgtttcaaagatctggctttggtctaaaaacggcagattcccaagctgttctgatactgatatcagtatgccagcctctctcaatgtaagttttccaatcagtaatgaaactcacacttcacaaatggtttaacataatgagtgtgtatacagtatatgtataacacacaattttgtgttacttattttgttttgtgttcttcttcttgttatgacagattcatagcatttttgtatattagccttagttctgtctatgtttttttgtaagtagatgctggaagaacaaaaatctcaaaactgtgccttccttaattagtagatattatgtattacaaaaaggaaaattattctttattaccattaaagtaaggtcatccatccatagaaatatcttatgaacaaaaattggtttaagttgacatgaaaagcctactcttgaaaagcaaaataaataaataatacaaataataatataagatcgtacattaaccatcaaagatcaacctcaatcatgagaaaatacctaaatacaatattattgaaagtaaaacaaagatccact

SEQ ID NO: 219988 - DNA, 2601 bp, Cannabis indica
tttataaccaataaactactgactttgaagctaaaacactatgattaaaaggatgcaaataatatatccataagaaacatgaaaataataacaacattaccagaaattgaagcagagagatgatataccttgatgccctcaagtttctttattagccttggcatgtattcactgcaatttaaaaatcatcataagactccacaggtattcatgaatcccatatcaaaacaagaattgtgttaatctacacaatcctatccaacactgcaattagctgtactcccaaactcttgtggtacacttctattgaattagaaaaaaaaaaggaaagttacagcttcaaaaatctatcagcgaaatttccagtcaataacaccaaaaacatttgtggtacaagtgcatccctattgtacagcaataaggccaccataaggtaatgtcaagtgatgtaagtgggagggtgtgtgagcacggccatgggttcaaatctccataaacacgtgttagtaacatcatgtttgggagtggatttaggatggagaacaatagagggaaagagcatctctatccatttgattggcaaaataaagatgaaggagaggggacttggagggatgggaaattcttctgtccccactatatgcaacttctctttcatcgacaaataagagaaaaataaaaacagaaaattcacaaattaccctccaaaatatgcattatcttttgtcaatattaaattacaatagaaaaaaaacacacacaaccaaaaatatattgagactaaaagtcattttgtggtcattttttttttctctgaaaatgagacaaagtcacatgcacaagtgaccccctcccaagtatattgagagtcctcacttatggcagaggatggttgtggttacaaccaccagtaaagttctggccagactacaaaaacaagcacaaaaaagaatacaacactagcaaggaaagaggattaagcaagttttaatacataaaaatttcttcttgggtccaaaaatggataaaccttctgatatgtttctaattgaatcttatgctaaacagccacaaaaaccagcaaacagcaaagaacaatatagatatatttatagaatagtagaaaaaatacaaagagaacccctccaggaatttgagagcctggcctctccctttttcccacccttctacctgcctccctaactgactccctctcccttttattactaacagccccaacactaactctcactctctcacttctgttctgagtcatcattcttacttccctattactcccctgtcctaacagcaataaagcacaattaggaaatttaagaaaatttttattttctaataataaaaatttaataatacagataacataatatctagtttatatatttacacccaacatagtgatacaaccacttgggtagaactcactcccaaaaactagcctaagagaggagggtgccaaagtaccactaaccaatcccatacctagttgatgtgggatcctaacaatacactcccccttacagctgaggtcaacagcggctcactctacggtggcctactctgcggtggcccactctgggctttttccacaggtcgccctttcgcaggttgcctctcccatgacacgtcggtaccacctatgggcgcatggctctgctctaatacaatttgatacagccacttgggtagaagtcactctcaaaagctacctaagagaggagggtgcccaactagtgtctagttgtataccatcttcagtcaatgtgggatcctaaccctaacatataggtgcaaacgtatttagttgtatgtacatagatggctaaaaaataaaaacctggtacttttaaagaacgaaaaactggttgaatcattggcatgtccaagtcttccatactctcctccgccccaactcaaagcctcacctccatctaagaaatatataagcaaaaattgagttatacgacaactgttagctaacaggtaacttgaagtaaaaacaagtttatttatagtataatggaatactagtaaacttttacacacacacacacacccgtaacagcaactgagtgctctgaacccaaagctgccattttgatggtcagtccaatcaagctttcaactttagttggaaaaggaaccgcctttggtgcccctgtatatcagaaagttttcacttaaaataatttccatcagatgatttcacatatcggctacacaggtattgcaaaagttcaaaatctctaactaagacaacaagttattccctaaaatgacaaactacaaaaccgtatatcttctgtacaaaaacctgttgattcaaggaattaaaaaagagagaaaattgtttagtttaaaatcaaaacaataaatagttcagttggttactttttccaaggccaagttgtccatttgcgttctttccccacatgtagagctctccatcaactaaaacaggatggtcacaaagcattataatagtatggttgaaaaaataataccaattcagaagagcaacatgtattattagagacggtgaaacaagaaacagaataagaaacggcccccactgtcaaa

SEQ ID NO: 219989 - DNA, 2888 bp, Cannabis indica
tgtaggaggaaggtgcatatctttacatagtaataaattaagttttaaaattaaaaaaaaaacaatagtaataattttttaaaaatattattttctttggcaagtttctaatgatactattatataaattatcaatcttacactatagttttttttttgtaagataataaatttatattgatgtgaacatacaataatatgaatatatatttgcttaacactatatgaatacaccgttttcattttgaattaccattaattattacatttttttaagaaaaaaataaaagagcaacaaaaaaggtacgccaggaatttcagtatccagaaaagaaaagtggaatggctttttgcataattaattttcttttctaaatctcttcctcacttgattacgaagctagctttatttttcataatgattgaacaataacatattcgtgtataatagcaataaaataccaaaatgggtagcctcccaacaccatcatctcttcattattcccaaaaacaataataaagaatggtgttataataaagtgtaggaatcctaataatcaaacagtctggctatttgaaaaggtcaatttgggtatttaaaaaatgtttgtacatatataatcaagctcagtattcaaaatcaaggaaggttccatataaaacatatatatactcacacacgaaatcaacgctcttagttttcatttccgtaattaattatagatcaccgattctcactttgtcttttggttccgtataggcaaagccaaataattatatatatgaggtttggctgcatccttgtttataattacagtttgagtattgtaaaaggctcttattgataagtagatcgaaatataatagtgagctctaaaagttcacgttaataattttggaattttctgaaaccttgtttgatgatctgtcatataaaattgtatgtatttttctttatgaattaattatcttcataatatcattgtatccaatatttttgaaatctgtttataaaatactaaaaaaattatacgaatttgatgttgtagaaattaattaataaatatatctcattatatacaattaaaaatgtagtatttttattttaacttttttttttttttaatgaatttggggagttgacgaagttagggtttatggcagaaaaaaattaatattgtgtgtattattaataatgatgtgctatagacttatatatgtatatagtgcatggagtgacttggataccactcagatcgatgactcatgtttttctttaactgaaaatttcatttaatcaaataagactcgactttaacaatgacaataatatatatcagaagaaaaatttagactccgaagaacacaatcagtatgtaaccgagacgctctaactataaggtgagcgactcgattaatatattatttgaacaaaaaaaaaaacatcactaaaataaaatagaagttgtttacaatcctcaacaacaccaccaaaagtgaattgcaatacatatttagatttcaaacagcttacactaacaccagacagtcagattcgataatattaacatctgagaaattacgcttcaaccacaaaagcacttccttgggagccacaaatttagtaatttctagcaaaagtcgcccatagcgtagcccaaaaattccagccacaacccaaccacggtgatcctggataacctcgccaaaatcatgccttcctccttgtcaaaaagagtagcaccagtatttactttgagtttttttgaaacctagtttagtccacagctcagccccattcgaaagataccaagtatcaaccaatggaaacgaatttctttcttgagctttctctcattgatcaagagtgatacgagccatattgacaacaaacttcacccaactttccttacccttccacaagagttaattctgcacaaaccaaattcccccacgccaacatcaccgcttgagcactttgttcctcacctagccgagaaaaaaattgaaaaaaactagtccccaaacggtcctgcatccaccgaaatcatagccaaaccagctacccaccaataattgcgagcaaaatcacaagaaactaagcaatgaaaaattaattcacttgtctcatgacaaacgaggcgcgacaaataaatatctacatgtatagtgttcaattgaactcttgccgggatacacccactaaccgctctccacacaatttttttttttttgctttaggaggaattcttagcttccaaaacttcttccaaaatggcaaaacattaccatcctcacggtctgcctaaataatttaaaagtactcttaatgccaataattcctcaaacaaattagataaaggaataccaagaatactagccacctcattctcatcaaacaaatccttaataacaccaacatcccaagatttctcacccaccattaaaagactagtaaccttaatttgcattatccagaccaggatctaaactaactagactcaaaatttaaccattaggatgccacagttcatgaaataaaaggctctcctctccattaccaataccctttcttgcccccttacaaaccaaatcttgcactttaatgagacttctccaaatataacttagattattaccaagttgtgccgaaagaaagttcttaatttttaaaataccgggtcttgtgcaaccctaaaaactaacgagtcagacttagtcaagaaaataccaacttttttacccaacatggaaaggttgaaatcacgaatagaataaaaaatcattcccacaacctccttgctatgcgacatcctctcccaactcaaccaagaaaacgccctaatagtaattcgtagacgacttccaccaaaattagccataagctt

SEQ ID NO: 219990 - DNA, 2518 bp, Cannabis indica
taaaaattaaaacataagagagtaccaataatttttaagaatgattatttatcagttttggaagatgaattaatatgttaatgctagttttccactaccattaacattcatagaacagtcaaaaagatgtggtgataatcatcttttgccagctctagcatgctcatataagatattctaattggtagaaatttaatgaagagacactgatatgttgacaatatttaatgcaatctacatctatgacagtgcctattacgtaaataagtgtcatactgtattataatttgtgtaattaagtactaggttcctacgatgccatcaataaaagatgttgaacaccactggtgtccattagcaatgattaaatataattaagcggcttgtttctctcaaagctccaaccattaaaaatttgttcatcttttcacatgggagaagctcaacaagttcaactcagcatcagaggtaagtgaccaattttcatgaaactattgttttataaaaggttttgtactacaaactcaattgaattgatttcataaatatgtttatatatatatatatatatattaattaattactaaagaagtacttactaactaaagtatatgtatcttcaccagctgaggaagctaatgaaggagattctcatggctttgcaaatgaatcccaccactcaactagccctcaaaccagaaaagttacggtttggattcgaattgggatttattcattccttgttctatttgggcaggcagtagcaactttattagggagattatactatgaaagaggtggaaaaagtaaatggatggctacactagttcagctagctggctttccaatttttcttccttactatatctatttcatcccaacaaaaaagtacaaaaccaatcacaacactactaataatactaccattactcattctgtccaatcagaaaaaccatctaccttacttgtgacctcaatttacttggttcttggcctactcatagcagcagattgttatctttactcagttggtcttatgtaccttccagtatcaactttttcaatcatatgtgcatcccaattggctttcaatgctttcttctcattctttctcaactcacagaagttcactccttacataattaactccttagtgcttctcactatctcttctgttttgctagttttcgaacctgattctgaagagtcttctaaagtctcaaaagggaagtttgcaactgggtttgtttgcactgtgggtgcatcagcagggtatggtttggttctctccttagctcaattttttatgaacaaagttcttaaaaaggagagtttctcagtgatcgtggatgtcatagtgtttcaatcacttgtggcaaccattgcaattcttgtgggactttttgcaagcagtgagtggtcaactttgagggaagaaatgaatgagtttgaacttgggaaagtttcatatgtcatgacattattatggatagccataacatggcaaattttcttaattggaacggtgggtttaatactagaagtctcttctctcttctctaatgtcataagtgttttgggtttacctattgtcccggttatggctgtgtttttcttccatgaaaagatggatgggatcaaagctatggctatggttttggctacttggggctttgtttcatatgcttatcagaactatcttgacagttacagttccaagaatgaaaatccaataagcaatggttcaccacagagagtgaaagagatcaatagttgaattaatcaactagcttgttttcttattagtttacataaatacaaaaatatcaatatgtaagatattccatttgaataagtttataaaacaaaaaatcaaatgtaatggacattatagttttgtcttctatttgtcatgcaataatagtatgctcatttaggtttatataaaattgctttgcagtgtagaatataaatatcaatatgactatgattatatttttgtcttctatatcattccacttaaagaatgaaagctttgtccgcaagtcttgtttagagaagatcttcttcccgatatacttcactcccaatctcatcagaatttttatattattattatatattgagaacgaatgaataatttattgtactaaagttctatgtaatattatactaatactaaaaaatatacaatataacataaaataatactggtacaaaagcaatattataccacgtaccaattgtgcccctagaagtaatcttctcctctcctcatttgcactgaatttcaatcactttgtactgaatttaaagatttaaagaatttaggtggcgtttggttagaggtaatgaaatgaaatggaaataaaaccattttatttccattcatttttttggttgcattttaaaatatcggaatgttattccattagaatggtttttccatcatttttgtggaatgactatttcattttgaaatggaaggaataaccattccaatgcaagataaaaaaaa

SEQ ID NO: 219991 - DNA, 4033 bp, Cannabis indica
cactagaaacaagagctcatccatttacttctatttactaagctcaaaggaatcatcactttactctatacaccagtagaagctatagattccatatttatgttcagcactcccattacactatttacgtcggtcaacgctactgttcataccgttgaccgacgtgaatagtaacccaacaattagcccgtactcttaaaaaaatgacgcaaataatatgctatttgcgtacttttaataaatgacggtaaaaggtaaaccgacgagaataaacaaaaaattaaaaaaaatacttttcattttgcgtctgttatcaacactcgactattgtattagcaagattttaaaaacgacgcaaaaaactatagtgagagatacaaacagacgcaaaaaattgcaaaatccctaaaagctaatcagctgatgcgcctactgttcattacgacctaaccctcatatcttcgaactttctctggcgaaacagcggctcctccgttctcttcgatgcacgcctaatgttcatacacatccagccctaaaactctcgaatgctctggcaaaaccacccctcaaccccttcaatccagccactgctctctgaaaccagcctctcaatcgtcgattctgaaaccagcctctcaatcgtcgattctgaaactagcctctcaaccacgcattcggatcatcttcttcgaaacctagctctccacaacattccccagaatttgtacgccaaagtccaatctaagtgccactttgttctaggcgcaaagcatcttgcccgagcccgatctgcaaagtctcgctccgattcctcatcacttgccaaggatgcgttagccaaagttgagatatactttcatgcggatcattgaggtaggaagaagtttgtataagccatttttatgtgatgtttttatttaatttgttaccccatatgcaggttttactgtcaaactagagaatcattggaagaaaaatgtgctaatttatatgaagagaatcaaaaacctgaacaaactataaatgaattgcaaggtttgacttgatcacgcctaactgtttgtttcaaaatgtatcaattgaaatgcttataaagatgttgtatttgctgtgaaatttttagattctaccaaactatatccaatggattatgtaagtcaggtgatcacgaaagaagatttggtggagaatatcgaaaacataggcagctctgctgctgcagttctttgcaaaatttctaggaaagttccatttactacaagaattttaccttttaattacacaaaaccctaacatttttaaaaaaactatactaatattgggaaaattaggccttattcaaaattggcctcaaatagagagcatgtggtctagttcaggttggaattttctgattctgaggaggagaaattgataagagcgtggtgaagaatgagcatggaatggtactctcgcaaagatcgaacgagactctttcagaattgctcattcaggtctctccatatttttcaatctctctagacatatttttctttggtaattaccaattttattcttatgtattcaagattcttttgctttttcttgttatgttttatctgctcagacctaaaatccgagcgatccatttttccatgtagccatggatctggtatgtctttgagtgttgttttattaaatcatttatttatttcaagttcacgattgctttattaaccttaactttgatgtcttacttattagttagattaaggattctcttctagtattaaattacgtttgtgtgtgtcttcacgtagtataaattgattgagattgatacactctgtggtttttctttgtatatagttgaaatgaaggtaaacagagctaaaatttctagtgtcaatgcacatcaaatcatactactgggtggatgatggtcctaatatcactcattttaagtgcttgtattttaaatatgaattgtgatttttcttatatatttacaaagttttgaccattattatatatcataattggatgattatatatgtgaacttgtgataattaatataaatatgaagttggagatggagtagctggagtccttctaatcaaatgaaatgaataaatatattttatgatctttttggttcttttttagatcttaaaatgttaaataaatagtcagttgttttagagttcttacattgcgctggaaatgccttttattctaaatttaattagtagtcatataagtgattacattgtttccattgtgttggagatgccttttttttcattttgaaatatatattaattttaattactaatggtaaatgtaaatgatgtcttaaaagttcttagcttaattttaattactagtggttgttgttttggatgttactcactaacacctacaggatgatagaggacatgacaccaagcattctacttgaagataatagggtctcaagtgatcttgtgaaatatctgaaggtataaatttctactgatattgagtcttttcccattgcatataggctacacttgtggggtgattcaatttaatctaacctattaatgaatttgaagtttctcttattatatatttatttacggtatttagccaaaattgcatctttttgatactctctgtgctttcttaggtgaacaatatagacaatccatataaaaaatgtacaaagagaaatcttttgttatggctattgttttgcaggtgaacaattagaaacaactctattcataccatataaactgtagtatttctctttctaaacttaacaaactcttttttttccttgtttattttcattaatatatctttttcttcattttcagttactaacgtgatcaagatcaaatgggaaatgtgattgaatcattcttttctgggtttggagaagttgacaccaaacacttggatcagcaatccaatattattatttctccaaactcgtccactttatttcttctggctccacctcgaagatcatgctcacttccttctttaattaatgggtactatctcaattccataagcatttatatatatgtgtgtgtttctttttcaatccataaaaatggtgctcttctgtgaaattttgtagcttgtcagttatttttttccctttttgatggtttgctcatgttgatatgcagagtttgttgtttgctactttagacttgtattcttgtttttgtttctaatgcatcagaatgtctctggtttagacacctaattctccataattgatgtgcttgataagaaacagaatgtttcctttgttatggcataatctagaattagtttgaagacaagtaacgataaaagagaacagattaagaattataatttttaaaagagaacagattaagaattataattttatagtataatgttgatatgtcttcaactgttgtttagctttcttcgtttcttttaactttgaaggctactccttttaagactgcttttctcattttgttgtttacttacttcatttccttttcttcctccttatttctaatctgtttgtgtgtataagctagtctgtgtaaagcatgtaatagtttttgaatcgataaaagcagttttatatttaaaatttgaattgtgtattggtttatataaatttttttgattgttgcagaatattgctcaatctttcattataaagcttatggctctacttagagatacaattttaaatcgaagattggataagcaagaaagtataccagttaatatcaagagttatgaaagttaagagtaggagaatcttcctaatcacatttatggaggatatgcttatgaaggttgggcttgtatattaaaagtattgttagaaatattatatagacactttatgtaatattattcatgtaattgtcttaatttgaatttatcttttattaatcctaattttattttattattttttaatagtgaacttttaattaataatgtatatgtttttataggagtttatatatgatgttagtttatcttttatatatagacaaa

SEQ ID NO: 219992 - DNA, 1407 bp, Cannabis indica
tacaaaaaaaaactattttgaagtgtaaaaataaaaaaacaccaatcgaatcggtaatttttacaaaacacagaatttaaaataattttcacctttaaatattcaaattataataattataataattttttaatataattataagtaaaatattattgaaaactatataaatatatttacaattataaaaaatatatatactttagtaattaattcgtcaattgtaaagtaaaatacaaatttaaaaccgaatatgaaaacgggtcagcacgaatttaagtacgatacgaaacagaacctacaagattttcaaaattattggcaccagacatacaacatattcttttacagcacgacataacatattttaaaaagtatgatataatatagagcacgacacacacgaatttaagcagaagttatgaaacactaaacacaactgcttacttaaccattttagactagtttaagtggctataaaggagtacaggaaggagggtgtgtgtgaaaaggatcttgggatctcaagtggccataaagggatatgtgagggtgcatgtgtgggggttctcagattgagtcccagacttccaaattatacaatgtatgaatgtaatgtatatataaactctttaataaaaaagacaactacttattttctcctgtttgtggggctgggacaggtaattaataactgccaacagaagaaaataaaacgacggctagtagcattaaagcaggccctgctctgcatcatcattaatcatactcatcattaagattttcatatcaaaataaacatatgtggcagttttaatttaattttccacaacaattaataaaatacattaataaatatgatgatataatacatatagagagagacagacaataagtaattaataagagaaagaaagagtttgctattatcttgagaggacattgcctttggtcttaattagtagattagtggcaagcttttacctgaatttttgtaagacttctttctttgctactgttcaacaatggccaatgttcacacaaagtttactactcctacacctcctcattttttcaagattatccttcacaaaactcttcatgacaacaagatagtaagtatatattatatatacaccaaatatgacatttatatatattattcaagtacagaattttctttttccccttctaactattttctgttttcacttgaggaatattgttagagcttcacacagagtatgagtgaagatagcaaagaaagtttgagctaaaaatgtcttgtattgatctaacacctatttatacgacataatcttttaagaatacttataatatctaatttattataagaaaaataaagtctgaacagttataaataaaaataacttctaaattataatt

SEQ ID NO: 219993 - DNA, 2712 bp, Cannabis indica
ccaggttcatgttttcttatgtcaaaccacaaaactacttacgttttattcatattttattcattttataaagttttatgaatattttatgaataattttatgaagttttatgaaacttaattgctaaataaaatattcaacctatcttaatgtttgaatattgggtaaataccatttttgtccatgtgttttgtaaaagttacaaattgcgccctctattttttaattgacgaaatggaccttatattttaaaaaattctataaataggaccatgaactaattttttgttaaaataaaacttaataataatctaatctaaagatatcatgacaaaactggttacattttctatatccattcgtgttagaaattgtcttaaagttggttatattaaaaaataaaattgttgaaaattatgctaattaaggttcctatttttatcatttcagaaaatatagagtctattttgtcatttaacaaaatagaaggtccaatcagtaacttttgcaaaatacagggtccaaaatagtatttacccttaaaatatttttaaaatatatctagcactatacatgaaatttatgtatagcatttaaatcatataaatcctaattaactacactcataataaattcgcaaaataaatacaaattaatgcaattattgtatgataactaattaaatgaaaattactaaatatgtaattaataacaaatttctcaaaatttatttaaacaataatttacataaatttggtaataaagaattaaatgtataactatataaaaaaaattagcataattattacatacctagataaatcatgttataaattacccaaaataaaaagaaaaatctacttttaatttatattaaataatatatcaattctaaatataaatatatgtattaaacaaaaaaattgagtaaatataatttattgactaaattaatacaaatgaggaaaataattgatattccaaataaataaaatttttataaaatttttgaatttttttcctttttttttgaataatttactgccactaacgacatgttgttgtttgatatagaaagaaatgatacatcattttgcataggggaggtttgcagaataaacatagaaaacgacacgttgtttatattcaccttcaacctccatccgggttagatttgactcaacttttccaatgtgggtccgacggactcaacaccaaacccgaccggaaaaattaattataacgaaaaaattatatatttttaaatctaaaacgtactaaatacattaataaaaacatccacatagattttatgtaataaaaacacgtaaaatgtgaactttaagattacaaaacttaaacgggtccgaaaagagttttacagagaattttccacattttcaagttatcatgcatagatcattctccaatgacacataaatgtggtgatgcatatagaattcgaaataaatacggaaaaatgaaaaatttaaaattctacaatagaccacgacaaaccaattttttttatgtatatatactcgtatataataattatattatataaaaatattataatatatacaattataataatattatagaaatcaatgaatgaatgagtataatataaatatatattgaaaaatatatatatacgtatatatgagaaaaataaacatatatatttaatatctatgaacatatatatataaacgtgaatataaaattatatatatgattgggattatataaatatgaatgacatatatataaacgaaacttaaaaatataaacaagacagaaataataactgttctgatatcaactgttacactataatataatatgaaaataaagtatacatgaacgatacatgtaaagtggaataactacagacatatcgaaatcgtatatgtgacctccaaccattaagtttgagcttcaatccccttgaaatagcttcactatgggaatttgggctttctcgctctctcaactctccttagatagaatttttctgtttgcatagaatgagggaagagctcgaggaccgaaaatttatacttatagctgagatactctatcagtatctgcgccatattaattatcataatattttgacaattaatttagaaatcaaattgggtaataaatatcaaaatctgaccatatatataatatcacgtaattaattttatccaaatccaataaaaataaaatattcatttatctcaaaattagttatcttattttgttccataaataaaaaacattctaatatatgtagctcttatcaatattgctctaatgcataacatttgggaagatacgaataatactttgtgaatcatgaagtataccctgggattggtttgagcaaatgagttcaatgtgtaattgcactcctttgtgcaatgaaatagtacttatttactcaaaaaaatatccattgtttgttgttcttttcaagtatacacaccacacatttagttttcagtaatgatatctgtatacacaaattattcacacacttataacacatatatgtggcaagtataatttcaactaatggaccatctttatttaatataggtatcaattttggtgtgtgatttaagtgaaatttgtacttaaaagggcatatacatatatatatatatatataaaactaaagatttgagaaaaacacattaaagcaaccttaaaaa

SEQ ID NO: 219994 - DNA, 4119 bp, Cannabis indica
gcacacaccataactcctataatttaagaatttcaaattaaaatgtataacaccttttacacacttaatatttgtgataattgtagaggttacaaattgtaagtaactccacctcttatattacaatttatgtgaatattaaatgtatgtaactctcaatcacattatatacattaatctcatattaatatataatatgtgacattttaatattttaatctatcttatattataacaatataatataatagtttcatcaaaattgttagggggtttaatttcttcaatcgcaagcttcatcattattttcaatacacgtttaaattatcggcttatagtttcacctgaatgttgacactattcttgaaccattcaatttttaagattgtctcttaagatcattacaaacatacttacaacctcttttaagtttacacctctagttggtgttaaaccataatctcttaatctatcacataatttgcaaaagatatgtttctccatatatacaaaaaatttcatagcaacgctgatcatgtccattaagtatctccataataaaattccatcctaagcgaggagaatttctacatggctctttaaataaaaaatactggtgataatatattgttgtttttgcaaaagcaaagataattttatcaagcaactcactatttgtagttatttgttccaaatattattcgatagtgtcatcacctgaatcacttgccattttgtgaaaaatagaacatttaattcaaattcgatataaatactagaaatagcatatgctgtcaacaaagtgccacaatttatgcataatccccttgagcctcatttcaaagttatcaagaagatactaaggtatcttaaggggactcttgaccacgggttacacctgaaattatgctcaaaattggtcttgacagggttttgtgatgctgattgggcatctgatcttgatgatagaagatcgaatttaggcttctgcatctattttggattaaatatggtttcctggagttctaaagagaagaaaacagtgtcacgttcaagcacagaaactgaatataggagccttgcaaatgccactgctgaaatagtctggctgcagtctttacttactgagattggctttgcacaacttcctgttcctacgatttggtgtgacaatcaaagcactgttttgatgtcagtcaaccctattcttcactccagaacaaagcatattgagcttgatttttatttcgtgcaagaaaagatttcaaataaacaacttcaagtgaagcacactccaactcaagatcagattgcaaacattctaactaaacctctgtccacctctagatttcaattcttaagggacaaactgagccttcccagctcagctgtatcatgtatttatagagcttatttgctcagctgtgaatattcaaggttcattttcacatatctttttctctgttttctctttactctcaacaattattacttttttgatttttttttttatatatattttatgtacaatagatgttgaggatactcatgatactaatgactagttgttagttgagggtgctgttattttctgttaattagttatataagttagttcttggttgttattagttttctgttattctggtcttggttctagaggtatatatattggtacttctttttgtaataacaatcatcagagaataaagattcgctcctttctttttcatcttctttctctgttttctctgtttcttcactatactcaaagataaactataaatagtggggatttatcgagccatgcaacaacctagttggaatagaataacacaaacacaaatatttaggtgcacgtgtcacgtgattaaacatttgtttaccttaattaagtactcttataacactcacacgtatattattcctttaatcaataattattatacttttaaaaatgaaaatcttatcgttacttcttgagttttgagttgtgaagaaataaaggtgacatggctgctgtgttagactgatgatttggcaatccttttctccaatatactgggaaaatatcattgctgaatattcactaaagtacaaattctgttatgcctttttagtgtattgttagcattgttttcagtaatattccttttgtataatctgctgccatctgtcccttgtatccaatggctgtaatcatttgtaaaaatcttaaatagcaatgaattcactcatgctcattgagctgagatttatcatcatcatcctctgtatttcttttactctctcacttggtatcagagcacggttgtactctagtcatggcatctgatgaatctcagactccaggaagaacaccaggacaagcttcacaagccaatctaggtcttgtgtcgtcaggatcattttctgcaagttctgcaacaatagctactcctttcaacaacactttaagtcagccattcaccatgaagctcgacagaagcaattttcctttgtggaaaacaatggttttaaccattataagagggcatcatctggagggatttctcaatggtctaaaaccatgtcccttagagtttcttccttcagaaaatactgaagctgaaatccctgttccaaatccagagtatgagctttggattacacatgatcaactcttaatgggttggctctttggatcaatgacagaaggcattgcctcagaagtcactggctgcagatctgcagcaagtctttggatagctctagaagatctttatggagctcattcgagagctaacatggaggatttgagaaccaaactgcaaacagtaagaaaagggtctcaatccatgacagattacttgaggcaaaagaggctttgggctgacactttagcacttgcaggggagccatatccagataatcttctcagaggtaatattctatctggtcttggtgctgagtatctaacaattgttgttcctcttgaagctagaaccactctctcgtggcaagaactttccagtacacttctcagcttcgacagcaaactggaaagactcacatccctctctaccaactctaagcagctggaaaacccctctgcaaacatggcacagaagccatatggttcaggcttcaatccgaatcatggtcgaggaaggtttgggaataacttcaatcatggtcgaggacctgctggtgcatcgagaggaagtggctcgagaggcagaggaagaggaaggaacaacaattcgaaacccacatgtcaagtatgtggaaaatacgggcactctgctgcagtgtgctacaacagatacgatgagaatttcactggccagccacctaacagtgacacttctcatgacaaacaacagcaatatgccatgattgctactcctgaaacacttcacgatgaaggatggtatgctgacagtggtgccagcaaccatctaacatcagaactggaaagatgaacaacaagagtgactatggtggtaaggagaaagtgaccataggtgatggcagcaaactatctatttctaaaattggtcatagcacactcaaaacacttactgattcacctttaattctcaaagatgttttacatgtgccttccattgctaagaatctgctaagtgtatcaagattaacacatgacaacaatgtctcaattgaattctttgctggtttttgtgttgtgaaggatcaagcagggaaggtgatactgagaggagctcttaaggatggtctctacagtttgggaacaaccaccacttcacctacttactgccccagcaaacacaatccttgttctttttctgttcaagttcagtcatctaagaatgtaatttctgcttccctaaaggatacctggcacaggaggctaggtcatccatctttacctgttttgaatcaagttttaaagttgtctaatgaaaagaattctgtcaatgataagccttgtttttgtgatgcctgtcaacttggtaaatcccatgctttgccatttaatatctctcacagtagagccaaaactatgcttgaaattatacatactgacctctggggtccagcaccattagcatcacacactaattacaaatactacattcacttcatagatgatca

SEQ ID NO: 219995 - DNA, 5149 bp, Cannabis indica
gtcacttaactgaagtttttggacagaaggtgttaacgcagatttttgttaattaaatacacactcttttacgtaataaatttactacagaattaaataataataaatgaacactagatatttttgtagttttgtagttaaaatttacatactttacgggtccttattagagatatttacttgaatacagagtacaataaaatttaataatagtattttctctctaatttgttgtccttttttctatgaattttacccctatttctagatgtataagttggcagttattattaatcttaagctgaaataatggaaaagctatagttatcctataatcatcaattagaaaagttcaaacactctttctctctctctttggggttcgaccacaagtaaaccaaaggaaaactcaaggttttcatcacattcagaccaaaaattctaggagaattcagtagaaaatccaagggcttttgtagttaagccaaggtataatctctttcctttgttttcgttaacttaagattagattttcacatgtaattttaagttttggttgctgttttagttggaagtgtttaggtatgttttctgaggttatttcttaaactaattatgtcaatttttgctgttttttatggttgttgttgggtttgaacaaagtttgagcttggtcattaatggtaatttttgttttgcaagcttgatgataatttttcctgttggattatattttgtatgacctaattaggtgttttgatcagttaattgacaattttgggtagaatcctaggagaaatgaggttttttgtgtttctacaattaaaaacggtagaccatttttctagaaataatacattgtttttagcagtcacgaccaggaaaacttgcctgtcatttttaagaaacggcctgctattttttttgagtgtttttctcaaaatcttattttttagtattttcttaatatttagggtattgtcacgctatttaccgacaaagaaattattagtttggagtttaagtcctcaaaaagtgatttagcatattacttaccagtttaacatatgttgtgacttaggggcatgtaaatcgtccaacaataatttcacttaggttaaccggcacacccaaatttaaaattaaggtaagatagtataacaattgcatttatgaatacatgcccaacagtacggatgtactctttgcatcttcatgttgaacttctgaaaaattttcttgatgtatccagactgtttaagcttatcgtcccttccttttggtccttgagagtacttcaataccaagtatctttgaactggtctaagctcttcatctcaaattatctcgagcttggctttgatactttgatcacaaattagtctttgctctgatgagaatatcgtccacatagagtaataaaaacacagttgaagattgctctaaattcttataatataagcagtgatcatatgcaaaccgtttgaacccgatttgttgcatataagtatcaaatcttttattccattatcttggggactgtttcaaaccatataaggacttgttgagcttacatactaattcaattcttttccattccacctaaaagccaggcagttgcttcatgtatatctcttcatcgaagaacccattaagaaatgcagttttatcattaagttgttcaacttcaaactccatttgagttgcgaaagataacatcaatcttatcgtcttctactttaccacaggtcaaaagattttagtgtagtcaattccttccaccctagtaaagcctttagccactaacctggctttgaacagtactggttcattctcattaatttcctctttcatcttgagaattcattttcactctacaatctttttgttctccgattttgacacaaccacccaagtcttattctttcagagtgaacccatcgcctcatctgtggtctggagccatttagacttgtttacacatgaaattacctcttcacagcttttgggctcttcaatttcagtttgttgtaccaccactagtgcaaacgcaatcaaattttccttgacaaaccttttcgaagggtgaatctctcttctagttctatcattcgccaactattccagacctacctatttggatttttccagaaaatttgtttggtctttgttatctttcagctctagctttcatctatgtatcatcttctgtttccacaataactttcgactacgaactttctttctgatgttttgttttgtatttccttttcatgtgtgtaatgttcttatttctagactttcttgtatcacatggagacacactacattttccagctgtcaagttgggacattctaattcattaaaaatcacatttctagcaattactacatttggtctactcttcttggaaatacatattctataacccttggtacctaaggcataatctaggaaagtttctttaactaatctaggttctagcttgttaatagattgatgtacatatgctgtacacccaaaggttcttaaatgcattaggtttggggttcaattgtaccacatttcataaggggttttcaatcctataactttgtttgggctcctatttataaaataggttgtaatagctagagcttcctcccaaaataatttctcaaatctaaaactgaatagcagacacctaaattttttcaacaggattcgattcatcatttcagcaataccattttttttgggtcttaactacgattctgtgcctagtaatcccatattcttgtcacaacttgtgaaattcaaagttaataaactctaacccattgtcagtcctaaggttcttaactttcagatcaatttggtttttcacctgagttttccaagttctaaactgttgtaggcattcattttagttgctagtaattaggaacacacctactataatcatcaacaatagaaaaaaatattgcttaccagaatgagtagatactgtatatggcctccaaagattaacatgcacatattcgagtatcttcttccttgtatttcttgctggtgtgaatttcagcttatgttgtttccctaaaacacaagcttcacaaaatggtaagacataagaatttaaactttcaattataccttgtttgtccagttctttgaggccttgttcactgatatgttcaagcctgtgatgtcatagttgcacatttgattctagccctttcaccaaactagcttctttgactggaacagtttctctttgaagaatatacaaatcattgatattttaacctttcattactatcaacgaacctttggtaatcctcaagctttcgtgcatggacttgtaattgtaaccctcatcacacccagggatatgaggtttcgtcttaactttggaatgtgccttatgttcgacagtactttgattccaccatcatactatttgatgtaaaaaccgttttactcatgaaatggaaaatttagtcgaaacttaaatttggcaagcctattttctctggcgaagaaaattgttggtataatccccttttgtcgacccatttatcaattgtgccagtaaaaacagttttatcaaccacgtattattgatcaaaattatcactgcatatgccgacaaaaggttactgacgcattgtacctggttttgccaacacgcatttgcgtcgacaaaaaccttctttcttaaagtgtttagtaaaaaagagaaaaaagctcgtaagcaaggttaacgtgaacgaaaaatatggttgagattcttgggatcgttaggagattacaattcaaagaaaaaaatcttagagattttaatgtctcattaatcttccatttagttttagacaaaaaaaattataaaaaatcattaaataaaaaattatcgttaaatagtcattttcaatatatagatatataatatataaatatataaattagaaaagatgttaccaagttacttttatatatattgatttattgaaaatttgcttttttaaaaatataaaaaaaataagaacaaatacaaaacttgaaaaaaataagtactttcacaacatgttctatatataacatataattataatttataaaaggacatggtttattcccttccatgttttattacaaagctttcttacatatagcacggctcactctcagaacacatacatatactatcactatatatatttcataaatgatcagttaatattcccatacttggccttgtaatcattccacaactgctcaatatttttccccagcaactcaacaaagaaattatcactataaccattcctcattttcttgttaagctcagctacaaacccattcctaagatcattacaataatccaaaaacctagcagtaacatcataccctttgtcccacttactcccttgccctggcttaacccaatgtccaggtacatacccagacttcaacctcacaaaatcagcaattccttctatcaaccaccctggagtttgccccttaccatcccactgccaaatatgagtgttctcatgaaaaagaacacccgagatctctctcttgagatctccagtgtagcccccgatgtaccttgcgctgacatggatctctccattgacagcgaaggccacaccatcgatatcctcgatgatcaaggtgatctttggcacggccttcgtttcagaggccgagttttgctggaacagccttcttatgaaatttgtggaggtaattagggttcggaagctgtattcaaaggtaatatcattgttgaatctgataccaccgttagttgatccggctttgttgatgcccacgtactttagtgcatggatgctgtctaaggtactagccaaggctaggatgataagcaaggaaagggaacataaacggtgagccattacacacttataataattagttgattatatggtattattaatttcatggattttgatatcaaatgtttggtgctttatatagaggaattattagtgaatggttgggataatgaattaatttaaaaatattagaatgtaattagattgactaattttcactacaagaaatgttatttttgcaagcacatttttgtactgacaaaagttggtattacactggttaaatagaatttacttgtgatgt

SEQ ID NO: 219996 - DNA, 2435 bp, Cannabis indica
tttttaaaaaaataaatgtcattaaacattattataatatgtatcaagttttaatcgtatacaagcagtcctatcgtaagagtatacaccttacatcataataatcacaggatctaaaaccaatagtcaaaaaaagttccttactcgtagaaaacttttgttaggtcattgattttaatttcgtaatttattatagttataagataatattacaaatttttgttcaattatccaattaaatggtgttttataatttatttttatgaaacgaatatttcaaccgatccttaatatttttataccttgaatgtttttcataatgtatatcatgtctatatgacaaatttaattatctttattgcttgtcagatttgttttcctttatgtcttaacataaagatggagatgtttcgaggaaggaaaaggaattaaaccattgtttgagtatttgaataaggaatatttaatattacatctgaaggcaaagaaaaaagaaaaataaggaaaaacaaccaaacaaatgttcatttattttgtctgacaaaaaaatataaactttatggatctcttgaaatcaatatatttatttacgaacaactaacatgaacctcattagttttaatagtgagattacaaatatttggtcagacattgctttctacgttttcatggaagaaaaataaataatgttaatctcaaatgttcatttatgaaacacattatcacaattaactacaatctacaattagtgaatggtactcatgtaacgtattatttatacaagaattactgaaaactttctccttcaatattttacaaccacaaactttctaatggtttgagaataaatttgtattaacttagatttgtatgggatggatattaggtagtgtagtaagatgatgttgataagttgataagttggatgattggtgggacaaggaagagttatgcgtataatcttttatgtgtgtagtaagagaagagacaaggtagtaagttagtagtaaaagatttgatttggctcacccaagtttggttacaatttggaacccttgatgggtatttatagttgctagccttcaagcatttgaggctagaattgttttctctagatctttctagttcaaggattttatccatacatttctacatatttcttaagcatgcaactagaaacttctagactaaagttttctaaaaatgcctatgttctattgtatttctacatgtctagaaaattctaaattattctacaattatttaaaagtttagagtatgtttttctacaaatgtgtagaaaattctaaacttaattgagtattgtaaaaatatgtatcaatttctaatactttcaaatataatgtactgactaagtttaccctagtggatctggaccattttatttttgtaagtatatttcttttaaaatcatgtacgtttgtgattatttaagaatacttttaaatttttaaaatattctggtttatagtgttgaaaataaggttaagatatttacttatcacacatatatttgaaaaaataaaataattactggtacaacaaaatatttaattcttatttttggtggtattgtaaattgttttgattttttttttttttgaaaatttgtaggttgtttaataaatacctataacatatacgattattaaaaaaaaaaactgttgaataccaaattaaattagatacaaaattagacttagtataaatttttcctataatactatcttttttacttaccgaatatattattttttttttagaaaaaaaaaaaaaaagaaggttgctggctcgagataggttgataaagatttggtattactactgattctatattctttctctgggagttataatgagtcacatgaatatttattctttcagtttttccttatataggaaaatttttcttaatcaagtgttggattggatgagtattggcactcataacttttgtttatgtggtcttataagttggattaggcggtgtaggcattccagaatccgaagaagtgtgtacaattgtaatggctaatatttatcatattttgaaatagactttattttctaaacatttgaaaataagtgtagcagtacatattggtgaagaattgattgctgtttaaatatatttgtgcataataaaatttttagctaattcaccaaaacaaaatattatatttgtattcgatgacaatgagttcctatgtatacttttactttgatactagtgaagtaccacgtgcacaaagtaatatataaattatatattgtgtaaaattatatttatatttaggtggggtttaattatatgtaataaaatataatagaaagaaaataattttcattctattattttattttgttgcattttaaagaactaaaatattcggtggcgtttggttggagataat

SEQ ID NO: 219997 - DNA, 2617 bp, Cannabis indica
gtaccctgacactcatttaatgtaccctgctagacctatctaatgtaccacggaatacatttcgtgaaagtacatcacaggacaaaatcatatccctatattgtataatttctctactactacgtgacccacattctccctattctatttcactcaccctttatcattcatcattgtacacatataaatttataggatatatataatgaatttatatttgaattaaacttgacgattcaaaaaaaaaagtgtaattgaatggatcttagtgatgacgggcattataaaataataagtcacatgtacatgatataaatatgtatagtgcatgcatgtatttacatattatatataaagtcattagaatctgctgttaattagagacttttgatcgatgccgttttgtatgagatacttattatattataattaatatcacaattatatattaactaataattattataaataataatatatgagaacggtacaagatagccttctttatgatgagcattgctaaatagaatcttaatgattatagttttttctttattagtatgtaatatttgtttaaatttctaaacaaattttatttgtctacttaataatttagaaaattccacaatcaatgaatgcactttatctgtttcgatattaagaaaaaaaaatcagttcgaattttttttaatgatcatatacattgtagttatttaaaatatactgagaatttttaataaattcaaaagaatttaatacatcgaaatagggttcaaagagtttgacgttacgcacgtaatttttttttttattttatacgtatgtgaaatagaaatagatagtttgaacattaaattctatattataaattatttcaaatttttcaaaatctttgcaagatatcttaaataactataatgtacgtactagtacccattttaataggctgcataagtacttcttagtgagctctaatatgatccgatttataagtaagcatctcttgtaaaatatgagcaacaccaaatccttctagagctcaagcttccatttctcctacccgttgtcccccttgctctaaggggttgttgtgtaacaagtgcataagttgctacttttagtgacaattaattagtcacaacataaattttttgtgactaaatgtgattttcagtcacaacaaaatgttacttgtgactaaatatagtttttagatacaagctagctgccactaatttagttttagtcacaacaaatattgtgactaaaaatacatttagtcacaacaaattgtaatttttgtgactaatactttttgtcacggacctagtcacaacataggaataataatatataattaatcataacttttttttttttaattacaagtttgttgtgactaaaggtaaaaaaaattgtaatggaagtatccaataattttttcatttatgaaaataattattcttaaaatataaattgcatttaaactctaataataaatttataaaataaatacaaatgaaaaaatttcaccaataaaatatatatttgagagatataaaatgtcattaattaaatccaattttgtgttatttttacaatgcataattattgatatattttagtgatattttttaaaagcattaacaaattgatgacactaatttgatcaaatgtccattatatatatacatatatattattagtaacatttccaaaaaaaatgcgtaattaattaataaaatgtaatttgctctcattaaagtgttctttttgactaaatgtcaataaaatatatactataaatatcatctttggacaaatatcactaatgatcgatcaaaatgtcactattaattagtattttttatgtttgattatatatgataattatacatggtggtacgtagtgaaggattcaacagtggctaattattatattatcagaagtaaaatttataaatattccatatattaatgctagtcagcgtttaacattgttgacaaattaatgaactgaattataattagagatcaatcaatggatatatatatatatttaggggagacgattttgtctcgagtgatgtactttcacggaatgtattccgtgaaacattaaatgagtctcagggtacattaaatgagtgtcagagtacgttttactttttaaccctaattactcttagatcaatttcagccgtcagatcaaataactccctcatctgacggctgccgtacatcacgaattacaatccgtaaaagtataatgggacaaaatcatatccctatatatttatatattttcatgtttattaccaaacaagcaagaaatcaactaacatgatcacaatcaaaacaagtcacaaagcatatagtactgtcacttacatatcatttttatttcttgtagaaaaatatatattaattatacaaatagacatttcttgtagaataattgcaattatttaatattaagatgacaatatatatataatataattaatatttgactattatgtttattacttgttcaaattttctcccacttgtcttagttatttatttattttacttgtaacttttatacaaatgaatgctattgcatgaatcaaca

SEQ ID NO: 219998 - DNA, 5603 bp, Cannabis indica
taacaatttcgtcaggaactatcccagcaatctgcatttcccagaataaacttaaacattcatccattagcccaaatctagagtaaacactaataaccgacatccatgacaaaaggtctttgctcattacttcactaaacaaaaaataagcttccaaaggagtaccacatttcgaatacatagacaaaagcaaagacttaactacttcagaacacccaattccatttttcaacactaaactatgcaagcacctaccattaatcaaagcattcaaattcccacaagcttgaagcccaccttccaaagttctaaaattcggtctctccctttcgccaccaatcctatgcatctcgcaaagacactccaaccccttctcactctcaccattatgaacatatccaataacaagtgcagtccaggcaacaacatctctctcagacatttcatcaaacaccaaatgcgcatcacccaattcaccacatttgctatacatatacacaaaagaagacccaacaacagagttcccctgaaaaagcccaatttttgtagccaacccatgaatgctcttcccatattcaaccaaaaacaaatccgcacacgaagcaacaaccatgggaagagtgaagtggttgggaacaaaacccgcaactcgcatttgaaaaaacaagttaagggaatcagagcaacccccattagaaaaatgggctttgattatagaattccaaagaaaagtatccttgtcatgaactgaaccgaaaaccttagcggaaaaggttggtcctttgagagaagaggcgtagtgagagatgagctttgatgcaatgaaaacgttgtgggagttaccggaagtgatgatgagagcatgatatgtaaggagagattggagggtgagattttgggtggagaggaagaaagagattttatggttaatggagttggagtcagagaaagatgtgtgtgaaagaatggagtgaaatcgtttcagggtcagcatgaaagtcgatggcttaagcgttggattgctatgaaaaatgtaattcattggcacaaagattcatctcgctcgtcgtcgccggtgaaatggggtggttcaccgtcgagaaaaatggtgaagagtagaggaagacaagcgggagacgatggaatatgaatatttacccaaaatttaaattatattatttttaaaattatatataaataaataatttagtttagatatcaatatattttaataataattataaaaaatgactaatcatttatatttttgaccgaaatttttgacaatcaattaaatgagataatgatgagagctttagaataattaatgcatgtggtttttacatagtttttacatgattttatatggtttacgctgtttgtcatgtccttttacgggcgttttgagacgtttttcctatgctgtattaatgcgaagtgactgttcgaacatgttctcctcctcccagagatgtttcgttgtatttttagctcccggagaagaatgacatactttatgttcctctctaggggctcactccttgaagtacacttgcccgtctgtatatgacttagctaatttttgataaggcgtcagtgtgattcacgtgtcatacgcagccgcagccacgtattttatcgattacattattttttttattggttgaatatgttcttattagttttttttctttactcttgtagggaggtccacttatataactttagtagttgcactagattagtctcttgcattaagtctggatgattattttcgattaatgtattttctaggagatttcgagatctcgtttatatagctacctattaaatgtttgagtctggttgattattttcgactactgtattttataagagatcccacatttttattttgagataggatctttcttaaattttattactaatttgccattcaatttttacgagacattttttattcacactgtacacagttcgtgtactcaaagtagataatgtacataatttgtatagagattttggatagataatttttcattttttctttatatattaatctctaattatttttaatgaaagttaattgttcagaaaaaaaaaaatctattttaatttttttgatgtaaaaaaaaaattattttaagaaacacaatatagttattttttaaaaaatattaattatttcaatttagatgatacattaatttgtttttcttgagcccaattataactgataatgtttatttaataaaaaacggaaaagaagagagcttcccatactgaattttcttctattcattttctgcagtttcaattttcgttctgataacgggcaatgctttctcccactttctcatcaccaaatatcagtttcaatcttactcctccaccctcacaaccaccatttttgtctattcaaccatttaagctacaaaaaacaagaaaaaattccatcaactcaaacaaccaaaaacagagcagaccaacttggaattttcgttgcttctgttataaaaattcatctttttatcatgattccaagatttcagacgatttctcgagattttacgatgacccaaaagcggaattatgtgatactactacttctcagtcctcctcctccttttgccatagtctttgtccttcttcggttggggtttggcttcggtcttgtcagagcttggaagacgtgaaaagattacatgggattgttttgaagtgttttgggtatccagaaacttatgtttataacaatttgatatgtgtttatttgaattttgagagattgagtgatgctcgtaatgtgttcgataaaatgactgtgagaaatgttgttacttggactgctgttattgatgggtacatgagatttggtttaaatgaagaagcttttgggttgtttaaggattcgattcgagatggggttcgagctaatgagaagatgtttgtgtgtttaatgaatctttgtagtaagaggaaggattttgagcttgggaggcagattcatggaggtgttatcaaaggtagtgtgagtaacatgattgttgataattctattgtgaaattctatgctgaatgtggtgatctcaagagtgcttttcgaaaattcgagaaaatggctaaatgggatgtgttttgttggactactatgatcactgcttgttctcaacatgggaatggggaggaagctatttctttgttctctagaatgttggatgagggattttctcccaatggatttacagtttgtggggttttgaaagcttgtggtgaaaaaaaggaactaagcttaggaagacaattacatggtgctatagttaaggaaatgtacaagaatgatgtttttataggcacttctttagttgatatgtatgcaaaatgtggtgagattgtagactctaggaatgtgtttgatagaatgaatcataggaatattgtaacttggacatccatcatagcaggatatgctcggaaggggcgtggcgaggaggctatagagcttttccgagccatgaagaggcgaaacatctttcctaataacttgaccattgtgaacattcttagggcttgtggctcgatcgaaaattcattgcttggaagggaagtgcacgcgcagatagtgaagaactctattgaaactaacttgtaccttggaaatacattggtttggttctattgtagatttggtgagtactctaaagccattaaggtcctccaaaacttgcctcatagagatgtgttttcatggacagcaatcatttccggttgtactcatctaggatatgactctgaagctcttgagttcttaagagaaatgattaaggaaggagtagaaccaaactcttttacttattcatcagccttaaaagcttgtgctcagcttgaaactgtccttcaaggcagattgattcactactcagccaagaaaactccttccatgtcaaatgttttcgtgggcagcgctttgatttacatgtactcaaagtgcgggtatgtaactgaagcgtttaatgtcttcgaaaacatgcctgaaaagaattttgttgcttggaaatctatgattatggggtatgcaaggaatggattctgcaacgaggctttgaaactcatgtatcgaatgcgagcagaaggtttcgaggtggatgattatgtccgtacaactgttctcgccgcgtgtggagatgttgagttagatgataatgtagaagagcattcatatgcttgtagtttgaagtctggttcctctgtttgaaacttgtatgaatgaatgaagatggaaatggttataacatttataagtgttgttatcaacttaatcttctgttcatacttgttttgaacatctaatatgtaccctactgatatatgtattcactgactggtgtagattatgaatgaagaaagaattagctatgaaaagaaatgtcttgtgtgtgcacatatgccttagagttgagtttgttcatagtagttaaattgtatgaaaacatgggcatattgttaagactttcttaatgcaaattaaaataggataatttgctgccattttaatttttatacacttaatctctttatcattttttgtgacaatactgcagtgacggacccagaatttttactttgtgggggcttatttatcattaaaaaatatttatatggggctttttttattattttagtctataattatcaaattaaaaaaattacatttaattttttaaaaggtaatatttttgttagtggggctatagcccccatattgatactactaggtccgtccctgataccgcttaactttactttttttttacaaatttgttgcgtcggtaaaatttcactgtcaaatgttaactggaattgtcaccgtctcacatttgaggcacatgtgacagcaatacatcaaagctaatagaatatatcgtgtatacaaaagtgtacacagtaacaatttaattggtatttaacggtgtgatttaactgattttttaaatatgtaaaaaaaaaaagatttcaccgccaataacccataagaatatcatgtttatgcatgcataattaatcattactcatttaattataacaaaaaatatttaaataattatacacatgtatatataatttgagtaatgttagatatattaatattgatcaacaaatttttagctatgattaattgagtggattaatttaagattcaaatatttatatagttttactatattaattttttataactttaattaatagtatttctataatttataaataattataaattaaaataattaacacattaataaaaatattattgattttagctatgattcctaaaaattaagtaaataataacatactttgactataattatttttttttttaattttttttaaagcaatgaatatttgactatgattagtctatggcaaacaatatagattagatgcaaataaaggtaccattattacattatttagtatttaccaattttaaaactattttatgaatactcaatagaagtacccatgttagttatattatatttgtgattaaatattttgttccaactaagtctcacaatcaacttaatgattttctattc

SEQ ID NO: 219999 - DNA, 1105 bp, Cannabis indica
gtgtcattttcaatagagcgacggattagcaccggtggttgagggtaaagccgaagggactgaaatcattccaataagaatcttaaattggatacaagattgaaaaaatgagcataaaaggaaaggaaaaactatctactaacttcattgatcacccgagtcgaatacttgagtttcttcatgtcatcaatggttggatatcgatcacctagaaccgaatcaacctaatgtaaagagaaaataaagttaaagctacaatcttctagttatgtttagatgaccgaaaattttgaagtacctcttcttggagcttagctacaacccgaggctcctgcaaccaatcgaaaagaacatttagaactgttttttcgaagtgtatagtgtagtatagaatcatttcgatttctagtagtgttgagaaatattgttagcctcatttcgtgtgattaccttggataaaagataaaatgtccatgttaaaaccgcagctgaagtttcatgccccgctataagcattgtcatcaaatcatcgcgaagttgcttgctcgaaacctacaaatagatgatgtatcattatctctagaacatacatcattataattaatacagaaatagaaagaacacaaaaccgaatcgtacgtcatctccagaggctaagaggaagtgaagaatactaggatccttttcgttcatgtattcctcgtggaattgcagctcttcttcatcaaccatcctctgaaaacgcaaaatcgagttgcctatattagcacatgtacaactaaaggatcaaaccatagattggctagagattgcatcagaagaccaagttgaatatactataccaaggccaagatatataggatgtgtttggttcgaggtaataaaatggaaaggaataaattttattccagtcttttgtttggttatgttttaaagtagtgaaatgtcatgccaaaaggaatgacaacttattcactattttggtggaatgactattccattccgagaaagatttattgattgtttttatgcatttcaaattctttttttttctcatttttattctcgtgttttcattctttacaaccaaacgtgtatttacttc

SEQ ID NO: 220000 - DNA, 2897 bp, Cannabis indica
catagacatgttgttgatgtaggcctaactcttcttgctcaagcagaaatgcctctccacttttggtgggaagctttcacatttgctacctatctcataagtaggctctctatacccaatctcaactatgaaataatatacaccaaattgttcaaaaaagaaccagattataacctcatcaaagtctttggttgctcatgttttccacttcttagaccctatgaaaatcataaagtgtcattcagatcctctaattgtctatttttggggtactgtctatcctcaaagggatatgagtgtctccaccctagtggtcgaatatatgttgccaggagtgttacctttaatgaaaatgagtttcctaacaactctctttttcactccaagcaatctcacacctcatcttcaactgtcatatttgacagcaatgatttttgtgttcctctttcagcaataacaccacagccaccaccattacttccccattctttgaacaatgatttctatcatcatttcaccacatagtccactccctctcacattcactcaaacaactcatcacctaatacacataatcattctccaacccctacttcatcctcatcctctaatcaaaatcctattggcccaggaggcactaattctcaaagtatgcatcctatggtcactagatccaaagtaggaatttttaaacccaaagtgtaccttgccacttcatctagtgatcttgagccaaccactatcaaagttgccttggtcattcctgtttggaaccttgctatgacagttgaaatggttgccttaagaagaaataaaacttgggtgcttgtacccaaaccaccaaacactcccattgtcagctataaatgggtttatagaataaaatataatgcagatgacagtgtggaaaggcacaaagccagattggttgtaaatgattttcaacaaacacctgggatagacttctttgagacatatagccctgtcatcaaaccatgcacaattcgggtcatgttcacccttccagccacttacaattgggatattcaacaagttgatatcaacaatgcattcttacatggacagcttcaagaaatagtttatatggaacaactacctagtttcactgaccctcaatatccaactcatgtttgcaaactcaacaaggcaatttatggtctcaaacaggccccttaggcctggtttgacactcgcaaaacatctctgcttcaatgggggttcagtaatgcaaaatcagatgccaacttatttaatatgaacaaaaacaagtcgctattactcctacttgtttatgtggatgacatacttataacaagagttgattcatatcgaattcagcaagttatcactgctcttgaaactcaattttcacttaagcaacttggtcttattagctacttccttggtttttaagtaattcaagacaactctacaatatttctcaatcaacacaagtacactaaggatctactaattcgaaccaagatgactgatgctaaacctcaatcaactccaaggtgctcaagctcaaaattatctctgctttcaggcactcctctaccaaatccaactgagtacatgagcattataggggctctccaatacttgtgtcacacaaggcctgacatatcctttgctgtcaacaggttgagtcaatatatgcaatctctaactttagaacattaggggctatcaagagggtgcttcgatatcttgctagtactatgcatcttggccttgtcttcacaccatcacataatcttcaactctaaggctacacaaactcatattggacagggtgtcatgatgacaaaaagtccatttctggttacaacatcttcttagggaacaatcttataagctagtgctccaaaaagtaacaaattgttgctcgatctagcacaatctgaatatagagatttagctcttgctacttcaaaagtaatttggattcaatcgctcatgtctgaactatccacttctctgctcaattgtccaatcttatggtgtgagaaccttggagctggatctttagcatctaattgtgtgtttcatgccaaaacgaaacacattgaaatagacttgcattttgtaagggattgggttctttctaagcaacttgaagtacgatatgttgacaccgtcaatcaagtggctgacatattcactaaacccttacctatatcctccttttccttcttaagaaacaagttgccacttggtgtccacccgtgtcacttgagggatgatattgaactagtagcaacagtcaaccaacaaccaacaaattgatcaacatgaaatgagtgtcaactgtccaaattccgttataattaattctagtttgttgagtcagttatatgttggttgtatgatccctttgtaatgacatgtctataaataagattctgcctcaacaagattagttgagcatctttttcattccatcttcttcttccttttctctctcgttatttcactctgttatactctgcacctagtctaattcacttgtgtgtgactaaaagtgaatcataaacaacttgtatatgaatactatattttggtcgcaagtaacttttcgttgtgactaaaatattatcactaaaaagagctattttttgtagtgttataattggttagcgattttttataatatttattaaagtaaaacaagtggagacctgatattgaattacactaataaaaatatttcattttacaagagtgttaaggaattctctaatgggacactaaaatcctaaaaatagtggagtttgaacacaaaattactccaatagaacactaaatgttatcctatatatgggagagtctatagtgtcccactatttctagtgagacactatagactacac

SEQ ID NO: 220001 - DNA, 2945 bp, Cannabis indica
aatttatatatataattttgtttgaagctatatatagatgctaattttgtcattcgataatgaagtagatatatggagccctctcacatgtaataacgtctcatcaattagtcattcattttgttcattaaaggaaactatatatttagtatatggtcacaaataacaactggatagcccaataaattaatatacttaataattaatgggaaattgtttgattatgaaataaagaaaattttgttggagtgggggcaagagtggataaacaagaaaggccgcacgagggaaagtagtacatattaaggtacatacatacatttacttaattattattattacaattaattaatctaaccaacttaaaatactagttcatttttccactgttccaacgattcttgctgtcggcttccctttctttttaatttttttttttgtgattctccaccaaaagaatttgttatttatatatatatatatgttagattgaatgattttgtttggatgatataagactattgatcattcgtgtaactttaatgggggagtatatattgaattgatgaatttccatggccaaaacttatatagttgaatcttgtaaatatgaagaaaaaaaaaacttatgcatttaccattaccaaatactgataataatctagaagtaatatttaaattcttatttaagcatttgaaaattaaaatcaagttaaaggttgttgaattatatgatttcctttttaatgttatttttttttaaaggtatccagtgttaataacattaattgctgccaatatgattaagatgatgaaagttttatttctattttttgagaaaattaaatttattatggataactaactttttctttttaggtcttagttaaacatcatgtgaatcacatgtgtgtccttccaataaatttcttacttgtccttcatggtaaatttattaccatacacttgttaaaaaataataatcgtagcttgtatttatttatttatttatttttttggaaagatctaggtttaccttatattatatataatatgtatattgtatttacttaaggtatatgatctaatttgtttgtatacttgatagtggaccacttatcgcctttggagtaggtggatttgattttgatctcggatcagattcaggaagttagacaaaccttttgctcaattgatagctcttaaagtcctaggccaagatggcatgtccactttgttcttcaaacactactgggagttagtggaaaaagatttctgtgagggtgtggtggaatttttcctttctgggtctatacataaaggaatcaataaaactaatatagttctcatttttaaggttcctaacccgaaaaaagtattgcagttcaaacctattttcctttgtaatgtaatctataaagttatctcaaaaatcattgcaaagtgaattaagagggttctcccacaaattatctgtcctacgtactcaggtagcctttgttccaggacaatgtatccaagacaacaatgtgttagtacaataaataatcctaactctttttaaacttaaaaaaggaaaagaggacagtaaaggttggtagacttaactgtagacatcctctctcgaattcttgagaatgccctagacacgggcaccattagaggaataaagttgagccagtatggcctagactctttcaccagttcttcgcggatgaccttattttggtgggcagagcatcagtggatgaagccacaggcttttaaaattgtctggagaaattctgtaattgatcgggacaacgtgttaataaaatgaaaacctttattttcttcaaatataagaataccagtgatgggatgaagcgatgtattaagaaggctcttgggctcagtacggtaaagggcaacattaactacctagggctgccgttattccgaaatcggaataaagattgagattttaacttcattctagataaccttctttcaagcccacatggatggaagttgaaatctttatctaaagctagtcgtgctaccctaataaagtcagtagcgctctccttgccagtgtatgctatacaaactacgaaattgtctaagaaacttacagctaaaattgatgggatggttagagatttttggtgggattgtgattaagaaaactatagaatctacttaaaggcttgggatcagttgtgtctccctaatttagagggggactaggtttctgaaggacattggaaataaattaggccttcatagctaaatggggttgggcacatattaccaaggaacaatctttgtgctgtaaagtcttaaacgctaaataccttaaaggcagacccttcttacagagttcagctaggaattcaaactattgattctagaagaatgttgtgaaataaaaagaaatcctttcgaaaggagcctgtaaactcttaacagataggaaggatacgaacatttgggatgacccgtttataactcatggtcggaatttctacccccagcctttaaatgggcaacatgaagggttgaagaaagttgctgacttactgacagacaatcgtaactggaatgcaaacaagctcaattctttattcgatcaggagacaaccaccgacatcataaaagggggcaggcctgggggtcaaggtagggacaaatagatttggatgaaagaaccaaacagttagttctatactaaatctgcctatcttactcaggcgttgtcgtgtgctccccataccaatgttgctccgacctttggaataaattttggaatgcgaaaattttggaacgtcacaaagtcctatggtggagtattctctctaatgctttacctattagggctgctctggctaaaaggatgaatattgaggagatgggtcttgccccatgtgtgttgaaggagaggaaacaatggagcattttttctt

SEQ ID NO: 220002 - DNA, 1878 bp, Cannabis indica
gagagagagagaaagagatgagcaatcataatgtttataaaattgatggaatttccgaataaaataaactcaatatgggttttggttttggtggactggaacatataatatatagctagttaaagattttaaaagtggatcttctgaaatcttaagtatgagtgatccaccatagctagtcccacaaaaaaacatcattttgattgttattgttattattaatacatttaaatttgatgtataactcaaaatatcagacagaagcaatatttgcagaattatggggtacaaccattcacatgagaagatgagaaccagctagtccttgtctctggaccatgccacatccaactcccttccatcccttaatttttctcttattttttcttgttttgttttctgttttttagtggattttttaattttattattcaccataaccgtacaaggcagaatagtatttcacaatttttggagaattgttatttttttttaaaaaaaaaaatgtgataataaaatacgaatctttgaagaatcaccacttgatcattatatttgatctgtaaccaattacatagtgccaccttggcagtgaatatcaatttccctaagtagtttcttgactttttacctttgcccaatagcactctcaataccttattctataatgtaaaatatttatatatattgcttgtaacttttacattacactattaccataatttctttttatatcatttaaataatttgaaatattaaaattataaaataataactaatttgtgctatatttgagtcactatttataattgtgttcaaagcacacgatgtaaaaaaaataacaaaaaattagagcattgttattgggcaccaatggtgcctagccctctaaacattttgccttgcgattggctagcgatactctctaaaaattattatattaaactatatgagacccgataattaattgaaccaatagcacttctcgaaaaaaaattaattattattgatcattatttattatattgaaaataataaaaaaaaaaaaaaaaaaattaattattataatagtattgatataatgatgggcttttttcagttttaaccaaaaaaaataacaatattacaaaaatacttcaagctgaccaaataaacaaatatacagcctaaataaaaaaatttacacaaataccacttacacaccttcaacctaggatccatgctttctgggcaactatcgcgcaactacacagcaacctaacgcaccaaatcaaaaattcaaccagaaagagagccaccattaattccgacgacttcacttgagaagacgaccagaatcaatgaaaacaggagatgttttgaattcataaaaaagtgtggaaaaacaattacgaaactaaaatttaaccggaaatccagtttaatttgcataaaactaatgtctcgacttcaatttttagatccatgaaaggcagatatcaaaaacttgaattggagttcccaaacaatccaactcaagtataatctgaaaaaaaaaattacatcgatactatagtaaaatatttatcctggtgtatttttgttgtttcccaaagatctaatggtgaatttgttcatattaaatcataaagagacatgtagataaagttatgtacgtggaaacattgttctgatttttaatgttttagtttcacaacagttgcattacagttgcataaacattttgctaacagttatttcgtctgattgaaaccttcatctggtgtaaccttcggccaaccacccaacaaccacttaaaaacatttgtctgattgaaaccttcatctgatgcaaccttcggccaaccacctagcaaccaccctgcaaccatcgtctga

SEQ ID NO: 220003 - DNA, 1761 bp, Cannabis indica
caaacttatagagattatgcactagttagcatgctacaatattggatgcacgaaaaagagtttgaactatgaagcctgatccatgataaaccaaaactattagacaagcgtcttttgcaacttttctaggctaactttcatgagaaccaggtaaagagtaagcctaggggcagtccctacaatagtccagcccctgcgtatgaaagttctccaaaggttaacgtgatggaacttgaaatttcatctgttactgaaaatgatggaactgttgaaaaggcagaagcattgtcaaaggagcttgaagaagtgagtaaattacccagtcaatttttcatgaaaatgtggtttttgacctttattagatatcataccatgacatactgctaaaactataactaaattaatacttgaaattgtatgcctgtgatggaatcaaataaacactctggctgttgaaaaataaatggacattacaagttcacaacatgttaggttctttttcctacaagctataaatggttttgatttttgaatgaaagttgctttgctttcattattcaacttataagacattgtggatgactctctctctgttataatatttgtcttcgctcttgctattaatgatcttttttctttaggtttaactgtttgtaatataaaagtctaataatcttgagagtcagatctcagatttatggtattggtaaaaatgttagtaagttcagccagaaatgtgagcttcagtattatcagtcctgccgagcattactgcttgtattacaaatattatcactaatatttgtagcttttcttgcacctagtcaactgtcccttttataaccccaatcctctacagatttgcaatatgctgaaaaagaaacacgatgaagccaaagaaatactagtgggagcagttgtaaacaacaataatttactcatgctgaaccatcctctctatgaagagaagatatccttcagcctcactttacttcagttctaatgttgataatgacttctatttttacttataaatatatatttgaatattccttaatacctaaaaacatctacaagatccagaaatttgctgctgagctgatgtccaaggagattaaaacgtgattagaagagcactaggattcttcacacaaaggtatgctgattctgtcactgatttctgagatgcttgaagaaaacctatactttcaaactatgttgtgtaaaatcatgttgagcataaatttcaaaagagttctctatagttagtctaatgcaagtcaagcaagggtctggcattattgaattgacaaattatacgtctatgtaataaaggagttattctgatgtatgtgaattgtgaaccatatgggcattagtctattactaaagtggttctactacaaccatatcttgtacttattaacatttgcacattgacctttcaatgaagcatgcttttttacatgtgtgaaatccttatcggtctattagtctagatttatgggctgatgattccagaatcaaaattatttaaagtgtcgtttcagtgcctacaagataaaactacgtaagaacaaccatttggcaactcaaactatactgttttaaacatacaaaaattaagatcttgttctgttctcgtatgttttcccaagttatatctcatcatgttgtttctatgcaatttggtaatatgcatacaaacaatcatcccacagaatgagataacaaccaatttatagatcaataaacatgtaa

SEQ ID NO: 220004 - DNA, 2868 bp, Cannabis indica
atatataaagatggacatttatttcccatacaccttcctatatagcaactgcaaaataggccattaatatgaacccccaactatattcaacatattaatattttttctttttatacttatttgtgtccattcaattatttggtatctaaaagttaagttttataattactagctagctagccagctagaccttaaaggaaaaaagacattgcaaaaaaaaaaaaaaaaaatccgatgccaatttcttttaacactacatatgtatgcacatgtgcaaagccattactttaaaataaataaaaaaaaaaaacttaaatgaaactcttcgagcattttaaattccaagtagtatatattattactggcattttgatctaataggggtcctttgttatgttgtaaattgcagtccctaaatttacttgttaaagtgaaacatttatttttgtggaaaattatacacaactagttgtctacttttattaacctatggcacaaaggaattcagatgagtacttcttgtcctttttgctaagggcactgagactgttcaccgcgcccttgagcttgtgattccccgagacatattcgacactatttggctacttttgtgcacataccttctacactatgtttgtgttatggtttataccctgaaaaatctataaaatatttttaattatgaatattaattattttgatatatgcttaaatgttaaattattaatattttagatataaatatgtaagatttttttttcatatatgaagtcgtgatttgtattcattacaagaaatacattttttagcggtggatatttggctgacaatggtaggcacaacgcgctggcatacttttatcggcgcataaatacgctgataaaaagtatatgctattctcggtcagtaaaagagtttttgctggcgcaactaccaattgtaccgaaaaaacaagctttcacagatgagcttatgcgtcacatttttttccaattagcgtgtaaaagttttaccagcgtacatataattgcgtcggtaaaacttttacccgccaattagattatgacagaaattagttataccgacgcacttatgcactaacaaaagacttaccctccatatttttttaatgttgtggtatgttttgctggcgcataaaagttttttttattttatttttaaaaaatttaataatttattatattctaataaaatataatagaattatatataattttaaatattaaattagatttgaaaaaattctaatcaaattaatcaaataaaaaaatagtattcaaatatataattaaatagtatttccatcaaactactataaaaatataacgtcctaattaattagaattactaaattaattttctaattgttgtgcacgcctttgctaatcaaaaagttttcttgaaaattcgtgacaaaaatttatatttttaattaaactttaaactagtataaatatataatcgtacataaaagtcgggatcccatcttagaaatttacgacattactcaaaatacattttactaaagtgtcgcaccgtgactacaaaatgaaggcccaagtcgtcctgagatcgaacacttcaggtctaatcatcttgatatgtagaaccatccttgagttctagactcactggtactcaaatttcgccatttctttacttatacatgtaagcaatatctatgagtcgacagactcagtaagaaaaacacaaaatatataacataatttcgacttgtatcttgaggcccatttacctatttacaaggcttcaaatgaatcaagaactttttttttaatagaagtacgacctctgtaccacacgcactaagtactcgtcccgtactagtgttggtagggctaaattacacctcgagtaccattgaatgttgtaccacatatgcactctgtactcgtctcgtactagtgttggtaacattgtgtcatactcttttaacatcatatactgtaccaatgcactccgtaccgtaattggatagtgttggtagtatacaaatcacatattacagcatgcatatcatatacatacacatatatacatatacacattttatactaatcttacctcgttttcaaattcaagtctaccggtcaacttgaatggaaattcacgtgttgaacggaggccttatatcacaatcacacaaaacaggtaaacaacttgctaaaatctttttggaaacctaaactcaaactaaaagtttccctatcgataaatagcatggcaataccctaaatatcgagaaaacatgaaaagatgagactatgaaaaaaattcctgaaaaatggcaagacatttttgtataaaacgacagactgttttaattgggttcttgacagtaaaaatggtataccgtttcctcataaacggtctgccgtattctgctacagaaacaaaccaactctcatttttaacccaaatcgaccctaaacttggtaaaactctccagaacacctaaacaaagtctaatagacacaaacaatgcaacaaaatcaagaataactgaaaataaaaaattcaccattgttgagccaaatttgagttcttgaactcaaacttgctcaacaactcaacgaactctcaaattcaactcaaataaacttcaattaactcagtactaacccaaaaaactaaacccaaactcaagtggttcgaatagaacctaattcaagacattggatgcttgactcaaaaactaaacttccaaaacttaaagaggaagggttaaagggctttacctctgatcttagttgtaacaccccgatttcccgagatgtcacataggatagtccgtataaaacaatttaataagataaagacaatcaa

SEQ ID NO: 220005 - DNA, 4988 bp, Cannabis indica
aaaaaaatgaaaagaaatgaaactatagcttgtatacatacttgaggaattagtagaaaagataatttttgttacgtaggcaagaattgcaatttgcaaattttttaggtttccattattaagcaactccacagctccatgtcttcgtccttcatcatcgaaaatcgaaccagatattttagttccaaccttatgttttggagtaacaccattgtcaggaccaactccagcttctaacaaagcttctttcacagcaaattgccaagttgagagattcgagtatgacactatgctatcttccacccacttgtaagccttttcaacctcattcatgtcccatttcacaccagaatacttcacaaaaaaatcatgctcagcttctgaaaagaagccagcattaatcatactcgaccctcccaaaaccctacctcttacattatcaacaccatctttcgaggtgaacctctgcgccggtgtattagtattgtcatcagtgtcttcttcagatagaagattcacgaaccccgaggacaccaatgtgttcgggtgagctttagggacgtttcctctttcgaggacaagaactgagtaattttctgacaaagttgcggctatagggcaaccggttgtgccacctccaatcacgatgtagtcatattcttgtattaagggtaaatcggttgcgttcacaacagatttcatgtaactaaagtctgcttaaaataaattgaaattaaagtatttattgagatttaaactaattaaactaataaggatgatgaagaaaaaaatgtaaaaacatacgaaagataaattggaacatcattatagaaattaagatataaataccgtaatcaaccgcgtaactcaacaatattccatgaaaacatgttaacaatattattataagcagagttataagaagggatagaagagatggggtcattttaattttttatttctcaaagtgaattaagctacaaaatatatattttccttattatctattatcttacctatatatagtatttttttaaacccactatatatacagttttcaacaaatgagtagcatatatagatatataaataaggtagctaaatgtgaggctaattaattttagccgcaaaaaattaatgtttgctcaattgctacgtacgtacatacctaactaagtattatgtagacaaaaccactactttaagctagctcaagtgaccatagagagtgtgtgttggaggtcctaagtttgagtttcttttttttttttttttgaaaagaacctcagttcaaacttcattaacaacagagaaaatgggatccacagggggaaatccctcccctttacagcaaggaaaatcgctctcagataagcgagcactcttagcaagattatcaacaaaagctaagtaagtgcggttagtatgttgcattgttacatcagaaagacttcgtttcatctttaaagcagaagagaaccaggaaatacaatgccagttgggatgtctctccttcttgaaggcatccaaaactactgaggagtctgaaatgataaccaagtcgtcccaattgttgctagtggcccactgcagggcaatgaaccaagcaaaaacctcagctgccaccgcattctccccaacagcagactttgcctcataaaaccagtcatttgtgtcacgattccaagcgagaaatccagcaccaatctttccttcagagaacgatccatccaccatgatcaacttcctgtgtttgagttctaaattatgtatggttatagtatataaacatttaagggctcgtttattacgttatattaagtcgtattgtattgaattatattatatatcatatttttatataatactatgtaaaactttaatttatactaaaatattatatataggtgctcataaaattcaataccacgtacttatagttttatataaaaagtttgcatgaaatacaatacgataaaatactatacaatatagcgtaccaaattaaccctaaatcaaaaaaaaaatattctataaactatttattaaatgatttagaggtggaaatcagtgtcaagtttgtgtacgtttgatgcggcttaataattatttgatattgtttatatctcaactttaattggatcttgtgtttagcgggttgactatatttatgtacattacttattaaacatatcaatttgtttgactcatttgaataaagatatatgttttaataaataaaattgataaaattaaaattataagttgcaaatgtatgagtcttgtctatatcgacatggtctgagtttatattagttggttttattttgtgactagtgttatcgtattcgttttttcatggcaggaattggagtagaagagcagtatgcatgcagatatggaattggggggatgatgaggggtttttgatgtacgaggaagggacagttgatgcagaagattttgatgataggtggtgcctagtggggagatttcttacagatagatcctttgatttccaagccatgcaacataaaatggcttctctgtgaagacctgttcgtggtatgtttgttaaggatttgggacaagagagatttttgtttctattctaccataagatggatatagaaagggtaattgaaggcagtctatggacgtttgatcaggtccctctaatttttgaaaggctaaaaactggagacaatccaagaattgtgtcccttaataagttgaatttttgggcgcaacttcatggcatgatctctgaatgaaaatcggctaacgtagtaaaggacattggcaactacataggacagtttgtggaatcggacccattgaactttaatggtgtttggaaggattatttaagggttagagtttcactccgtgtggatacgctttaacggagaatgaagctccatatgaggggaggccccatgtgctatgcaacattcaaatataaagatcttacaacgttttgctttgtatgtgcagtactggcccgaggcattcagaaaggtttgtgcaaaaccttgcacattctaaggcatcataaccaaaaactatggcattgaaatgaaggatgctcccaaacgaaaacaacacaccataggatcgaagtggctccgttcagacatgatggtcagagttgaggtggaaaagccggtggaggttccggtgggcttgactccacgaaatcccatatggaaagtatggaaatggaggttaatcaagagagaataaggggaggtcgtaatttggggaagagtataataggcgatgaggaggaaatcttggcaattaatgaccaaagaatgtcaactgttgacaatcaggtaaaagggggaaaattaatattgggagggaattcaaactctgggccctttgaagttagtgagggtattgaatgggtgcatggaccagaagaggaggagattgtctattgaaaatatgaatgggcctttgcaaggtaataatggtatgggccttaataaagaaaatatggacacttccattggtgatgttgaaacagcaatggtggaagatgtcgggacgaatgaagatatgggaacaatgacaaaaaactttatggaggcgaattctagtggccagacccgccaaagattatgaatgtattaagttggaattgtcgtgggcttgggaacccatggacggtttaattccttaaagagataatttctcaaaagagactccactttgtctttctctgtgaaacaaaatgtttgaagaatagagttgagtgggtgggctattctttgggctttgaaggggtttattgtgtggatgcccatggtagaagtgggggcctaactttattgtggaaggatagggagggggaaggattattggtttttctaacaaccatattgatattgtggtagaaacggatgccacaaagaaatagaggctaacgggtttatatggagaacaaaaagagatcaacgacaaagtacttggaaccttattcggacccttagcactagttctactttgccgtggtgtatcgtgggcgacctcaacaacgtcgtcaaccaagcagacaagaagggtggtcttccctacccgaggcggctattagagggtttttagcaagtgttggctgattgtgacttggtggatgtagatttgattgggcatcctttcacgtgggagcggaattggggtgaagcaaattggatagaggtccgtcttgatcgagcattggttagttcttcctgggcattaaaatttcctcttgcaaaattatttaatcttgaacattcatcatcagattactctcctattttcttggagcatgttggacagctggttgatgtgtgtaaccggaagtttaaaatttgaaaatgcatggctaaaagagcctttgtgtcaaaccattgttagtgacagttggatttcgtcttcggggctgattatttctagtaaaatccataattgtgctgagaagcttgcagtttggggtaaatcaattactggtgactttaaagggagaatcaagaattgcaaaaaggagctgaatctcttgaaaaacaaaagagatgaagcttcagtacagaggtataaggagactaagaagcatttgtttgaggtattggaatatcgagaaattttttggaagcagcattcgaagcaattctggcttaaagaaggggatcaaaatagccgttatttccatgcggctgctagtacaaggaggaaaaacaaacaacattcagaagctaaaatatgaacaaagaagatggttggattaggaatcgggtttgccagatttggtagtaagttattttacttctatttttgctgcttctgggagtaatttctaggaaattattgattgtgtcccacaaagtgtactcagaagaaatgaattgcagccttagacaaccagtcacaaaagaagaggttaaatgtagcagtatttcaaaatgacatcctgacaatagtcctggtcccgatggcatgac

SEQ ID NO: 220006 - DNA, 3023 bp, Cannabis indica
tctggaaagaacatagcatttctccaaatgaaagtaaactctgttgtagattgtcatattagtaaaaccaagtgttctgataaatctaggaatcctttattcacatagtcatgtttactttccactatgttgacaacacaataaacatgatcaagtatgtgaaaggggtttggatgaatttataaatcaaacagacaaacaattaattaagtgaaccaaaacatacacaaatgaatgaaaaatacttctcttactttattgatattgaataatctggattacattgaaatagagttttatttagggcataaaacccaacaaagcaaccatctcacacctaagagaggctagattggtatctttctaatgccgattgggatgcatccgtccccactcctcgtcttcttcacagttatttttttggttctgatcatcgacctttaattttatcactccatttccaggttgatcaagctaaccaagcccctcgtttcatcttggacaagctatggatgtctgagtcgggttttgagaattgccttcgacatgcttggactttaaacccacttactcaaaatcataacccattgctaggactcaacgaaaaacttcataatttctcttcccaattaaaaatatggaagaaatcgatgggtcctcctcttcatgcttaaattcgagaagttcaagctcaactcaagagtgtgcactctatctcgcagcctaccaatgaacacctaaatcggagcagacatcttgagagtgaattaaatcgtcttttacagaaagaggaagagtattggcaacagcgatcccggataacctggctcaaacttggggataggaacactaagtattttcatcattttgcttctcagagacgtcaaactaacaaaattcactttctcaatcgctccgatggttccgtggcaaacgacactcattccactgtaacaacaattgaaaattattttgctaagctattccaaagccaaatccctgcagaagctataattgatttcgtgttagcaggcatcacagagaaactcaatgatgaagaagtgggactccttcaggaaaacttttcagctgaggaaataaagcaatctgctttccaactctccaatgataaagccccggggttagatggattcaatggtctttttttcaaaggaattggcatttggttggaaaggatgtcattactgctagcccaaagttttctaaatggagatgctgacctcacccctattaacaatacactccttgtataaaattttagacatcaatatcctgaggagattaccgactatcggcctattagtctttgttctacattttacaaaatcatttctcgggtgctggttaaccgtctcaaacccattctcaatcgcataatctctcccactcaaagtgcattccttcccaatcgcttaatttctgataacatcattattgggcaagaggtaatgcactctctctcacatcgcaagacaggtcgcctgggatggatggccatcaagttagatatggccaaggcttttgatcgtgtggaatggatcttcattcgccgtgtaatggagaaatttgggtttccccaaaggttcattaccctggtcatggcttgtgtttctactgcaaccttctctttctccattaacaaacaagttcttggccatgttctgccttctagaggcattcggcaaggggaccccctctctccctatttgttcctgctgtgctctgaaggtctttcctctctgatttgccttaaggctcaacagcccaagccccgtaaacattctctgggaatcaaaattgccaggaccgctcctcctgtttctcatctttttttcgctgatgatagccttctcttcagttctgcttcccctaccgctgcggccgtcattaaacaaatcttaaccaactatagctaggcttgtggtcagttggtcaattttaccaaatcggccatgttcttctccccaaataccagctctgaaatcaaaaccgacatcactaccatccttgacatccccattagagatacttttgacaagtacttaggtcttcctcaaacttttggaagaacaaaaaaggatgcgttcaattacatcaaggatcgggtttggtttcacctcaacaaatggaattcaaaattcttttccaaagggggtaaagaaatccttttgaaatctgttgtccaagctataccctcttacgctatggcttgtttcaagcttcctgcttctttccacaataagattgaatcaatgatgtctcaattttggtggggaggttcggtccatacacgtaaaatccactggaaaaactggtcttccttttatttttcaaaattccatgggggccttggttttcgctctatgaaagctttcaatcaagcgatgttggctaaacaggcttggcggcttcttcagtctcgtcactcctttgttgccaatactttcccaatactaattttcttgactctgggaagggccataggccttcactggtttggaccagtatctcttggggcaaagaacttctccagttaggtcttcgcagatcagttggtgatggtagcacggtctccattttcaatgatgcctagattccagggtatggtaaacttcactaccttagacacaactctgacgctaacatgatattggcaaaccttttaacatataataaggaatggaacctcactcttctccaaactatcttcccagcggatgtttgtcaagccatccttacaattcctcttactaacctcaacacacctgatacgtactattggtcccttaccccacatggtacctacacagtcaattttggttatcaccaagcccatagcatcctgcacaaaaatgacctaacaccctcgaatagtgtcattccccaaacatggtggaagcaaatgtggtctcttcctttagctcctaaactgaagcactttctttggcgagcttgccatgacattcttgttgggttttatgccctaaataaaactctgtttc

SEQ ID NO: 220007 - DNA, 3315 bp, Cannabis indica
aaaagattttcttctaaagagattctattcggaactgggttccaataaatggaacccatgggccatattcttctccgatctgagttttgctcacgttatctcgaatgaattcaagaatatatttaaaaaaattctgaccgtctataggaagtgacactagctatatatataaccgatggttttaaacagttaagaatagtaagccactatatattatcgacaattttaactttcacaaaaaaaaatctaaatttgaactatacacgagtctaaatctattcaaatctactaaaattaaaccagacgaacacaaatccaaaacaaataaaaaatcatgaaacaaatgaacaaaattaaaaatttaaacacataatctcaaatttactctgacaaacatacataatttgtaagaattcttaaaatccaagtgttaaaacctttcaaattgtaagtcgtttacaccataagacaaatcgtttaaaccaaaacaatttatcgtctcacgagaatacacaaaaactttttaattttacccttgagttaatcctatttcaaaattcccacgattagaacttttgagatttgtaaccccaaatctccttctaaagtagatttaatgaagttcgttctaaagtagtgtttggttgaaaagaatgaaaatatagaaataggaataagaatggaaataaaaataagaatagaataaaatttaaaatacatataaaaaattgttaaaaaattagagtaattagaaattttacccccaaactttgtcatgtaccaaatcaagtcccctaaacttcattaaaaatactccctaaattattgagattgttggatttaagaattttcgtctaattttagtaaaaaaaatctaatatagatgaaagttcatgagtcatgatttgatagatatcaaaagtctgggaagcatgatttagtacataaacaatcactgaaattgtaaaattgaataaaattaaacaaaaatgcttaaatctaacaatctcaataagagaatttttaacgaccagaaaaattcaaagagtatgattttatacatattaaaatttaagagtaaaaattctaattagtcacaaaattattaaaattatttttcattgtattttaaaatagaatagtgattaaatagtaaaaaagataaaatactttaatatactttaaaatagtaaaaatgtattttgatttgatttcatttcattagaaacaccacctgaattcaaaagcacattctctttaaacttgggttgattctctttaaagtggggttgaagaaaaatttaatattagaagaggtatgaaatccaatccaatccaatccaaggcacaatacttgattggcatttccaattctttcttctgtaattctctacgacctaatctttcttttctctttctctctctctctctctagacctccttccttccttgacatcctccttttctactccgacccagaacagctcccaactagttatgccgcgggagaccagtcccggcttgtaagatcctctggatatggactatcggaacagcagccagtacacacacacactctctctctctctctctctctttatatgtatatgtgtttgtatgtgatactcatttgtacatgtgttgcttagtctcatccatgcctatttattatttctcatggcagttctggttaccagtgtggtaagaacgaggatgagagacatggagacttttatgaatgcagaccaacaaaaccatcaacaccaccaaaatcctcctactgaatcgctcatggacgatccccatctgatctcagaagacgattgataggttcgacatccatctcagttactattgttttgcttttctgatttttaggaagtgatctccacctgtttgattaaagtcccaagtgactacctggaaacttactttgttcctagtatacaaattttcagatattctaaagatattgtctttagcaataattaatgggtgcttagttttctttagaaattctatcaggaaagttattgatgttttaagctcagccgattgagaatctcgagctttacattgcattacatatgatgagtcaattttgttgattactattattattattattagcaattatgatgaataatgaaatagtgcatgtatattatttatatatttatttaccctaacaatgctctattagtatgttaaaagcattcagtgtcaatggagttattagtacaattaagcaagaggcaatgctgctataataatagtatgtaaggtaatggcttggttttgagaaaattaacattataaatattccaccttattccatatccattcatatcacttcaatttaggatattgtgttttgttatgtatgtattttacttatatatatatataaaatgtgttcctagtgttgtgatatatcatatagtatgatctcttttcttttttagaaaaaagagagaagagaaatggtaaaagagtaagcaccagaaagacatttagtttgttcattcattcattactagtttgaaaaggaaaagagaagaaaagaaaagtaagataaagagatgatgtaggtagctaggaatagagactagcattgtctggtgcagaaacagcggcgacgaaagcccttgcatttgccacctgagaatccttcagtcctacacacagtggcacagttgtgatcaattacacatgccccctcgtaatgatggctctgtgattcacacattcttccctctacactccccatctctgtaaaaaaacacacacttacttatttcatcattatatatatacacacatgtacattatatataacaaactacttactagaagaagaagccaagagaatgaacaccaaaaacaaccagaagaagaccactctactaccaaagccaaagcttccttttctgtccattgtttgatgtttgattgatatgatatcatatgatgaggcagccatgtcatgcatgtatctatatatagaaagagagagagcagagaattatgcattgcatgctctccatgtgtcacaatacattgttctcatatgtatatgcatgcttatacacctgtctggctgtctcttactctccaccacttggaaatcaatgtctgtcttctcttctcttgtgctggctcaaaaattttagacttttaaactacattggcaagaataaaataattgtttagtctttcattattatataatgaatttgtatttatatgatgtaaatgaatataagagaataaggtacaaatggctcgtttggaacgccgtattaggtcgtattg

SEQ ID NO: 220008 - DNA, 2141 bp, Cannabis indica
tatttttacgaaaattcatatagaaattcacatagcaactaacagagcaacctaaatcacaactaaaattcacataacaatccacatagattccaccagagcaactattgaagcaacccaaaccgtaaattttaaaaaaaaaaattatatatgggtataactcgcctaaaatatattttaatgtaattattaccttggtaattaaaggatctagtaattacacactaattttcaaatatacccaaaaaggtctataaattcaagaaaagccctaaacttccattatttttacttaaaatatcaacctaatttatcataaaattatagaaattaaggttccaatagaataagcctactactttttcttttctttcttcttagatcttcttgactaactttaaaaaagatatattatactagatttattcttagttatttgtattactattgaatcacttaaattataggtacaaaaaaagaagaagcaaagtgacacatgattccaaacacaagaagatcaatgcctaattaaaaaagcttgctcttttgtagaatctcaatgtggcaagaatgttcccatgtgtcccatgcttgtttttttcctctatttttattcttttacatgagctttcatgtgggactttcactaataatcctataaaaactataataataaaaaataatttttttaaaaaaaaaaattgattttaccacctctattatttatttatgtcttgtgggtttttttttaatttaattaaaattttcattgggtcccctaccattaataaatgattaaaatgaggaaaataaaaaaggaaaaagaaggaattttggcaattttctctcccactcatttatgccttcttggtgaaaattgattggtggaaattagaggaaaatattctagcaaatttaaattttaattattttttattttttgtgaaaagaaaaaagatgttaatccttgagtgcatatgaaatattactttaatatgattagaggtgtatattaagattacaaaagttttgggcaattgaagaatcaagaactattaatagaaagaagaataatgagtaaatgagaatcatagctacttaaataaaaggttgtctaattttcaactaatctatcaattaattaattaattaattttcaatttgattctaccaaaccaacaatatatttgtatatttaataatttgtatttatttatatatcttacaattttcaaagggtatttatttttgcataatattttctttaatttttaatattggccatatctaaagtaatttgatgggaccaaatttggtgaccttattttcttctttaatggatgatagctagtacattagattgatcatgatttaacatatgaatctctttaattattttatttattgatttttgccttttgtaaatgaaaagatataacaaaaaaaaaaaagtggtattgtctttttgcatgttatgttaaaatcaaacaaatatatatttaaaattgaaagtcaaaatcataaactaaattattatcactcaaatcaaatttgttgatttttaattaattaaaagttaaatgtataatatttatttatttactcttaaaattaattaaagaatgacaaatatcatgctaaagggtgatactattataaatatcatttcatgtgaaagatgctcaaatcaaataattcaatattgttctgtttcaaattgcagaattggaataagtgcattaattattgaagttaaaaaaaaatagtacaacccaataggctataataattaccacatttttattgatttatatagttattattcttctgacattattgttattatatacattaattttcttaaatatgaaattaattttttttgttctaaataaaaaaaaattgtagatgtaaatatttaaatttaaatatcggttgcagataaatgtttaagtttaatttcttactaattataatacctaaattatatttctaaaaattctgtaagtaactcgctgttaagtgtcaattcattatctacgtattattttcttatttaatatatttaaattaatttttaaataaaaaaaaaaaaatttaatagatctgcaccaattaaagactgtcacgtgactattgac

SEQ ID NO: 220009 - DNA, 3472 bp, Cannabis indica
gtactggatgtttggatgcttactaattacttctcccagatgctttatgtaatgtcttttgaatgcacgcatgttggatgggtatcttgcctagatgagatatttaggaagatatgatctttagacgagatccttgagagttaattcataatattgtgggatttggtaattaataaatgagaaacgttactagacatccaaatactcactgattacttctcctagatgctttatctaatgtcatctagatggatatcttgcctagacgagtcttctgctcatcatctagaaggactgacattgcttatggacccagtttaatatcttatttgggcctactagtgggcctagaataattaaacagtattcttattggaattccatgtgtctctatctcgaaatacgaataacatttaaccccaagcttctggaactctaggggttgcagaagcttgcactcttcctcgaggacaaacattgaggctaaaggtgaaacctttaagaattctgtattgattttgtttctggtttaaaaatttccattttttttttgaaatagagcaacacgtggcattgtatcatcggtctgtggaggtaactctcactgatgaggcgcatgtggtgaagcatgaaaaaatggtagttgattgcatcagagcgagtctcaagaaatatcatctttcaaattttctcgactcaaaacattgtattaaatgcccaactgtgaatttttctagaccgttggatatttcttgctttttcttaaacgtaatcctggtcgttgatttgggaatacgtggattcccatttgtgtgtataaatatggtacaaccatgtccgtccacaacttttaccccaatttcaaactgagtttgaacttgcagagagaaggtgatgatgagcgagagaacccttaagtactacaacgatcattatattcatcttcttcttcaaatttgtgggggagagaatccaggagcaccacccccagttttaactaccagttctgcaatgccatcaagaacgctaaatatttaagcagaggttgaagacttcatcagtaaaactcaattgcttcaatctagggtttgacatcttgctcatctttcttcgataagtatgtttccttttttaacttcctagaatcttgattactatctgggtttggcattctctttcaatccttgcatgttcaccttgaattgttgatgaataggattttaggccttggagtgattctaaatgttttgtagaaataggacatttaggacatatcgtttgcagtcttgactaggttttccaaaaattttcccttttgttttaatatttgctttgaaatatccacattttagaaatatggatatttaaaatttcttccctctaacccttatggttctggttgatattctttttgattggccttatctgtttctaatctgatcgtccagaatcgatactctttgagagttttactttcaaatgtagggtccagtggggaacactccaagcagttataggggaggaatctcccgtgtctctgctatctattttagtgtgggtacctaactgcttggttattctctttcttattcttttccagtttctaccacggcggaggttcaccagcacaaggaagatgaagttttggaggaagtagttgaaactctcaaagtggtgtgcaattcctctccttgggacaatctcaagaagtatacgacaaaacgtagcctctagagtgttttacgtttgttctagaacatgctttccaaccttggagttgccctataaatgtgcagatggccatggcatctagagttgggcccatattgagataggagcgcatcttttgctcaggggctattttccaaatttttatatagtagtaggtatcgcccccttccaatttattccctaagtttacagaatacttgtggattggtttgtgctttgcaaagccaagaagacagaggtccctaatcgagaagaggttttctatttttatgaccagagatggctagaagactgagcctaacctcatatggagcccatgagcgaagaagtggagctcacggtccattttaaggtggttgttttggatggaggcactctgggagtgagtacgtctggaagaggtaattctccctttgatttattctatgctccaagtctggtagactggatcaaattgattagggggctttaacctatacttcttggagttagatcttcatagtatctcgtgatttgatacctcgataggatagatgagatagtcatgagcctaaatcatttccttctgcctacgcaaagtgttagaggagatccattccttttaataaagtatcatgggctcttctagtatggtagcttcttaggtagggaggatatctcctcgttttcttatgggattccaaatgtaatagtgttaatggttagaacaaaacatgaacttttcattttgttgtatattttttattggttgcttttgcatgactaactctttcatgtttttttatagtgaatcctcaaactatccagatgggtctcctcaacaacttcttagagagcatctccaataggactacaaaggctagggaagctacaatggcttccaaggggaagggaaagtctgaatcatcttcccatgctggaaataaggaaccaagacctccgacaaaagggtaagaaattgttactcatgttcctacttcaaaacctatttcgagatcttaggctttaatagttgttgtggaagattctcttcaagaatctattcctagatattagccaccttagtcatagtggaaacccattctcaaggagcagttataacaactacccttttcagtggtgtcgttatagcaggtgccaattaacgttgatgaagaagatggcactgaaagacttatctttcaaaactaaaaaggttagggtctgaccttagcagagagagcaagtagggagctatggaggatctccagtagttggctgcccgccagaagtagagtaaagaagtttttgtacggaacgaggtagagcctcaaggagttgataagaaaggcaaggtgttggaacctaggaagggctcccgtgtgggaaggaagcctcagaccctaagtcctaaaatatgcaaccaacttctagaaaaaatttccaaaaccaacctaaaaggatgaatcttcctccactccatgtttcttctctaaattttcctgtttgcccactcgacttaccagtatcggagttagttgattgccactaggtggaatgctgagttggttgatttgaaagttagacacgagtcatcccctctgatatttgatcgtcaagtaatcgtagggagacttcaaaccaaggtttgcagtgatttggctccgtttgtagcaaatgttctcgatcaaaccaaaaacacctattgcagacttggttgggctaaggcggctaatgaagatataacctttcataatgactg

SEQ ID NO: 220010 - DNA, 2552 bp, Cannabis indica
actaaaatttggtgggacacggtagacaaagtcatttatgagtatagttttagtgtcttattggagtaaatatagtataaaactacactatatttaatgttttagagtctagttggagatgctcttacagcaaaaataggaatagtgtgcttcgatttcgaaatctatccttaactacccgtgaagaaactaacaatatacggtcaaatattaatttgctcagcgacccaattcaacatctgtgattgagtttgggatagcaaaactacatgaattttatatttttttaactattaaccataaaaatttaaattttgaaagtgaaatttattgaactcagattctattttgtttattactattccatcctccaaactacgtttaagtgttaacatacgtggcacgatctacttcagaaaataatgctactgtggacttaaaataaaaaacaaataaaattttaatttactacaaataaaactaaataaaacctaaaagacaaaaagaaaaccaaaattaaaattaaaatccacggtgaatttaaaactttcaatatacatctaactaaaaaaattactcaaattaaatgaaaatagaaataaaattaaaacaaaatttaattacaaaatgtattaaaagaaaattgaaaaataaaatcaaaaaaaaaaagtagaaaaccaaaagtctaaaacattttaatctctaaggcaaaaaacctcatcgtttccccattcacttctggaaacttgaaaacccaaacctagaggaaccaacccctttaggcgacgatttgaacttttgttgagtactcgacggtgtaaggaggcgaggcaacaacaataaaatatcgaaagcgaggtaaacacgatcccccacctggtaagatttctgagcttctaaatttctaggattttggatagtgttggttttgattgtttgtggtttacatgtggggtaaagcagaaagaatgactttttataatgggttgggataaatgggttatgtcaaatagttaaatgagcattaaaggtggtttgaatattgagtaaaaaacaaatttctgaggaaaagaagaatcttttctcattgtcgagggtattgtcttaattagtgtggtatatgcttttgatatttcacatgctttaagttgaccaaaatgtgttaatttgcacatgggggatgggttttttttttatctctatttgcgaaggggttatttgtttgggggttttgcctagcttgttccaattaacttttaggtttgcctttttatgttcagtgtcattatagcttgttattattcttccagagaatgaaaagggtgaatttacagttaagcttatgcatgggggaacatggttttctccatttgaaaataaaagatatgagggagggtcttgggagtattttaataactgtaaatttgaagcttttattagactggatttgaaggacatggcaagaagccttcaatataggtttccttttggtttcctatacaagccttatgggaagcatttgaacatgggtttaatggttgtaaacaatgctacaattcaacttatgttggaggatttgacaggtataattttaattttttttacatatgttagttgtttgttgtcatacttgagattaagatgatttatggttgttgttgtcctcatttggtaggtagaaattatgcagaggctaatgtgtatttggtgctaccagatccacaattagcattggagtggaaagaggctgctgaagttgtggagatgtagaaaggagagcaatcttcaagacaggagaagtgtaaaattgaagagctgcttgaagagtgtacttgtgttgctgatattgttgtgaatcccccagggcatgtcaatgtggatgataaattttataatttctttctcaagtaggttgagtttatgaatgcagttacaataaaagaggtgatttgaaaagaattacaaaaaccagttgctattagttcctcatttaattcagagccaaatgaggttgaagaggaccttgattattatattcctccatatatggaagattacattgtttaggcaaatgaattgtttgggtatgatgataataacagtgatgatgtatctgatctcacaaatgaagaggtaaatgtttttggatcgtttaaggtttactgtaattttttttcagttttcaatttgatttccactttgttaatttttattttagttttcaatttgatttgcacattgttaattctagttgcactttgtcaaacattccagataccacttgaaatagaaccacaattccttgatgttgtggtgcttggatgccaagaacctaaagaagaaactgaattgaatggacaaccacctgaaccttaatcccttgatgttgtggtgcttggatgcaaagaacctgtagaggaaactccaagagctaagaggttgagacttaggaggatgagaaagtctcaaactcaaacaaaaccaccttgtacacccttggtggtagatgccattaatgacacacatcctcaaacacaagcacctagtacccc

SEQ ID NO: 220011 - DNA, 1861 bp, Cannabis indica
gctagttagggtgttacataattggtcactacgaggttcctaagaagcggtctagaacagatggaggggccaataaaaaggagagggtggagagtaaggaaaaaatgcaatcattggtcactacgaggtggcaagctgctgagtctcaataccagaatggatctaatgtctccgagaatggaaggcaagtcaggaggagcacttgaacaaccaaggacaattaagatctacctccaccacccccagcacccaaaaacattccagccacctccactcagttgtttagagagaacacaacttggcttccgttacttccttaatttttttatcttctagttaggcccacgtcaatgtcaaatgaggtaagagcacacatggaggccataaagcagttttacctaaagaggtatgccagcgagtatgatcagatgagaaaattagctagcaacattttctaccagatgtaacggtgagttttctgattacaagaagtggggtgaacttgttccagacattattaatagagtagagatgacggagatactttgtcctagagttgggacaaatttggctctgttcctatctgatatgctgaaccaaagtgctaccaccagttgtaagcttgggactgacaggtttgcaatgatggcaagtggggaccccgtctacatggtaaatactatgaggacccaagccaacgctataagttaactttttttaaaattatctaaggaaaaaatatgcccattttatttgtccaattcattcatgatcccttttacaggttagcctgatagcggagaggacctgctccttgctcaattagcaggcctatgaacttgaactgctgaagttaatgccaaaatggagtccatcatcaagcaaagagtaaatgactctcttgataaggctattgcttgtgagaagaaggcgaccaagattgagagagaccgtggagacaaatacaaggaggaatatactcaagctctatttcagatcagtgacttggaggcagatctgaagcaagataagttggacctcaaagagtcaaaacaaaagcacacccttctatctcaagaatatgaaaagaagacttgaatcctggatgacaaaattatttccgaagccactctagagagaaaggtgaaactccatttagatttgcagcacaaggcgaaggaggctgagaaggaggctctcaaaaaggttgaggagagtgtagctgaattgaactctaccaaaaaaactttggctcaggcctgtgaagaatccaagaaaaagacttcaaagctagaaggccaaattcaaaaaatggctcaagagaagcaggaccaagaggctaggacatcagaagcgttaaaacatgcttttgttcattctttgtacactatctagaagctcaataacttcgtgatgcattttctgaaagatgaagatagagaatagttgatgccccaggttctccaactagctaaagcagaataagccaagaaggcagcgagggcagtggaggtgatcgattctagaactttcccccttgagggtgagaacttggaagaaccaactcttccaattgttgatgctccttgtgtgacggattatgtgatctcgaaggtctccactaatgttcagcccgataatgctcaaccaccaaaggacccaatcttgccttgacaaaatttatccaactcttacttatttttctttaatatgttttaatatttgggggataaagatctcccttttgcatatacagagacaaattttattcccttgttgcggggcttttaagtatgctattgtattttagatatttgcatactttttttaactctttagatatttatttttatatatatat

SEQ ID NO: 220012 - DNA, 3709 bp, Cannabis indica
tatataaatatacatatattaatgatgttaattatatataaagaagaaaaaatgattttgagtttcttaatttgttttaggctcaacacgaacgccatgagaactcaattctgaaagctgagaacgataagcttagagctgagaacaataggtacaaggaagccttgagtaacgccacatgccctaactgtggaggaccagccgcactaggcgaaatgtcatttgatgaacaacatttaaggatagaaaatgctcgtctaagagaagaggtaattaattaattaattaattcattaaaatgcttgtctatttggattgagaggggtttttgtttaatttacactcatatatactgtacccagattgataggatatctgggattgcggctaaatatgcgggaaagccgttatcttcattttctcacctttcgtctcacgcttctcgtactcttgacatttcgggtgttggaaatttcgggtctcagtcgggtttcgtgggcgaaatgtttggtgctactggtgatctactgaggtcagtttcagtccctaccgaagctgataaaccaataatagttgagttagctgttgcagctatggaggaacttattagaatggcccaagctggtgaccctttatggattcctgcccatcatgacaataactccattagtggtggtaataatagcactgaaattttaaacgaggatgagtacttgaggactttccctaggggaattgggcctaaaccacttggcatgaaatctgaagcctcaagagaaacaaatgtggtcattatgaatcatactaatcttgttgagattcttatggatgtggtaagtaattaataatcattttcatgtatttattttttcacaattaaattaattatgttttttttttcttataattaacagaaccaatggtcgaccatattttgtggaattgtttcaagagctatgactctggatatcctctcaactggagtagcagggaactacaatggagcattacaagtggtaattaattagtaaaatattttttatagagttaattttactttattatataacttaattgctctcttttggttttgttaattttttactgttttgatcctacaaaagatgacagctgagttccaagtcccttcaccacttgttccaacgagagagaattacttcgttaggtactgtaaacaacatggcgatggaacttgggcagtggttgatgtttccttggacaatttacgcccaagtcccatttccaggagccgaagaaggccatctggttgcctaatccaagaattgccaaatggatattcaaaggcaataactctaatttccactttaatatttaaatccctatatattctcttaatttgaatacaatattatatattgatatataacttggtacctatgtgaatataatttattaggttacttgggtggaacatgttgaagtggatgatagagctgttcacaacatctacaaaccgctagttaactcgggtattgcctttggagcaaagcgttgggtagctacattggatagacaatgtgaacgacttgcaagctcaatggccagtaacatccctgctggagatctctgtggtatatataataaatttataatattaaagacttcattattaattgctcgatcgatatatgatattattatttgggatgagattataatgtgttatggttaatttggcagtgataacaagccctgatggaaggaaaagtatgctgaagctagcggagagaatggtgatgagcttttgtgtgggcgttggtgcttcaactgctcatgcttggacgactctgtcggcaacgggttctgatgatgtaagggtcatgaccagaaagagcatggatgaccctggtaggcctcccggcattgtcctaagtgccgctacttcattctggcttcccgttccacccaagcgagttttcgattttctaagggacgagaactctcgaagtgaggtaattaacagaaataccgcttcatataaaaaactgctaaccactcagaacgaacataactgttaataaccaatggaattgacttgttattatctaatgcagtgggatattctctctaatggtggactagttcaagagatggctcatatagccaatgggcgtgatccgggcaattgtgtctccttactacgcgtaaatgtacgttagctaaagtaaattttttatattagttgtttattattattattaattaattgttaaatttatatatgcagagtgcaaattctagccagagcaacatgctgatacttcaagagagttgtacagactcaacggggtcttatgtgatttatgcaccagttgatatagttgcgatgaatgtggtattaagtggaggagaccctgattacgtggcactcttgccatctggctttgccatccttcctgatgggcctgctaataacaataataatattaataataataataataacagccataattctggtatcattaataataatggaccagctggatcaggaatcgttgaggttggttcgggtggctcattactcactgtggcttttcaaatcttagtagattcggttcccaccgcaaaactttcccttggttcagttgcaacagttaacaacttgattaagtgcactgttgaaaggatcagagctgctgtcacctctgaaaatgttcaatgatattgaggtaaaggcttcttatgatgtcctgagatgatggtgatcgagcatttaggtgagtgagtgagtgagtgactgagtgagttcatttatataattaccaaaattaaatctctaagctatatatacaatatttgttatttaattaatgtgtttttattttgcagtgactacatcagaattaatggaaagtatgaactaagttaattagtcttagtttgattaattattaggatcttaattattacgaggtataaaagaaggaagtcaagaacgcaccttagaaaatatatccttgttgtgttgatgatcgatgatgaggacaacaaagttggagaatggagagactattttgtgggggaaatgcaattaaggataatgggttcgggcattgacttcgaaatatcaaattaagtagactcatgacgtatgtacggccttttaattattgtttataataaattttaagtttcaataacttttgcttaattaattttaggccctttttggtttaattataattagttgaaaatgtactaatattatgtcatatgtgactcaggatccttattaatgtagatcacattatttagtatttcaattaattaattaatgtcttttatttcaaatatatattaatatttcacttaattattaattattcccgattcactatgtactatatactgcataattaagcacttctttaattataatattcttagacaatattaataaacaaatcatgttaaagctatacttgttaaattaatttatttggtgcaaattcattcaaacagccatccgtcacccgtgtatatatatattgttagctattttcatatataattacatcaatgcctttatgtttgatcaattaagttatgaagaagcacaaaattatttaggtacacatactcatgcatccaaattataggttgtttaaaaaatgttgataatataatgtattgcttaaaagagattcattgatgtatcctattt

SEQ ID NO: 220013 - DNA, 4021 bp, Cannabis indica
tctctaacaaacctatcttgggagaatattaaaaaaagaattaaatagaataatctactactccaataataaatttatttacaattttataattacactaatattatttttaatacattattaaataatatttcaaatataaatatttaatttttttcaaacaaaaaatttgtaatctttaaaaataaaatacattcaaaattttaaaaagaccaaaatcttaaataaaactagcaatacgtggctcggcacgtacattcacctagtatatatataatgcatacatatattactttgaaattaaaccgctagtcataaactacatttatcaagcttgtattttcatttgaacaatattacaaacacatagtgggtacttattaagaatattataaaagtacatataaattttttactaaccatagttttgtctcttttgtgtatatggtaatcataaacaccacacaatgatgaaaatcaagaaaaatgaaatcacaaagaaagtaccatataccatgtatgttacatgtatataacaatgtggaatgaaaatatattaagaaaatacaactcaatggctttattaaataaaggtaccactaaatgatagaagatcagaatgaagaagaatggagataacttataacacagtgctgaaaacacaaataaaagatgaacataaataaactaaataagcacaaaaaaaaaaattgtagagagcaagattctccgtacacttacataatctttaagcataaagtagtggggatcatcaaatttaaagaaaatgtgatatattaattgttattagttatggttttgttttgaagttacatctgagagttggaaccgagtaagaaacgtttaaacgtttctgctcaagatgctcctagcaccaaccgatttagcgctaagtgctctagagcaaaatactcgttttgagttttgtaactactcgaaacaaatctattttttccaaacaatatttataacttattctctacacatcactgagtagagatattctatccctaactcctataaattttatgacactcatgcaaatcaatatatggaatggtaaatccaagtagcatatacaaataaatagagaaatgctaaagggcaccactggtgcttagcaccctcctacgtgtcaatattgctattggtgcaattaagtatcgagtctcatatagtttaatataataatttttatagagtatcgctagccaattgcaagtggacacatttagaaggtgctaggcaccactggtgcccaatagcaatgctcaaataaatataaattgttcatgcatattcaaaatggttcatgtatctattaattaacatatgtccaaaaagaaaccattaattttttttttcaaaaaagaatgaataaataaataaactccttcaagtactacaggactattattttcataaatgtacatgaatagacgttagattaacaactctttcatcctcgttggtaacaaagttgatgaacatagaacccttcattaccatctttttagttattaaagagcccttattttgtggatcttcaaacatctctagttcatctttgtatatactaccatgtttagtaaagaatagatttttattttcccctgcataaagaatacataaaatagttattaacacatatttttttatatataggatgaataatgatatgtgcacacataaattattaccccaaagatgattgaagaaattctctgtgccatggacaatgacatgaccatcattgtaaatattccaatgattaatctcaactctattgattaaaacagttccatcttcacgcacttcatccacaataagcttttgcttaacactagctggaactagggttgaaccctgtgataggtgccctaattcaaaggcttccctatcaacctttgacattacaatttgataatcaaaactgttccattctttgaatcggattgcttcatctggcggaacaaagagagtaatagtgttgttaccataaatggtaaatctattttgacgatcgacgaagaacaagaattcgtcgcagtatgtttgaacagattggagattcctttcgagaatcgttgccatgaaatcgtagcctccgaattctctaagagcttttgtgatcttttcgacttgtactactgtaattgtagaattgtgtttgggtgatccattcgaatccaaacaacatgttaggcatgtagaatgaatagggccgtgatcataatcagttttccaaatagggggatatctcttactttgagagggaataattgttataagtattaggagaagaaaatattgtaaaattttggaacaagtcgccatggataatatgattagacttgtttgtttgttttgtagtgagagctaataaatataagtaaatttacaattgcgtatatgtatggcaaatatttcgaaaaaaatcaattagtttgaatttgatgtatcttttaaatacatatgtatgctgcgaggagttatatgaacgagaaaacggcccgaaacgccagtggtgccttaatttatgttttcatttatagtactctgattcagtggcaatgtaattttatttttaattaaatgagatgcaataaatatcatatgtcacttttaaaactgaagaccttctatttttcatatttatcaataaagtctactatgatttttaatagtgttgagtctttcataagtatcatcattaaaaattgtatttttgcacagtaagtattagtaaaaacagttctaaactttattaatgcaatctcagaagtttatatacacacctgtgtattacaagactcaaaatatcaagtaacagagttagttacaaaactaactgtatctgacaataaaactaactaactaacagttcaatataatcagctatatctaagactccctaagtgtatagatttgtgacactcatcttggacaacaatatataaaattgattggggaagagggcctttgtcataatatctacagtgttgtgttgagaaggaacgtaggagagtttgattcgatttttgttgacttgttcgcgaacgatgtggcagtcgatgtcaacatgcttggtacgttcatggaagacagcattctcagatatgtggatggcagcttgattgtcacaataaagtactgttggttgagtttgggagatgccaaagtcagataaaatgttgtggagccaaagtatttcacaggtagtgttggcaatggaccggtactcagcttctgcagaggatttcgagacagtggactgtttctttgatttccaagagataagtgattggcctaagaagatgcagaagcctgttatggaacgtctggtaacaatgcaagaaccccagtcagcatcagcatacgcttgaagttggaaaggtcgagctgcagagagagaaggagagttgttggagtgaaaaataagtcattggctaggggtgcctttgatgtattgaacaatgcgatgtgcagctttgagatgaggttgacgaggagcactaacaaactgactcagtcgattaacaacataagaaatgtctggccgagtgatggttaggaaaacgagttttccaatgaggctgcgataagaagtagcatcatttactaaagggccaacatctttgctaagggatgtatttgcatccataggtgtggacactgccttggatccaaggagacttgtttcagtgaggagttgaatggtgaatggtctttgggagacaaataccagcttttgatcgtgctatctcgaggcctaaaaaaatcttagagggccaagatcttttaatttgaacttggaatttagaaagattttaaaggcagcaacatcgaaatcatcggtactagcaatgactatgtcatcaacatatacaagtaaagcaagaaagcttgttgaagacttttttatgaatagagagtggtcaaaggcagattgtttgaagccatggttaagtaaagttgtgcttagtttagcaaaccattg

SEQ ID NO: 220014 - DNA, 5804 bp, Cannabis indica
aaggctagaaacctaaagctggatccaccaaagatgtcttctagcgggtaacccagagaactgaagtcggattgacctacgatcttgtaaaaagcgagcagatgtaaattaagagggaatgcttgtacgaaacttctggaacaaaatgtgaaacggcgtccagcaaaaactaggatcgcgaaaggcgacccacatggcatatttttgtcacgatctcgagaatttaggccgtttgtttcatgtgtcagaccacagagaggctcatggcaaaaaagaaaccatctttttattcaacacccactacactgatattgtccttctcaaaaccaacaacacacacgcacaaatgccactgtcaatagtgtctcccactaaattttttaaagaatatcattaagagtaataatttttatttattttattttattttttaatattaaatatataatgcaaaaattttttttaaaaaaaaaaaatatttcttataacataactatcatatattatagtttaactcaaaaagaaaaaaaaaaattaatttaagtattccgattatatttcctgacaatgtaaacaagttaaattacactatcactcaattttcaaataattttagtaaacaaaatatatacaaatattaattctaattatttttatttattctgtggtattttctctattaatttatgaatatgtgtaataaatataagagtggtcatttgtatataaatggtgtatgtaatttaaatctgtgacaatcatgatcaaagggactatataaatagatcatagccataaattatgataaaattaaatattatatttggatcaattaaagggaccgatcattaataaaagagaaactaagaaaaataatgtatgagcattgtcaagatcgatctttaatggcaagatccactcaactgtatttctgttcagctaaagatcccaattttataataattacttggtacagttggagatgcgcttaaattatattaatttcccttcaaaaaaaaaaaataatagtaattaagacactcataaattgttgttgtttttgggtaagacactcataaatttagtacaatgtatttttaatgggtattatacataaatagtattattaagaaaattaataaatttctatatttacttttgttatctatattaaccttgaaaattaacaggcctatgttttgagattaatcaagtcatgaagtgcttgcatgaaggcaagcatttcgtgaagcttgtttacttgcaagtgttaatctcaaaaattagcccttttaactcaggatttgtccaggctaattcgaggggatgatgaagctcactccatgaattgtccatagtgggatcgtttgacaacatgcccaatcgttgaggccactcgtaggcctcatgcatctatctcgcaggcaacatgccactcgcagacatcatgcctctcgcaagcagcatgcccctcgtagagagcaggccgtttcgcaagcagcaggcagcatgccttttgcatggggtaggcaactcccaagcaatatgcctcttgtaggcagtaggctgctcacaaaaagcatgtctctctcaggcaacatgccttttacacactttgagcctcgagcaggtctcagtctctcgatgtatgcataacttatgagagttacataatttattttagagtgaaattgaaaattcatttaatagtagaaatgtaggggtgagatacaaatttaatcaaaatgagttgaaatattattgatgaagttatttgattttgaattgaaatttctaaatcaattttggctatgtgcatatataaaaaattttgacatatttggtgtcaaaatttgttgaaaataatttcttggaagaaattaaaagggctatagagacaaattggtcttctatgtttttaataaagatacaaaaggatatcttgataatgaaatgtgaaagtgcggggtgatactgcaatgtgagaattttagataagtttggtgtctaaaactaaaaatatgtacatttgagacatgtttggtgtcttaaaataaagtgtaacttgtacatatttagtgtctaaattagtttaatgtgatatttaagcatgtttggtgtctaataattggtgtataatttatatatgtttgatgtctaaattagtgtttaattttaatatgattggtattaaaattagtgagaaaattgagttagtgtgaaaattaatcttttatgatttattttcaaagcttaagatcttatgaagaaaaattgtcacaacaaaagtaaacactacattttgggatgtacaattcacacgaaatcaatagtgagaggttataacaaattgcttaatcttcatacaaaattaaaagtatgaattttgaaggatggaaaattgtttagtgctcacacacaacacaaaattccaacaaaagagacgaataactttttaatggaaatctggaagtgaggaaccgaaattctcggaagtcgtgagtttatttacatgtactggttggacataccacgtcagatcgcttcttcagcaagtataaagctaactttagttttgtccttccgcatgggattcgaatctaactggtaaaagtaaaggatttcattaggagacgagactattactaactggtccttgcaaaagacgtaccattctgccaatagtttgtacacctgcagaatgagttgaaatagagccacacccaccttcgcacagaaatgagcaaagtaacttcgaattgaaaggtgtgctctgacttcgacatgattccagctctaaataccgaaactatctatacaagagcatggagactccccctacaacgaaagcctgttccaaaaaaaatccaagaattgtggaacttattagtataataatccatctccaagagagatggattggttactgttaccggttctgaaactctttcttcccaaaccatgcctccttcgtggtcaaccatcgctttctccgaagattgggttatgttggccatatcagatgttggaacaaaattagaagccaagcagctagtatcccacactaacaaatacaacaacagcacgggagagtcctctcttataatttcttggagagattccaaccgaaacctacacccgggagtaatgtcctcaggaaaacattacacttggatgattagattaggaacactagagaaatggagaaaaggatctttaagtaattcatctggcaccatacggattccgaacgaaagaatttagcacaacaattcacactctgttgagttaaaaaaattgacaataattttaagcagaaaaaggcactattcatataacctaaattattctacaacgaagaaataataatcaaatgtttctatcttcatcaatgtgaagttcctttaacgagatttttccataaatgctaccacagataaaacaatacatgcaaactataaaggggctaaaaattctaagcaatatgattgatccataatcaaccctacataagacctaaccacaccattatggatcaaaaatgtgcagagtaaaatacttacgtatggaaggtgagggtgttggagctaatctttggttgtcatgcttcaacctctctggacagaagtacgtacttccatatggataatgaaggtgtaatatcaggtatacaatcaatacgcttaagcctcccctataaagctttaagtcactctctaaactcgttgatgtcagcctgaaagttcgacgatgaagtgggctttaaagaatctattttgacgactaggggtgcgttgggcaataatcttgaacgtaatcgaaggagatggttatagatctcgtcagcttttgaacattcacagaaaaattagggctttgggtaaagttttatctattggaaaagttggagctcaaaaattcaaaatggtaaaaagtggtaactgtttaacctcaattctatttatacataggggattcgtgtgcttcagattcaacgatctagaccatattccagtaaaaacacaaacacgatccaacaatcagggcatgcgaaggggacgtttcatttcatgccttatgtggaatcgaggcaaaataatgatgatatttacctcgagaaacttgctagtgtgatcagacgttgtcatctcgcaaacccaaacatgtggcatttgctttccaagacgtgtagaccacacggaccaagaagctaatgccacatgtattccacatggaaaaaacacaggtttatcagtattcacgacctgatacctcgaaattctagaagcctaaaagtatacatggttccatgtaccacaacgaatccgaaagtgaagctgtacacctccacaactctcgagcctaaaggcttgggtgtaaatgttatccatattttcgaaaagatgacatgtgtacttctaagatttgtcccacttcaagaaggcccaatctcgagccaaaatgagtgggtcagcccactaagggaatcagtctatggctttgtggatcagtaatatattaaattcatccattataaggacggaccgtctaagtctaaggagggttttcggccagaagaaggcctaaaattacatatctgaataccctcacgaggtattcccataaggattatctaaaagacatccagaaacaaaggcttaggtggagatcctccgatacaggaacccactaaattatggatttaccttgcaccatatcctacgacattcattgtatgaatctgacagcgcgcaacaattgtcaaaattaaatggaccccatgattgtggatgatgtaatcttataaattgggtctttcctaatttatccaaagttaatattaaatgtatttaccctattagtgggtctagcttcgtaagaaaatcctaacagtctaaaccctagcctataaataggagattatatattcattcaaagggttagaaaatcgtgattcaaacactaatattgaaattaggtttcttataagctcaagtaagaacattatccttgtgtaatacatcaaagcttttcagctaattatattgacttgtggactaagactcactaatgtcccaatcatgtaaaaaatcttagttttcttcttctttgttttgttgatttcttaagctctatttattttataattaatttctcaaaactcggtaaaagctgatatgcaatgttaagaatactaaatgtatgttgttaaccctttgggtatttgagattttacctgtttcatagtaaaattgttatcctttaaaaaaataatgaaaaaaaaaagaagtatctcatttgtttttgaaaattttcaaataatttagagtgttgaaaacaaaattcaaataattaattacgtacacacatgtttagttgattctttgaatcctatttttttctgataatctttgaatcctaaataatacataagaaaaatagttattagctagcctctaatagtacccaacactatcatgagattagatgaaattttattagcaattaacaattttgtataatagttattaaaatacatgcacgaaatctttcctttttgtcatcaattatatccaaaaaggacttgtaaactttattatgaccgtctcgttttggttgttcacagatttcattatcaagaaaggtatccacaatttctcctgacacgttactaattctcctggcgtagacctatttgttgttaataaatcgataagagtattatcactactacaaaacaagcctttagagtcgcttttttcagcataataattaataaccgacgccatagggttgaaaatttt

SEQ ID NO: 220015 - DNA, 1491 bp, Cannabis indica
ttttttttttttgttatgtaaatatatataatatatgtaattattaattagtgttagtattattattattacgaggagccgagaatgaatagagataatcattaatttgcatctgtgattgtttggccagatgtgttatgttacttttgagtagaaaacaattggttcttttactgaaaataaatgtgttatggaaagaaaaatctcattttattatgtttctttacaggaatgtaatcatttattatagagtttcattttcttaaattttttataataagaaatttaaaaaccattagagctaatgcttttaatcatcttggcaatgttgagctcttttgtatttccagatagattgtaagtaggcatcaatatatcccaactttgttttatcatttgaaatatctcaagaacaacatgaactttgtgttatcatttttttggcatatattgttgacttttcttgattttcattttgttggattgcaaatttatccagacattcaacaatcaatgctatatttaattttgagttttctaaaactcataaacatatattcatagtatatataattttacagagaatttgtaacttgtatgtattattttgtttaattttgaattttaagttgagaaagctactcctccaatcaaagagacaactctacaccagaataaaaaaaattgtaaatttggtatatttttgttgaaaattcttgattatggttgagacttaaaacagtagataaagtgaacattaaaaaaagagagaatgtaatggctgagaagaaaaagaagacaaagaggaagcacagaaagttgaggatattgattctaatagttggggatgcggttaactagagagaatgaaaaggaaatgtgcaacctaaacaaggagtaaaaaaataataataagaagaaaaagaatgtgaataaaactcattaagagatttttaattaatgatacattttttaaagtaattacttcaatgtatagtcaagcagaacactacttcactatacattgttttgatattttcaatttagctttagcttttaagataagaatgttttcaatttaagtttttatttttcttttattttatggtgcagatgattgaagatgagaaactcttattactcttactagaataaattctttatacaatatacgctgtttatggtcagagtttgtaaaaacttttatattgaaatttttttgtagtttttgggctatgctggctaacaactttgatatgtttgatgtgagcaattgaatattcaatatggtagtaaggcaatcatgtagctaggttaacaaacttaggcattcttaacagtaaatttatgagtttttgtcttcttttttccttcttgaatttctttttctttctaattgagtttaaaatgggtattaggcaggtgaaatttattaatgcagggaatagtactctatttttttgttgactatattgttttttatattgaatt

SEQ ID NO: 220016 - DNA, 2732 bp, Cannabis indica
ttattataagttttattttgacagaaaatcagtttaaggtcctatttgtacaactttagaaaatacaagatctattttatcattaaacaaaacacaggattcaattggtgacttttataaaatacatgatccaaaatagtatttacccttattttttttaaataattttattattttcttttatgtttttgtggagaataatttttttttttttgtaaaatctattaataggactaattaataaattgtatgcctaaaaatattgaagcaatcaaaacatttgtagttatattattagttttcactaaacacccattttggggatgttatccattagttattagttatttatttttagtttataattactttgattatattttgtaaaagatgatattcatatagtatgtcaaatatctctatttttcaggactaattaaattatacataagaaccataatttgacatgtgtaatgtctaattatgttttattttttagctatgaaatttatagtttttatgaattttgaatctatttttatacaattaattttaatttttttcctcttatttattatggtgtaattggaattttcaattatcaaataaaatgcaacccttaatgatgagtggaagtgaattatatgtatttagtacttatttgctcatgcattttctgtattggtattactacgtatgaatgcagattggccggatgactataaatgaatttaagtgggagaatgtcattatcaagatttggaggatgtgtttgccactgcaatcaccaatgtctgtttttcaataattaatatttggaatatataatgtgtaatattcgaattgtgttgttgtgttttaattcttaaatatttatacactctttggagcacttaaactacacacactttactataaaaggcacttggttttggaacactcagttattggatgcacaacttgagaacccaaggtccctatttatacttctcaaaagaaatcaactttaatattctagacaattctagctaattgtgttactaaaatattcataaggctagcttccacaaaactcaaccatctctaattacttttattgtaatggatttggcctaaaatgatagatttatttagttaatctctagaaaattctagagagattgtgatgattcttcaatatatataggcatcattgacactaaccgtcattaacaaactctaagatgaatacgcctagctagcagattcaactaactgatatgacacctaaactaagcctagagtacaagtgcgtaagacattgcttacatggacatacaggtggacacattactgaccacaatttctaacaattctccacccttgattagcaatgtgtaggtaccaattgagttttaagtgttggaaacattaaggagtttgagacagtgatcaaaatttgttatcagcagtgattttgttaacatatttgctgcattctcctttgttgatatcttgagtagtttggacagaacatcttgaatgactagttgaccgcttgtttaaaaatatagcttaattattagttcgtcttcaatgtgaaaagaatatgatactattttagctacatgcatcaaacaaatgcaaaatgagaattatttatatcatcatacaattgtattcaattcagttgagttactgagagcaagatacagtgttatatgtcttccattccattccattgcagaatggtgagaaatctggtttgcagccactaactcttcagttgaatcaactaaactcaacccaatttggcatttacaagattaagtttgggatatttacacccctaaattttataaacacacccctttttgttaaaatatttcattacatgtttatcctaatataaaaggactaaactatcccttttgaaattttagttctccatctaaatttctgtttaaactgttttttatctcatcaaagtataaaaagcacctttctactctaaatgcgaagatcaataaagggttctttataatcattttgtctattaattaacaactcacttctttgaaataactagttaagacaacaatacttagaacttttctgttttgaaagcatttttacagtaaacttttaattaatcacataaattatacatcttattatggtggagagtttatttgttaaagataatggttgtatgaaaaaaaaactaacttggatgtattttctttcaaacaagacctattttgggaaataaatggggtgtaattataaaatgtaatattttaaataataaaatggggcaaactcagttttggggtgcatttatatattttgagggggtgtaaatataatttcccttaaagttttctcatctttgagcttgcagatactgttagaaccacatgagattcaaccaattaaagatgggatccttcttggaagtggcttattatggtgggcctaccaataatgctcaatgcttattatggtgggccaaccaataatttcccttaaagttttctcatctttgagcttgcagatactttacacactaaggataagaaaaaaaatcagagaaacaaacaaaactggttatcaaaaatcaaggaaaacagcagccattattgaataccaacaacagcacttgaaatagaaatgcttaaatgagtgatctgtttcgttgttagatcatcatacaattcagttcaatttaatttagttactgagcaaaatca

SEQ ID NO: 220017 - DNA, 1701 bp, Cannabis indica
attattgtgacagggagcaagtcgagggagttagagagttttatctcacggctaaacaagactttctcattgaaagatctaggaggactgcattatttcttgggcattgaagtctttcgagatgatacgggcctatacttgtcacagggaaagtatatatctgaacttctacaaagggtgaacatggttaacttgaagccgagtccaacacctatgacagcaggaaagccaatgtctatacacgatggtgaaccaatggttgacccttcacactacagaagtgtcataggtgcattacaatacttgagccacaccagaccggacatttcatttgcggttaataagcttagtcaattcttgaaatgtcctaccaacactcattggaatgccacgaagcgtgtgctacggtatctcaaaggaacaatgcaacatggaatccacataacaccaagtgacagactcactctcacgggtttctctgatgcggattgggcatgctgccctgacgatcgaagatccattgctggctactgtgtattccttggagattcactgatttcttggtcttccaagaagcaaacagttgttgctcgctctagtactgagtcggaatatagagcattagctcaattggcagctgaactcacatggcttcaagaattactcaaggaaatcaagttcaaactccctgcagctcccatattggtgtgacaacatgagtgcaagcgcactagctgccaacccagtttatcatgccagaactaaacacatcgaacttgatgtgcactttatcagagacaaggttctacagaggcaattggaaatcaggtacataccatcacacgaccaagtcgcagactgcttaacaaaaggactttcacactcaagattccagttccttgtcgacaagctcggagtgactacatcaccctctcgcttgaggggtggtgttacaggataaaactatgcagggtattttcgtcatactgtcatgaggtgtcatccaagtttgttggaatatttccaatccctaggcaatcattgcagcagcctttatttctgttacaatagaatctttttgattctctatcattttgtaatgattgttttctcttttccacgtgtaaggcagggatttcatctctaccacctctgtaaactctgggattaattataaatacaattgccctgcatcagcctctttgagctgatcattttctctactgcatttcttagaaaattaactcatagatgtaggttcattcttatatgaagaaacataactaaaacttaattatcatcattattatttaaaggatcgatatatatatatatatatgtgtataatgtatatcacccttaattataagatgatgacttttcatgtgttgtgttaaagttaaacatgattttgacaccaaatgcttttcattgaataattagctagccattaacttaattagtaattaccatttgttacctttgtactttttgtaggagcttcaatctacaattgaaaaagagaaaagaaggccacaattaaaatgattgcagacaaatattttattcattatatggagctttacatatatcaacctactccaaaacatgctgtaaatctcagcaatggtctatttgttagattttttttttttggcttacattaagttttattagttttattaaaacttgggttgattg

SEQ ID NO: 220018 - DNA, 2204 bp, Cannabis indica
aaataatttccaacagtttctacggggaatctcgcaatggacatctcctattaaaccactagcaaagatttcactgaaggcctcatcggacagattagaagcaggagagaccaactcactctaggaggtctcgcatccagtatctttgactcaggagattgctctagaacatggtctagtcctagctctgaaagagcacaagtctttgtgcgtaaagaagaagcgaggactaaaatgaagctattgaaaactagctcgggcagcagacccaacacaagtatggtaatagggagcactatcacaactaaagtagaaatcctggtggttaaaacacaaaccaaaaggatgactcgaaagaatcatccaagaatgaaaagaaatagaaaaaagatgacaagtatgtatcgatttaatcggtatatactaagttcaatgaaacttttaagaatatattcctcgctaatgaaaatagggtcgcattttgcaaacccgagccaatgaggcatgcaaggcataagcaagattcaacaaaatactgttgattccacaaagatatagggcataccaccgaggaatgctgagaactgaaagatgagatagagagtttgatcttgcggggatactttagtcaatatatgagaaatcaagaaaataagcctaaccagcctaacaaccataataacccgaacaattagagaacgcaacctccccccattgagggtgaggatatcttggtaattttgagagggccacacctcgctggaaatagtaataatgcccaaaagtggtatataaatatcagcgtttgttctagaaccattgaagaaagcaaagtcgaatgaaccactaattaccttctctgaggaagatacaaaacatgtatggtactcacatgttgatcccctcgtgataaaagggtgaaaagggttttggtagacaatgggagttcactcaatatcctctacaaagaaacattgaaaaagatgggattagacaatgggagttcactcaatatcctctacaaagaaacattgaaaaagatgggattagaggatgcaaagttgagaccattcatggtgagcctatatggatttactgacaattgtgtcaccaacctaagcatcattgagcttccattgactatgggagagccacctttatcaacgacacaaatgcaagaatttttggttgttgatatattttttgtatataatgcattgatgggtcgtcaacactaatgggggtagtaagttcatttaaacacttgtccctaaagtttccaacacagttaaaagtgggagtagtcagaggtgaccagttattggctcgagaatgctatcagatataacttcaaaataggagagccaaccttcaactaatggtgatcctaactaaggaaaacgagagggaagaagaggacttggatccaagaatccaagatgaaggtagccagctcaaacccattgaagaattagaagaagttattttagatcaaataatcccaaaaatgtgtttacattgggaaaaatttggaggaagaactaaaatagaaattaattgtttttctaaaggtaaaccaggatcagtttgcctggagccactcagataattcaaatataatttgccatcatctgaacgtcaaccccaattatctagcaaaatgacaaaaacaacgaccactagatttcgagagacaaggcacactcaaagagaagttgacaagttgttaactaatgactttatacaagaggctttttcccctctggatctcaaatctagttcttgtaccaaaaccaacaacacttggagaacttgtagagattttttagatttgaacaaggcatgtcccaaagattcttctccactccctggatcgaccagttagtggacgcaacagcaggacacgagttgatgacttttatggatgcatactctggatataaccagattaaaatgcatgtccctgaacaagagcatacgagctttgtaacaaatatgggactctactgttataaagtcatgatgtttgggtttaaaaatgttggagcaacgtaccaacgattggtaaatggtatgttcgagaaccagattagatggaatatgtaagtctacgttgacgatatgctggtgaaatcaatgaaaagcaaggatcacacaagggacctcaaagaatgttttgacatactcaggaagtatgacatgaa

SEQ ID NO: 220019 - DNA, 2514 bp, Cannabis indica
ttttttttattttttttattttgcctattataaaggtcactttgatacatttgaagtcactgtcatatcaaattattattaaatttgttgttttagtcaaaacccactttgccaatgaatagtctagttatttagacatgaacttcatccaattaattcttatcataaaaaaaaaaaaattatgccgtcgaaagtgatgaatttttttttcttattggattgcttttaccctcttaatcttttcttttaatttgtatttaaatcatcattttaatttagtaagaaacaattttgaaaatttttgaggttaaaaaaaataaacaaatctcaattttttttttttttgttatactgtggtaagagattacacctataaatagtcaaactttcatttcttcacatttttcacataaccttttttttatcattgtacattattatgttttttttaataaaaatgtatcgaatgtaaatttctaaaaaaattaatataactgactacatataaattaactaataatgcaaagaactttgtacattaaattttcggctagcatgtacacattcttttgattctattattaattttatgcaagaaaaattagatcctttcatgtataaatgcatgttaattttgttttaattttcggaagagaagtatatatatccatctaataaattcatttgcatatgttttgtctatatctattatttatactacatgtgtgatgccagcgtctcattttaatatcaccaacataaacttttctcctttcgttaaatcccctaccaaattagaagattagtataccttataagcgacttaattgaattttacaatgggaaacataaatccaacaactgatctatctctacaagttggaaatttatcatctttgttgttattttttattttctagttccccaagtgatgaataaagaatatcaaatattactgcaaacaagctgtcagattttggggtatttattttttttttttttatataaatgtatatacataatttcgggtgacttatgaagaataaatgtacatgttatgatatggcagccaaagcactaaacgatgcacgattagaagcaagcattaaattgtatggagagaaaactatgaagaataaatggccaagcccttacgcagtggcttgtggtgtgttgcttatgctgtcgtttctcaagtacgtgtatcgtccacttgaatggttagctctcggggctgtcgccattggaattctccctatttgtctcaaagctgttatttccattcggaatcttaggctcgatatcaatattcttgctattcttgcaggtatctatacatgttcatatatataattaagatcatcataagataactaaagtttaaagtattaaatatctgactttgttaactctatctatactttacagtgattgggacagttgctatgagagattatatagaagctgcaaccattgtttttctctttactgttgctgagtggcttgagtcaagggcaagccacaaggttagctcatgacaattcttttacttattttttatgtgtgtaatttatataattagaagaatcctttgggaaatgtctcaagacatgggcttaaggtgtcatgtttctaattgaccaagtttgactgaaatgaaagattgtttctttttagattcaatgtgaacgggaaacaacaaaatattttgtccaagttataattgtgtgttagtttaaggattcatgaaaaaatatttttgctgaaaacttagctcaaacagtgctactgtacttgcctttgcttacgaattttatgggatatatctcaaagtttattaaattaataagacaccctctacaacgttcctaatgtattaattcttcacattttataatgattcaatgtttgtccagagttgttttgttttgttctctatccttttattaacaagacataatattttcaggcaaatgcagcgatgtcatcgttgatgagcatggtaccacaaaaagcagtgatagctgaaacaggagaagttgtggaagctgacgaggtgaagctgaataccattttggcagtcaaagctggagaagttatccccattgatggaatcgttgtagaaggtaactgcgaagttgatgagaaaacactcactggggaatcattccctgtttccaaacaaaaggattccactctttgggcaggcaccattaatcttaacggtatttcattacagaaccccctaattaactttcaacagtcttttttttttcaataaattgcgttgtttcctttacattttgtacttatgtactactatttttgcttaataggctacgttacagtaaagaccacagccttagctgaagactgtgctgttgcaaaaatggcaaaacttgttgaagaggctcaaaacagcaagtcaaaaactcagagatttatagacaaatgtgccaagttttacacaccaggtttgtcaacttctttgtttttgtttatgttttttttttt

SEQ ID NO: 220020 - DNA, 4628 bp, Cannabis indica
ttccattgacccaatgctcatacgagaaattaatgcccctttagacaatggagactcttcaactgtttctggagatacgttgctagtcagatatgtgcgatatagatatatatgtagtcgtatgttgtgattggtcagatttctcgatatggtgggtgtgtctcagtaaccccatggtcatgctcaaagatccatgcccccttgggtcactgggaaacctccagccatttttgagacactctgttagtcgcacacatgctacttacaccttgggagggttggctcggttctccaaatggtgggtctgtctcaataccttaatacccatgtggcgacatggtcattaggttattgggagacacccaaccatttcttgagaggccaagctaaccttctaaggttttgtttttttgtgcgggtgaggtcacttacattgttctcgcactttcacgacactgaaaatatcttttatctttcaaatgagcaacctgtcggacagccaaatgctcgactctagaggtgaggctttcgctgacaaataggataaaagcaatagctttctaccaacttcaatttctgaagaagaagtccctgtcgctaaagctgtgactttgggtcctttttcttctaatgatatcgaaaggatggtttgagaagtcgctgactttgggacaatcgagattcgcgatagcgaatatacggtgtccgcctgagaacatcttatccactccaggcatacccctaacgtcgaagtcaaggagattggggaagattgggagattcctaaccgcgaatcaggggaataggaggatgtcaagggaagcgggacagattcagtgggcaatacccagctaaacgaacctttctcctgtgaggatctagtttcgcgagttaccaaatcctacctcaatacgttcacgaggttgaagctgctgcgacttgcaaccatgtgtccttgctctcctcagaggctgcatcttccctttaccaatcttgtgataatccccacagaagatgtggttgtctcaatacccattctttgatgtagggtgtcgataccttttcatccatttattaccgctatcctcaggcgatacgacatttctccctttcaactaaccccaaacaactatagcttagtcttagggttttatgcgatgtatatggagtatgcccgaagggagccctcgatggaagatttcagttatttttatgacataaagcgtgtgggccatgacaatggcttctactatttcagcaagtgggctacttctgaaattaatggggtagaaggcacgatttctaatgtgggggattggaaatctaagtggttttatgaattcaaagtaccaggggttagaacagatttcaatagtcgacctaatatgtcacacatattaacacttagtttatttttgtgttaccctaggaagttgcttaacattggcttttcattgatcgtagatagattgactcaatctgttgtagatcccactcatcaagaggtcgctgaagtactcggtagcctacctgttcaagatcgcgattggcgattgttgtgcacaactgcaaagcagcaagaacataagctaatccccgaggacgccaagcttcatcgggaaccagtgtacaaggagccgtctgagaagcaaaaggagaaaatagacaagcatctatccaagcaaacttctcaaccaacatcaggtaattcatcgcatgtattcgtagtgtaacataatacagatttatacttatcttagcattttttttatatatcctcgcagaaatgactttcctaaagccagctcaggttctcaaccgcaaacccaaaactggaactgcgatgacatctcccatcatcccacagaagaggaagagtgaagtcgtggtggcttctgcagctaatttctctaagaagctggtcagacaaggggaagaagctcatgattgatcccaccgttagagtccgcgatgtcctagctcttcaagataagttcgtgggcaaggaattcatgttgaaggttgaaggaactcgctctgaggaattaatgccacgttccgcggaaatggcttcgcattcatcgccatgttctcgagggcatttgtcgcgggatccaaggaagttgatcttctgaaaaagcaaattactcagcttcaggagagcaacgggaagctgaagcaggacgcgaactccaaggataaagacctcgagaacctccaaaagtccaaagcataggcggagcttcaggccaagctctctcagtcaaaggtcaaggaattgactcgcggcttggagactgagaaggaaaatgggaagaaacagtatgaccaagctgtttctgactatatctacacgactttagccaaggtgccagacttcaacttctccgttcttggagcgaaagtggctgaaatggctgaagcttttcgtgctatgtcgccaacccagactcaggggtgcggaggaaatcgttttcgtgaggaggcagagactgcagatacggaggaagtcgctgacagagctgctagcaaggtcgcagatgattctacttctccaactgcttaatttatctaagtttttatttcccctattatcgaacttttttaacggtacacgagtacttgcgctttgtacttggacaaatttgattttcctttctttttactttgaacaatttatatcccttcgaggatatttttctatctatttactttaagtggtattttggtactcgcatgttttacaatattattatagcttggtgtaataacttttaaaaactgttaagatttgaaaaattttgaactgtcgagaattgttgaattttttataacaagaaatcaatagtacaaaggggttcaatggtaggctatacaccctatacatagaacatttataaaaataattttgctaagttaattacattgcgagtactattgataataatacttgagactttcgccattcaaagccttttgaattgcagaccattgagttctacaacttgataggtcgcgtggccaattttgtcagcgataagatatggtccttcccatttatcaccaaaaactccatgcgctgggttttttgtgtttgagcatgacttttcgcagaaccaaatctcctactcgtagagttcgctctttaacctttgaattgaaatagcgagcagtttgctgctgatgggccgcattcttcaaatgagcctgattgcgcttttcctctaaaagatccagttgaagcaattgattttctatattttcactaaggttgaatacatctcttcgcagggaccctgccccaacctcgactggtaccatggctttgcatttgcaagagagcgagaaaggggtacatctcttcgcagggaccctgccccaacctcgacttgttgaagttcctctgaccatacacatttgcgctcttccaggttacccttgatggtatgcttgattattttatttactgcctctgtctgaccatccctctgtggatatgcaactgttgaaaatgctttcttaatacctaactcatcgcacaattggcgcatctccttgcagtccaatttttttccattatctgaaaataatttgtaaggtatgccgaatctgcagatgatggcactgtagacaaactttcatagtttagcagctctgatagtcgcaaggggtttggcttcgacccatttggtgaagtaatcgatagcgactacgccgtattttactcctcctttcccttttggcaattctccaatcaggtctatgccacagactgcgaaaggccagggacttgtgatggaatttagctgacttggtggttggttgacatatgctatccgctcacatttatatcatttcttagcaaagttagatgcatctactcgcaattttggccactagtatccttgccgcattatttttaaagcaagggaattacccctggtatggttacaacagatgccaccatgcactttcgcggagtatgcattcacactcagtcccatctatacatttgagcaatggttggtgaagcttctgcgatagagcttatcgtcataaatgacatatcgagcaactcgatatcttagttttctagcctctatcttatcttcaggaaggattcctgttttcaagtaatttattatcgaggtcatgtaggtaacctctttgacggtatctaccttcattagcttgtttcgactgattattaggtgagttaacacatcaacagggattacatcgagtaattctacttctcttgtcgaggccaatcgggccaaagcatttgcatgagagttgtgagtacgaggtgttctagagacaattattttcttaactttttgtagtaactcacaagtgagggcaaggtatttagccaaacgacttcctttggccaggtattctccgtctacctgataaacaatgatatgggaattgcaaaaggcttgtaaatacttgatttgcatctcaagagcgagtttcaaccttgtgattaaagcctcatactcgacttcattgttatatgcgggaaattcaaatctcaaggcaacatgtaccttgaagttactgggtttatgagtattataccacccccagcgccttcattgttggatgctccatcaacatac

SEQ ID NO: 220021 - DNA, 3160 bp, Cannabis indica
atatatatgagtttaatgttttgtgcatatgttatcagactccagagataaagaaagaaaagaagtactggggcgagagatgcttagatactgctcgggtttgccattagccatcatcgtgctaagcgggcttctatctaagaaacacacagttaatgagtgggaggagatgacaggaaatatagtgacatacataactaaaggcagagagcatgactcagaatatcaaggtgtttcatgggttttaggtttgagttaccaatttatttgaagccttgttttctatacttgtctctgtaccctgaagactcaaaagatacgagtaaatgaaagacttctgaggagaataacagagaaatatattactttatttattattattttcaatgttattagtttatgatatttctaatggaaaaaaaaattccatataaaaaaagtgtggtgcttaaatgacagtaatcaaaatggataagtgtttaacgaggttgaatcacatgttttggatagaacttgaatctaatcccctgggtagaactgtggtttttctttattgataaatgacaaagatgaagattacaaagctaagatcaagcacactaactcctccaatggtgatacacaccaattacaatacaatcaatcaaccacatgaccacattgcctacaccgaggcttatcacctttgttgacccggttctgatgctacttgttgggacgtcggacaccatccatctccacttttggacggttttgttcttggacaccctccaatggtgatacacaccatttacaatacaatcaatcagcaatgttggatggacaccatccatctccacttttggaacacagtaccacattgcctacacttaagctcatcatctttgttgacccagctctgatgctacttgttgggacatcggacaccatccatcttcacttttggtatgatactatccgctttgggactaaacccttacggttttgttcttgggcaccttcccgaaaagcctcatactaatagagatagtgttcatccttatatactcaagatccttcccatttctagccaatgtagaatttttggttgcacacccaacaatcacttatttggtgaaataagacacactataataataataataataatcataataaaactattacataaaacagaaacaaaagctgcaaaatgcaaattgtttattagaatttttgattaataaaataatagcccatttgcattttgcattagaccctatatagcaaaaggaccaccatccaaccattttaaaataatcattgaaaactggaaaagatgacaacttgcattgaagaagacaaaagattcaaattgaaaaagaaaaaagatatcttgcatagatatattcaaatctacatgtgcaactaaggaaatcgagattataaaattttgttgtttaatgatagctttggttatcaattgttgttggacaaagttgtcattgaaagcttgaaacacagttaagtacagttgatatactgaagaaaaagaagaagataatggcagtggaagaagctgttgtttcgtttgtgattgaaaggcttggagacttgctaattaatgaagccaagttcttgtatggtgtcaaaagccaagttgagaatgcaaagatcaaactcgaatgtatgagggctttctcaaaagatgcagatgcttctgtaagaaatggtgatgagagagttcgccttttggttgtccaagtaagagaaaactcttatgccttggaggatgttattgaaacttacatcttcaaagtggctttgaagaagaacaaaggtgtgataagtgtacttaaaagatctgtttgcatcttcaaaaaaggagttgatgtccatagagttggagctaagatagaggagatctcatcaaacattgatacatggacttcagagttacaaaaatatggagtaacgaaatcaatggacaacgctgcagatcaaacttgttcgagttatgttcaagaacaaagagagttgaggcgaacttattctcatttcggggagactgatgttgttggactcaccaaagacatagaagaattggtacaacatctgactgtaaaagagattccttataagcatagagtgatttctatatgtgggatgggcggtttggggaaaactactcttgcaagaaaagtttataatcatcctcgagtcaggaccactttgattgttttgcttgggccgcgatttctcaacaatgtgtagtgagagatgtatgggaagaaattttgattagtttgagttctcctactgaggagaaattgaaagaaatcaaaagcatgagcgatagtaaaattgccaaggagctttacaatgttcagaaacagagaaaatgtttggtgctccttgatgacatttggacaactttaacatgggatcgtttaaaagttgcattccctcctcaagacgaaacagatagtaagattttactcactactcgagttaaaaatgttgctttgcgtgtggatcaaaatggtttgatccatgtacctcggtgtctcaatgatgatgaaagttggaagctatttcagaagaaatgctcatgcattggaaaggatccaacaagtaagatatacacttcactctcattttattttatattttttgatttgataatgttttctagtcttacaatatcaatttttgtgtgtatgtgatcagcctctagagatattgaaaaaatggaagtactaggacgagagatgcttaggaattgttctggtttgccattagccattactgtgcttagtggccttctatcaaagaaaccaacactaaatgagtgggaggagatgaaaggaaatgtagtgagatacataagtaatggcaaagagaatagtgactctgaatatgatggtgtttcatgggtgttaagtttgagttacaatgacttgccatattacttaaagccttgttttctgtacttggctcgttatcctgaagacgccacgatacaagtaaaagagttatgtcttatgctcatagcagaaggtttcgtatcgccaagaagacgctcaacagaaactattgaagatgtggcatatgattacttaagccagttggtggaaaggagcatggttcaagtagataattggagtttgagaggaagaat

SEQ ID NO: 220022 - DNA, 1557 bp, Cannabis indica
aaacagtaaataaaaagaattctaaaatagagcacaatgttaaaattacctccaattagttaagtctaactggaaggataccaaaagcttgctgggaagagctgttagcaatcaaagctaaagcctacaacattaaagtaagaatataaaattgtgaaccaaaaacaagtggatttatggttctttccgaattctaataattttagagataaaactaaattgagtatttcgaaaatttaaaaatatccacaaagacacttattgtgactataattaattatgagtataatgagagtcaaatacaatgaaaatgcagtttatcaaatttagaaaataagagaaatagataaattataaatattgttggaattatagtttattaatctcacagtgaaaagtgtgaagaggagaaagagagacagacatagtaagcaccaataattccatgtaggtggtatgcatggaatgtaaattatcaacaaaataagaagaaacatttcacgcttacctcaaaaacaacaacctcgagagcaacccatctggcaatgttccaattctcttttagaaaagtatatattttgtcaaagtctcctgttgacctagcttttagtgaacgataatgagtcaatttcgaagcaattagagatataataaaaatagaggaaaaaccaataagcaataaagaacactaatttttaaagaggttcgacccctttagttcggtaatagcctactccccttagattgtattaacttgagaataaataatacagtgtttcctctctcaaagctctaacaataaaatctctgaatgtttctcttagatctctctctaaagcaattcttttgatcccttttacagtgaagcttgatcactatttatatggtcttaatgcatgagggaaggtttaccttttgcttacaatatctataattggaaagaacatttattacataattagaatacatgaaatgggggattgagacagcctgccatattcctctgattcaatcccatgattgtagggattgccttcgtgcttgggcttcacgataccattctagagtagtcaagtcttggtacatagctcggagaactaatctcattttttgctcggataatctaccctttactctgctcagataagcagactttgtgcatgcaaatatgttgcttgaagtcttttcagaatatctctctgcccaagtacaaggaatgatggacacatgtcactcgtacatgcttccatatcatagtacaaaaaatgggataacattttcccccccaagtctgtgcgggacttccgaagtcgctcgtgcacttccctcagtttcgatatttatttgaatgggtggtacgtgttcgaagcgtctgttggtgatatggcatgattttgaccaagggtctcttcaatatttagctcattaatgctaactgacatgtacctcaaattactcccaaaaaatagcaagtcttgacggttgccattcaggtacttgagtgtttaacgtttacttttgggaggaaactgatgcatttaaattttgaaacgattg

SEQ ID NO: 220023 - DNA, 2786 bp, Cannabis indica
taaaagctgtcatatcctacaaatattagttattatttgtttaggaaattttttttaaccaaatgtaagcataaaaaataaaattttcctattaaaatctaccttaactccaaaactaatatacataaaatgtaaataattccgtaaattttacttttttcttatttttttgtctttgaaaagtaacttgtcggttacttataattctaataagaaactaataagttactttttgttaaaatatcatttatatattatctaatttaggtttgaaatatattttggttacttttaaaatttatttgtataaattttaataattaattaattaattttagattatattaatatatttgagtaaccttcaagtttatttttaaattagttatatttaaaattttgtgttcatttttttaacaacatatatattaccttcaatcttatttaagaaactaatgtgatacaataaagtaaaataaatcacattatttattgtaattttcttagacatccaatctaaactaatgaccaattagttattttaaagcttatgatatcttaatattacgtaggatatattttggtaaccttaatctagtataaaaattaatttattatcatataataagttttaggattttttttatttttatacttcaaaatagttttttttttttagttttacaaaattttacataaaaaattgatagtaactaacggagcaatctaaattgtaactaaaattcatataataatctacatagaaaccactcatttaaccacccatttaggtcttgtatccccactaaaaaaaaggtcattattcgaatgtaacacccatttgttcgtgagataacaccttagaatgcccaaaatttggaatttaattttccctaactttttgttttcattcctattaattttaggggaagaaaatgaagaaatattaaaggatataaagatggtgatagccatatagggtagtagtaggagtactgcatagacagatgaaatgagaatatgattggtaaaaaatctcaagctgtaaagttttcaactttctcataattaggttaaattcttgggttttatataagtgaatctaatctcacacatacacacacacactatatatatatatatatatgtattgatcaaattggctggaccttagttgcttgctagcctggcaaaaagtactaatggatccatatctctctctctctctgtcttttaaattattattttggctaaaatgatccacaaattcaacttgtactatagaggtccatatgataccaacctttactttcttgacaggtagttccctagcttcacttcaataattcttagattgaaaaagaaagtaaagaagaaaaattaaattaaaaaaaaaaaaagaaagaggaagttggaaggtaagggaacagatattcaattgccacgtggtgaattgtctttttatactcttttgtgattgtaactcctaacaaatacacaacccaaaaaactattaacaaaaaagtggcatcaaaaagaaatgagaacactatatgatttgtagttttgtaacaaagttttgtattcattctaagtgataagaagagaagaaaaaaggggaggaattttgtgtaagaatataatgatcagaaatggagaaaatttgctgaatttatcagctttcctaaagctataataaattaaaactatatattaaggaagaaaataaacatatttgcccaacattttgactcacattttcaacaatgtctttatcaaaactatctgtaaaacaatgacatcaacacacttacatttatttatgtatataattatagatctcaattattctagcaaagcttgtttactgttttagaactattatatatacaaataatatgttttcgaatacactactaatatagcatgctaattaataaatacatatattattatttataaatatttttttaataataaacaaaccccccaatcaaataaattgggtccctcactgaaaataagtattgtgtttctatatacttatatagttatctacctcctgaatttcatatattgaaatttaataggtagtcgtatatatatttttttggaaaatggtggattccaaatattacacacaataatttttatttttattttttggagaatttacaaaaacatgagagaaaaaaataatgttgaaaaatatggtattttatggaagaaatttttttttaaaaaaataagaatctcaaattatcataaataaacttaacaatatatctaaaaacaaaatcattaccactagaaaattcctggacaagttgaaaatttaaaaataaccaaatgaaaaatttaaatttaataagaattaaattacttgaaataacaaaaaataataattaaacacgaaaatcaattattaaatacaacaaactaaaaaactgaaacaaatacatagtagtgcaactaataatcaaaagataattgaagcataaaaattggttacttaaacaaataagttatatcacatataaattcttaacaaatggtttataaaattaaatcataaaaaccaattatataaagggttcaataaaaaaacagcacacatatttcaattacatgaaataattaaagacaaaattaattatttaaaataattaaatcagaaaccagctaagagagaatttaaaaaatatacttatattacaaaaaggggaaaaatagcactcataaatattaacattttggttgtagaaaaaaatcacatatggtacaaa

SEQ ID NO: 220024 - DNA, 13161 bp, Cannabis indica
ccccccccccagcaagatagggaaaaacagccttggaggctagaatataaataggcctcaatgagttcctgaaattttttcctgagctcaaccaaaccccttaactaatagatgctagttggggggccatctgctaaacccagccccagtctaagtaaaagggggtttggctccaggctccaactcgatcttgtggtagactgcccctcctagggggcacttggcaactcactcgtggggcatgatatccccaaattcctcaagtacttgctgcacttcctgagaaagaagtcgtcttggtattggatccgctcttctgttagcatgaacatgaattagattctattcgtcttctttattcttaagagaaccccccacccgaaccattcttaagaccaccaagccctctcgaatgagttctactatagaagctttcaacgtacacccagggacaaatctttcactcactgagaagtgaaaccctgtgactagatcgtcctgaagacggatgcgacgggaagaagtggcatttggaagtgttgctgacttaacatttaggtttcggcataacaaagcttgcactgtcttttcgcacttaggcgcacagcgtgccattggtaatgattctactacggtgccacaaattcgcaaacagatcctaagtaatcgttgttgttcattggattccagaagaactacttcgttaggattgaggaattgctgcaattcttcctgaatagcctggattctcccgtcgagagtcaccttgaaagtatcacctaaactcttccgactgaatatgataaagcctataaaacaacaagctactatcatttcttcattatagattgagatcttcttcgaacttaatgcacaaatagatagaatagcagcaaatagcatctttctagcctgcatattcgtggaagtcaatctcatttagaaagcttatctctatctttcagcaactgaacgggaagtggtttaggaaaggactttagaatcggatgcgctcgcccagcgagaaaggccctgaccctgccaaccaagtcaaaataaaaaagaaagaagagaacgagagaacttcgtattttggtaattctctaggagtcatgtttaaccttgaatgctattaataaattctacagcaatagtccctcggactcggaaagtaataacgaaaatggctaacccaatagcagattccgcagctgccaccgttagaaccaataaagcaaataattgacccatcatatcatccaaagaaacggaaaataccaaaaagttcaaattcacagctaataacattaattcaattgacattaacataataagaatatttcgtctattaaggaggattccccaaatacctaaaataaagatgatcatagaaaatgtgaaatatttgataggatccatttcaggaacgtagaatgtaagagaaattcaaatgttataactccagtacgtcaggaaatagcgaatacaactccccgcgctccaggggtagaatgaggcgttacttagtctctatccagttcctttcgtgggattctttctattatttgagcgtaggtgagggatttcttataaaaaagactctcccggccgttgctctgcatatccgttaggatatgcggaagattttgcattcccccaggctcgtccgcgatcatgtcgaccaagcgctccatgcgcttttcggccgggatacgcattccatccgttctccgaagatggcggatccgctctatgagcttctcttgcgccttgaacatgtcgcgaaactcgcgcaagtgggcttcggtgagctgttgcccctccggttattctggcaggggtgggcgcggcttctcgtttttcttccgcgctattcatcacctcctgccagaacaggtcctcgtcgatctgtgacgggggtatttccagtttttcggtggggcggaaggtagaagggcctgcatcgcttctgccgcctccaacggaaagaggttctttttccattgcagaaagcacaaaatccagccatgaaaaaaatgaaacgaaagcaggtccccaccaagtcagcccccattttcaaataaatggaaaaatacagaaaaagaaaaaatttcttagtactagatgtagaatcgttcttattagtgaaaccatgagtcctctcatcttatactcgtaatcattcgattccgtatgaattaactcctccttcttctttaggataggatcgtcgttggtccttatgactacacaactcgatgactgcccgctgatggctcaatcatctacttacgtaatttccaaatctactttggtagcagacaatcttgggaactactattgacacaaaatagtcagatttaggatagctcaaaataaccaaatattaacttattgatattagaaaatacagactatcttaggacacactaactatatttatgttcagacagacaggtgtaactatctatccctaattcggatagctaaacgatcgttgaaaggcttaagagaagccatgagggaatatttaatacttacctaaaccagacatttagatactagctctcaaacaagaagctgtgagtccttactcaactcccagtgcattaaggaaaggaagctacaaactaaaagaaggagatagattctagcctacattcgactagcagacgcagacgagaagacgatagtttacatcgtcttctcctatagggatagatcgacatctcagctagggcagggcatagggcatacagaagactaaaaggttgctaaacccctttcattggattttcatcaatatgtcccaggcacagtaagcgaaagcgggctcaaccttacggcacgggatgctagcttcaggttgcttttctttcgcacagaagaagaagttccatcctcctctctccgctccagcctgtgatccacttcgaatagaactcaacgttgtgcgctaggtttcaaggtcagatagggctttgaagataggggttggcagaagaagagaagtaaaggaaacaattcccgatctcctatagaatgaattagtcttagttaatgattccgtcaagatatcgagtagttcacatagatcgatcataggcctgcctgtgccttcaggcgagaaagaaagagtagaaagatagggtttccatcgattagtcaagcaaagctaaccgaagtgaaggtattcattcaagcagtaatggcataccgatacaaactccttccgacttcgacgaagcagatagagaaaataaggttgttcccgggcgaaagcttatctctatactttcagcaactgaacggttgatgctttggctgaacgcctacgtcagctatggaagatgaatgatgactttatcttaatggaactccaacaatctagttgtaaggctggtataacttacacataccagactaccgagatagaaagcagatctggatgggggcccttgagaatagagcggcatttgcttttatttccctgtaaaaaaaagtacaatggagaaagaatttctctctagagacggctttccagggccctggtttggattcattcgtcttctcggtcttccttttgaatagtgggagcaagatttcatctttgcaatagtttccattataacaaaagagaaagggagaccaatcaagcttgacacctcccccatgagataatcacagatctgccgtggtttctttgccaaggtatgtaatgaattagatctgcagaagcccatcttaccgggtgttatgattggtgaaggaagcaatgccttctggaagcgcttcgaatattagggcctacctacaatctttttgttgtggtaagtaggctatgagctgtaggactgcactgagatgccagatgagagatagtggaaaactagtgactctttgggggctcgcatgaacagagcctttgagaaagagagtcttgccctccgtattactccatagggcagcgaggagcatgctgtggaaccaaccaccactagagattggacatatatataatctttcttctaaataaaaaaagagattctaaaaaaaatagcataagaccaaagcaggatgcaaaaacctaaagctcttcttttttttaagttcctcccagatacatggcttacatacccggctcaacattcttggaaaacaatcgaatcgagggtccggaggagaattggccattcaatcttgtaaactaatcgagaccgaaattggaaaaagagatacgaacggagaggaataaccaatcgatgaaagaacatgaaacctttctgtttcaatagaggtacaagaaagggttgggggcaatgaagtaggtaaagtggttggattttgcgagctgttacaaccactgctggatgtgattccaagagccgaacgagaatgaataccacacagaagagtcaagaccaggctccctaatagaatgtttaaccgatccattccggatcgaccgaattggtacaaaagttgtaacatgggaaaaccacagaaaacacgacttattttaataacccggtgacctcccaattgtagaagtaggatctttggcaagcaataagcacttaaataatacaattcgagtgtaccatcttctttctcatttcgaggaaaaggtgcaggaggaaaaggaaacaacagagggatccgaatcggacctaaatgggaatgacatgaaaagtctttttcaaaacctagcattaagggcgttacgacgatatacgagaggaatggagaaaaactcgtgattggtgtggaggggaagatctgtttatgatatagttcaagaaagagtcgtctcatttccttacttcttcgttctttctaattcattcacttcaaggctggttctgaacgccgcgtaacatcatcttcaaccaacctccaccgtacgtacctttcggtgcggccactaaagaattgcttatacattaaacagctgtttatatacgcttactaaaagactgactttcattaggccagcgtgaaactaagaaagagagatgtgcctaaagcggcatgcaagcaaactgtgcacgctaagagaaaaggagagatgttcgcaattactaccacaagaaagccgctcccctacccctatctctaaaggggcccgtcacttcgttcgtaccttcttggcttaggcttccaactgaacttactttatggccttgccgcccgccgcgagcagaagctaagcgcttgaaaagcgcgctaagaaacgttgcttctgtcggcctttctgtgcaacagtccaccagtagcggaagagagggttaccgtacatacaagagtcttccagtttttacgtaagctttttcttaccagtcaagtagtacaacagctgtatcttatagcccggcgcggcgggtcgccttttgaattcagtaagaagatagaagaaactattagatagataaggagtaggtgagtgagtcctcactgacctgagcgatttcgatcacctagcaggccttttattttgtaggtaacatcgccgaagcgtatcatcagatttgactacgaaggaaggaactcgaagtgaaacggcaccgtcttgtccaacgcaacgatagttggccctctatcatcttctatccggtagacttggtaaaagggccccgacttatttccagaattagagttcgaccgcagctgcccctttttgggggggatccagttccttgccaactatcgaccccgatctcttttcatttgttttgggtattaccaaacctagcctagccttcgtcaatcacactaaagcagagaacccaactatggcaaggcccccttaagggttaggttagtcaatccggcccgggacgcgttcgttgacaaaaccgccgtaggtttggtaaaacaatagagcagaggcgaactgatcaacgatgccctctaattaccacgatgaggctggtccctcttttagtagactaagctatgaatatgaatgaagaaatgaatgccccgctccttcttgcactgctaaccccaagaagtttcttaatgctgatactttctgtttcgtcgagccctgggcttgtggtcctcctttgagtgtgggttcaattggatgaatctgtcaagtcaaggtcaacgtacgtagcagcaaggaaggtgcatcgcctatttctcgttctcgctcgggagccaaaacgaacacgcctgctacctactgtactggaccttcgaccaggcattctacccttgtcgaatcgaaaccaaccaccactgtattgcgctcgaacagttgagcggccgccggcccttccgtacacagatatagattcattcttcgtacctggtccaacttcacaacccttcgcgggttggtcagaagtcagtcttgtttggtaagacggaattggacaaagagaggaccgtaacaacggccaacaaagaccgtaattacatagataactgctcctccccttctccgtctttaaggctttaaggcgaaccgtatggggaaagaaagacgacctcaccttctcgtagatggtgtcagtgagagctactttagtatcccccgttgaccttcttttgtagatagaatcttcaatgagtggaaacaagcacccaacctaataaagttgttgagtaaggccggctttcgagcccaagcccctaacctaggttgggtgcttgagcgcatctttctcatatcgatcaaggctttccttgagttttcaataaggggcgcgttagcactcctgcaagaaaacggcctagctaacgcgcgccctgtagttttcttcgcttgctctgcagtacgagcctcatacagagccgcgcccctttaatatgatgagaagaagaggggccgccctcttttccgcaccaatccttatttacgactctttttgggggtgtatagctcagttggtagagcattgggcttttaacctaatggtcgcaggttcaagtcctgctatacccaaacctaccttacactatactactattagtaaggatgcgtagtagcgttcaaagagcactctttggcctttagactcgcttcagcgacttcgccctttaagtgacaagggggtgaggtaaggagtagtataagagtggctcggtcatcaataggcctctccttattcattctatagggctcgtgccttccttcgttcctcttcctgaagggaagcaaagtcgatgggtggtctcttacttgactcacgatccactaaaaggaaagtggcttgatattggttcaaatccaattcgtgaggtaactctggctcttcactagagtagagttaaagatagcatagcctttgatcaggaggagaagaataagaagaaagtttccatgatccataagatactttctatcccgtcaaacctacggaaattcctcgtgtctcgctgtcgagtcgtgtcttactctcctctcaatggaaagccattttgaaacggatctgagaccctgatttccttgggactatgcttttgtttctgtatcttctttgtcaacaattaggattccctattttcaattcatacttgggaaagtagggggtcaattggcaacgagagtggcttcgtttttgagggggctggtggtcatcgcggtaggtttgctccttccagcgctcatcaatgccgaagtcataccccccatcgcaaatatgatgttccccgcaaggagcttctggcgcatcaagttcgagcgttcccccggctctagaaatccttctgaacaaaatgaattggggggagcaccgagccagccattgctcgatccaccgatcctagcccactcacctttctccaagattgaagttgtaggagtcctaaaatcttaatgccctgatctgccgtccaatctacatacattcattctactcggtaaatatggcttagccggctctctgtccgcttctcctttattgataggctcggtaggctaagtaagtacttccattggccagtacttctcttgttaggctagctagtaagtaacgtagacgtagttggtaaggctttcgggctagtagcttatgagtcagaagcctcttctctctctttcttttgagccgtagtttgctttgagctgatgtttcttttttcctttttttctttctcgaggccaccaaggggggctttctccggggaaggaaatctttcatatgaggattcacctctgaaactcgaaagagtaccctacgcccgacaacaagaatcgcctgatccaattagctgttgccgactttcactccaccccgctttcgaccttagctcctatgcttgctgccgacccttacaccataaacagaataccagtttccgaccagacagaagaagcaactagagtggatttctttgtgggaccgaccagttgcgagcaatagcgtcttatactttcccaaagaccaatacacaagcgattcgccatagtctaatcgattgaggagaacagccaatgaccgagcttgagatggaaataaagagaatatttcaaatatattcttccttttatctccgcagaaggccggattgatgcttattatcaatccttgtgggagcaactacgggagcccctatgcgatggctttaacacgccctccctcaacgttggagaaatgcccatactattgaactatagccccctttacgagatgaactcaacagagaagaggggagggacacatatttattgtttacaaaaaaatagagaaagctattaattaacctatggatttccctcgcttaacaacagaagaaagatgaactggaacaaagcgagcaagggattcacgattagcggattagctaaattaagcaagcaaaaggcaaggcatgagcggcaagaatcaagggcctgacctgagctcctactcctaggccagagcaaaagcagaggagaagaaggaacattaaaaaatgttaaatacacggatcgaccggggacctcttcttctttccgagagattgaagaacgaaacgcgcttgaagcaattgaagagctcggccgggcagttcaactgaatcaagaactgaaacagccatcatgggtgattccgcaactttcaattccaatggtagatgaagaaataagctagccactcctcaagaagaaaaaaaactagggcatactcagcagcaaggcaaggggattttttcccactttttggaaaagaagaaatcgaatgcgcaaatgtcaatgcatttgaccaaccgattgagagattggattaattacgccccttaaagattcactaagcgggaagacggatgcaaccaattcaattcgaccgcttggaactcttttgactcgaaaagctaattctccctttgcccagacaggacaaaacttcctgaacttgtagatctatttcttaccttttcgcttgagccgcccagccggcgaataactaaaaactattggctcacctcactccctctactcgagcgaaaacacttacctatagtcgtagtataagtgttcctcttttttcagatatggcattacgtatttttctatctgtctacggcctgacataaatctatccgtattaaccgaccaagagaggcacccaactaagaaaagatctaggtatcttcctttgttacataaattgcaattgcatatagggcagttctagtcaaagggcggggtaagcttgaccggctcagtaattggtggcccttccttgacttagtggcttctgtaatcctaagtctagtactcgcagaatcgatatcgcaaagcggcattcctctagtttaatttagttacagagttttattctcctaaaagcaaaccaatgcccggcccgggcgaaagcacttttcttttttcaatcctgtattgcattatctttttaatacttttctaaggtgggacaagtgatcctctagggactcactatggacaacaatgtcatcaagatagacaacaagaaagcgatcaatatagttagttgttataaaagacatcactcatcaaattacaaaaggtagccgggtcatttgtaagcccaaatggcatgacaaggaactcgtaaagccatatctggtaacagaagtaagtggttttaggctcgtctccttctgcaattctgactttccaatagcccgaacgaaggtccagctttgtgaagaaagaggctttggacaatcggtcgaagagatctgccaccaaaggggcaggatacttgttcttcactgtcactttgttcagtgcacgatagtccacacacatgcgcaaagagccatcttgcttcttctggaacagcacaggggccccatagggtgccttggaaggctggataaagcctgcatccagcaactctgtcaactgcttcctaagttctgccagttccaagggcgacatccgagttggtgcacgtgcagggggcttggcaccagggactatatcgatcttgtgatcaatggcccgtctagggggaaggttcttttggagttctgatggcattacatctgcaaactctttgagaatctcagccactttgtccggaatttccaccttgtggctcttcaagacctcgataaaagccgataggtaagtaacagcacccttcttcaaaccattgcccacttgtatagcagatagcatcccatgcctttgctttcctgcctttgtctggtaggctgcatccaggcacaagttgcctctcatccgcgatcaacatcccaccaaggtgcggcatcaacgccactttgcagccacaaagaagtcattgcccaatatgacatcgaaatcatctaacggcactaccattagattcaattgtccgctccaagaaccaatgctcatgtgcacaccataggccatacccagcactggttgggctgccgaattgacatccttaatcttgcttggattcttacccgccgggtctgcaccatccgttcagccacaaaattgtgcgtggcacctgtgtcaaccatagccaacacatcattcccattaagcaaaaccttaatgtacaagacgagaggactccgtatggatggcattcaacaattgcagaggattgactcgtgttgggctctcagagtcagattccacttcctttgctccttcggcaactaaggcactcagcttctctcgctttggacagtcgcccgatggggaccattggcaaatgaaagagccagagtttgtctttcccttgctctcttgtccatccgctttaggcttggctttgtttcacagaaaaaggactaaggaaatttcgtttccgtagtgagtggtgatgctggcgtcagttgacctggtatataaatatatattaagggcgattcagctagccaaatcgcactaatgcgattcattcgccctactatcctacagagcaattcttactaagagtaagactagggctagggcgactcattctattctctctgaggtcaggtaggtgaagcgtctagcttaggggggcgcgtcgaatcgctgaaaggccttggcgattctccaatagggtaatctgaagatagaaaaccacaatgattccaaacttcacttcaatagtctcgtatccatgctgccccgactccaaactcgatgtttgttaactaagcgcattcccaaactctttcttatcaaactcctttctcgttcccttgtacagcccttaccaggcagttttcattatgtcttctttgcagtgtctagggagcttaggagtgagttaagccaatgcgtacaaatagacagaccaggttcctccttttatgttgaggtcggtgcaagtctgtctatgatgttgagtctaggtggtgttgaagctggcttattcatgctagtcatcttagagctatgagtcagaacaatgttcaccaactcttccatagtaatcttcttcatatatcgaaaaagcttttgaatatgagtttcaattgttatattaaagtgttttgtctcctccccaaggtagcattgccgagcgggcgatccctgtcttgtttatccagctagcttttctccgtgggactcaaattctatttgtgagagctccttcggctcggcaacttttttttgaaaggtaaggtgggaccgcattctcaataaaaatgcctatctataaagcgctgagttgaagagggaacaagtcccacagagagatgagttgtgggggaaagagtgaaattcaaatctcttctggactggaatggaagacctcccatcaactgactacaagactgcagcctaaacccaagttagcctgacggtcagctaaatgagtcgcttccctcttcacatgatgaattttaactcaacatatattgagaaatgttttctcagaataaagcgcgccaaggttcttgattcttaccattcgcccatctaatcatgttaagagaacccctttttgtttgatatgatgacttgaaaagaatcaatagtttggacaaaaggccatgcaggagagtttctgcttctgcaaaggttgcatctttgatccctagaggagacctgttcaattccacatgacagcaccattgccatctcttatgaccccaccataatccgaattcccagagtagccttccctactccttcaaagtgcatcttgatgtgatttgaagaggaaattgccacaagattgagatagatttgaatttgaattttccaaaaaaactaaaaagtaatacaataagacctcgtcatgttcatctttactaacatcctatacaaaaaatgaaaaaatttttgtggtctttcttttttcaatcaccttaacgaaggaggtggacttcaaccaagccagcccttcttatgaagtggctatggagatttccaaaggaaaagaaaaagccatggtgctcatatttggctgctaagtacctctccaatgacaaaaatggattgaccaacccacctctaaaatatcctgcatctagaaaggtattggtattatttggtacagagagactttcaggcaggacttgggctagactttggttgggcaatggtaagctgattcgcttctgggatgatgtttggccgtgccactctcctcagagatgcatgccataatttatatcaattcacaaggttctcatgacctcaaagtgatagactacattcaatatgaaggagaaaaaaggatttctctccctattcaaccgcccatccaagagcatttggcttcagaatactttttt

SEQ ID NO: 220025 - DNA, 2870 bp, Cannabis indica
tgatgtctatcgataacattggagttctctcatcttcctggggtggaggtgttctgcttcatgtgttgaagattactcgaacacagttcgataaactatggcttgcaattttgattaggaacatattgagagttacacctttgtttctgctgtttttggtaccgagaactgatcctaaatcttccattctttccacggaaagttttgatgtagaagaggagaccgaaatagaagagcaaaagaatgttgaattggtttcccttgtaaacaatttcgataatggtagatagccaaaacagaacaatttcaccccaataccaacttgaaatttcactcaacaaacttttgctcactctcattctcccacagaaagaagaaagaaagagaaatggttcatctaacttgatctcttcatttaaatagatatcaagtatattttgattgaattaattattattaccattgttaatgttgatgttattaatataataatttttaatgttaatgttatatggaagctgtcttttttttgttcttcagatttttttcactgagtttactcttgaagctttattgagaggctgttttttaatataactacatgttaaaaccaaggttgtcttttgataaaaccttcatcaaaggttgttattaagattgaaatgcatgaaaaagttaagttcattaccaaaaagttactaataaagtgtacacaaaaagtgttacagtatactgtatagtccaaattgatcatcatcaatacataagaactcataatgagataaacacaatttctcaagagaagggcaacccaaaatttctcataatgagtaattttaagtatatttcattaatgagataatgctcataagattctagttatattgaagcaatggttcgatcattatttcttcgggtcttgttctaaatgatattgctaaattttgtaggatgatctatgttgttaggtttgtttattgtcgtagactttataatggtgttggtcatactttagctaaacttattttgttgacaagtagtagtgttatttggtggcctaaaaattctaattatattcagaacatattggtagcagaaactatctttgaataaattctcaccctcacttttttttgagtacttatcagtggtgtttgatggttgagattttctcttaaaaaattattttttacggaattttttaacctaaaaatttggaagtatttatttttcatattagtgttgttagtctcaaagtattttttagaattacctctaagttcaatggtataaattattgttaaagagataattggtgcatcaaatctcctcttaataaggctataaattattgtattgatcttatgatctttgtgccttattaatggaattctttcttttttaaaaaaaataaaataagtatcttcaacggttgcactattttagcatattttttcactaatttattgtaacaatttcattaattcatactaaatatgtcatcaaatgaatattttatgtttaattttatattaatttacattaataatcataattaatataattaatttatgatataatttatatattatcaataattatttatgattattttttaaaataaataaaaattatcaaacaagagctatactgagaaatgagaatggaataattagaatagatatagtctattgattaatttacttttagggatgagattcattgtatattttgggtaattagacttttaggaaattaattgggtgtgtaataattatctttttaaaagtcaataatctaaaggtaacgaattgaacttcattttttctttttcttttttttttttaagggaattgaaattggaaacaaaaataacaattcaacttttattaaaaaaataataatttaattgcaaattgagaacaagaatacttgaagacatcaattatggggaaaaacaatactgcaatattctaatgataaattcaacatttaactgaaaaaaaaaaaattaccaaacttaacactccaaaatattttcatatatcttttcaaaatatattgaatttaatatacacgaccattaataatacaaaaataataatcaaattcagaccttttccctaactctatataaagactccatataacaatgaaacaacaacaacaatttacatatatatcttgtattgttagagtataatttttcttttaatttgagttattaatataaaatatgggcaagtctctatgcaacattctcctagtgaccatccttgttctcattgtctcaagtaaatattctctcttgttctcttatttccactcattatctactttaattttaattattttttttttatatatatataatttttgtgttgattaattaattaattaattcaggtgattataagatgggaatgatggtaatggggactagaatgtgtagcacagccataagaggatacacatgcaatgaaggaggatatgacttaggatgtgagaatgcttgtcttaaattatttaaacaaagcaaatcaatttgcataccaagtaactctaatggagcttttacttgtgtatgcaaccatccatgttaaacaatattgtgttatatataacacatttatatcaatgaaataatttatatagttttttttttactttgttattattttgattttattatgccttggatgaagggctggtcctgaaacaaagtgggccatagggagaaaaaaaaaaatttgggcccttttagaaaaaatatagtatttttcaaaatcgataaaaaaaatgtataattttaaaagaaggaaaaaaaaaatttaaagccctggactaggtgggccctaggcacaggccta

SEQ ID NO: 220026 - DNA, 2852 bp, Cannabis indica
caatgccagcccctcaaacccccactatagcattatcatgaataactcttcccttcacaaatgcactctgggaatccaaaataactagccccaaagatcgccggagacgattagataagcactttgaaacaatcttatatataacattgcataagctaatcggtctatactcctcaatacgttgcggtttgtccacttttggaatcaaagcaattagagtctcattcaaactctcaacctcagccgcatcattcaatatgcttagacacaccgaaatgacatcctccttcagtttttcccaaaactgttggtaaaacaaagcaggcagcccatctatacccggtgccttagacggggccatttccttcaccgcacaaaccacttcctccaccttaaaaatttccaacaattcatcattcataggtcccgtaactctcctaggaatagccccaatcacctcttcaagcacctcctgttgaatagcagtaacagtgaacaaatttgaaaaataatcactaacaataccctcaacagtcccttgtccctccttccaaatccccatatgatcaaccaggccaataatttcatttttcttcttcctccccgaagctttacgatgaaaatacttattattttggtcaccacactttaaccaaagagcccgactacgttgacgccaatatacctcatccttttccaacaacacatttaaccttttttcaatgcttctttatttcaagccatatacccggctgttgaaccatggacaactcattcaacactttttttgccttactcatttcttcattcagtggcttcttccttttaatgttccatcttttcaactcaaccccacacctagccgactccttttaaatccactagccgaacacgtaccaccctccctttcccaaacactatcaacaatttctttgcattcatcctcctcgcaccaagcttcctcaaaatgaaatcgacttcgacgacttttacttatactacgacccgccacggctccaattggcaaattcaccaccaaagctcggtgatccgattcccaccaatcaagaaccttcacatcggccccatcaaacatagatagccactcctcattacataacgccctatccaatctctccataacccccatgtctctatgaccattaccccatgtgagttccgatttacaagaacagaaatcacttagttggcaattatccattacctcttgaaaatcttccatagacctgggacatttcattcggacccccacaatctccgaaaagcttacaatctcattaaagtctccaatacacaaccatggtgccgcacttaaccccgcaatattctgtaataattcccacgagaaaatcctctgttgtttatccggatgcccataaaaacaagtgagataccacggttgaaacccctcccctgttaccaccgaagcaatatgcccaggtgagctagagtctacccttatattgatatcatccttccacattagaattaatccaccactcaaccccacccgatccaccacccaaaaattagaaaattgtaacacactacaaactctttcagcttgacttctacccagcttactctccatcagaaaaataatactcgggttaaattcccgaacatgggattgcaacgcacgcaacgtccaagggttcccaattccctggacgttccagcttagtagatacattaggttcggcggccctgctccgcagggctcgccgcttcagcattgaaaacaagagaaggtaaatcaatagaagaagaaataccaacctcaaccatagaacctgtatccaagaccccatcccccttagttgaaccaaaagaatcaccacccgccactgcctgttagtcgactgcacccgcaccatttttcccccgatgcaccccacgagccttattcttaatggagagtcatcgccgttgattaacaccactcccgaagagccatgtgccttatccaccttcccatgagcaaagccacctcccgtgtcaacaacatcaacctcttgcaccacctcctttccttttaaagatgaacgcaatcccccaaagccatctgattcccgaaactgtaaggaactctcatatcaaccacacttcctcattttttgatcaaacactccatcgagagtctcacaatatgcctctcctatattcgaaccccctttcctggttttttgattgatatccaccgaagaagaagaccctgggcaggattcacttaagtgaatattattagaatgcccaccatcaaccaattgtggcccaactccttttgaatcccctactccctccccttcaatagttttgcccaacttacattctctccaattggacccaagctttactaccattagaaggaatgaacctccccacaaagatgctacgtaacaatggaaacccgattctatctcgcacatgattatttagaaaaacctactaagtactactccatttaatatccgccacttcgcccgccatagtactgaatcttttaacattgttaagagtaaatacctttaacgggaaccctcggatcctaacccaagagaacactttgtccaatttggcatcctgccaattaccggaccttggccattcttcaaggatcaaaaaccctccattaaaaacccaatgttgtttgtccaatacccactgagcatcctgttttgattgaaaagaaattccaaccaaattagcgtctgtaaagccttcaagcaccttcactttccagtttgagacattcttccaaattctgttaaacatactttggaagagatttccagttatccctctctaagccacaattcttcccataagtg

SEQ ID NO: 220027 - DNA, 4583 bp, Cannabis indica
aaaaattgattcctacatatggtcaacttcctaattactaaaagaaatacacactccccgtcaagttgggttgtgtatattaaacatcccatgcttgcaaattaaatcttcaaaactggttcttgggagagctttagtgaggatgtcggctatttgacatcttgatggagtataaatagcttgaacaatagcattctcaatcttctcagtgatgaagtgtctatctatcttaatatgtatagtcctttcttgatgaacaggattttcgctatactaatggcatcttaactgtcacaaagcatttggatagactcttttgtagataatcctagttcaccaatttactcttttagccaaattccctcacaaataccgagagctggagctttaaactcagcttcagctgagcttctggaaaaaactgtctgtttcttacttctcaatgttactagattacccaaaacataagaacagtaacctgaagtactccttctatctgttatatctcctatccagtatgcatcagtttacactctaatttccttattttcattcttcttgaatagcaaaccttttcctagagtcatcttgaggtatcttaggattcttgtaaccgcttccatgtgttcctctgttgaattattcatgtattaactcgccacactaatagcgaaaccaatgtcattctagtgtgagataaataaataaggcgcccaaatagcctttgatatctccccctgtccacaagtctctgatttgtccccaagccaattttcttgttcgactacattcgagttgaggcttgtttacacccaagcattcctgtttcattgagtaagtctagaacatacttaaatttagaaagaaaaaaatgccatgccttgatcgtgaaatttccatgccaagaatatgtctgtgataacctaggtctttaatctcaaattcctttgataagaaactttctaaccttactagttcctccttgtaatctcctgctaatattatattatcaacataaacaattaggatagctatcctttcatctgagtcgattttgacaaacaatgtgtgatctgcttgccattgagtatagccattctggatgattgacttagttaattttccaaaccatgctcatggagattgcttaaggccatatagagattttttgagtctacatactttatcctagttggatgaattctcgaaaccaggtggaatatccatatagacttcttcttcaagatctccattcaagaaagcattcttaacatctaattggtgcaacaaccagtcttggtttgcagcaagagagagaagaacacaaatggtgttgagtttagcaactggtgcaaaggtctcttgataatctatcccataagactgggtgaaattcttggcaaccaagcgagctttaaacctctcaatgctacattctgctttatgcttaatagtgaatacccacttgcatcccacgagtctcttcctagttggcaatttggtgatttcccaagtaccattcttcaccagggcgttgatctcatcttgtatagccttttcccaacgaggatcaagcagcgcctcttgaattgtatgtggaatccctacactgtcaagagtcgaaacaaatgcctgataggatggagataagattttgtagggcacaaagttgccaataggatgttgagtacacgctcgaacaccttttctcaaagcaataggtagatcatcatgtatatgaataacattatcatgactaggcttactcaaacctgaatctattttaggaggatgtggatccagttctgattcatggtggcactcaagatgtgtttgatcttttaattatttgtcagaatttttccttctttggtagacacaaatctctttaggttctttttgttgaggctcaatagtcatacgcggatcttgattttctatgacttgggaagaactagatggaccttgattttccatgactgaagaagtcaaagaagtgtctttcattggattggaaaattgatcgagaggcagagtatgagtatgagtacccaaaaattatgttagtatgggtaccatgaatactctcccaaagatgagattcgtttacattctccccctgaatctcagattcgtagtaggaatgtttttcaaaaaaggatatatccatagagttataagttttttgagtagtaggagaataacacttataacccttttgatgggacgaataaccaataaagatacatttgatagacttaggatctaggttactatgatgttgtgaataaagatggaaaagaatagtgcatccaaagattttagggtcaacaaagctaatgaaccgagtgtgaggaaatagttgtaaaagagtttgaaaaggagtttgaaattttagcaccatggatggcatccgattgatgaggtatgcagcaataagaatggcatcatcaccctagaagaatttgggaacatgagtcccaaacatgagagaccaagcaacttcaaggagatgtcgatttttgcgttcaacaattgcattttgctgagtagtatcaacacaagaacttaggtgaatgatgtcttgttgtatcaaataaggaccaagaacagaattaaagaagtctttggcatggtcagttttgagaatttgaatctttgtgtgaaattttgtttgaatcattgaatgaaagtgctaaaatatttcactcacttttattttatttttcatgagaaacacataagttaatctcgtgtgatcatctataagagatacaaaccatctttttcccaatatagtgttgacccgtgaaggcccccaaacatcactatgaataaatgaaaaaggtgtggatggtttatatgttgatctagaataattattgcgagtgtgttttgcaaactaagaaatttcacagcaaaaagagtttggatttttgttaacaaataaagagggaaacatttttgacaaatacaaaaaatttggatgaccaagacgatagtgccatagcataatatcactatctttattagaacaagaaatggagtgattattcaaaggaagcaaactaaacttttgggttgtgctagtagattgagtttcattccttagaacataaagactagaacacatctcagcactacaaatcctcttcctcgaatccaagtcctgaaacacacaaagatttgagaaaaatttagtcacacaattgtggtcacgagtaaatttactaatagaaagtatattacaatccaattttgatacgtagagtatagaagtgagggttaggtccttagtaatgatgaatgaagccaaaccctcaactttaagaagtgtaccatcaacaattttgacagtatgatttcctatactcatgtgcaacaaagaaaaatttgatgcatctcttgtcatcttatctgaagccccagaatcaagactcccagatttagtatttcttttattgagaaaaaatccagtaccatgagtggcagtcaacgaagtggagaaatgacttacaagcttttgaatggcctcaagttgagctttagtgaatggagctgactcaattgcctcatcttttccttcggctatgaaaccacaagtggcagcaacattccccctacactcacgttcaccccaggacttagggttcaaatttggaggctttccatggattttcagcatgtttctttgtagtgtctaggttttcgacagtgatcacactaggggcgccccttagtttgacgagtatcaggggtagcttcatggaactatcctctagcagcaagggcagagattcctgacttgaaaaagagctttgagtacccatcataagctttttcttactttcttcaagacggacttcaaaaactgcttatttgaccttaggaagtggcttggagatcatgatttgactccgcactgcgtcaagattttagttaaggccacgaagaaatttgaaagttctctttctctccacaatagcacgatatagagtagtgtcatacctgcatatccaagcatattcttgtaaactctatcatttaattatcaataaagagacagaagtattttcaacacttatttaatgtgtcatttggttcatgttatcatttatatgtttattggatttataaattcatccaaacccttatcacattaatattcttgtttattgtgtcgtcagcacagtggaaagtaatcaagattgtgtgattgaatatatattcctaaatttatcagtagacagcgtttaattgatatgataatatacaatatagtatacttgcaccttggataagtgctatgacctttcccgggcattggttaaagtaaagcttcggttggatgcatggaatgaatttgacgggagcgatattgaacttggattagatatgataaatttatcgtaatatctattcaattcaatatcacctagttgatcctagatcaaatgatcttaatcttgacatggttaggttcgatctcaagagtattattcatgttctttgattcgttagttaagcctactttttggtcgggtgatacgtacattttgaaaatatggtagtgcaattgagtg

SEQ ID NO: 220028 - DNA, 2835 bp, Cannabis indica
ggagaagatgatgttccttgagtgttacggcatcgtttcaagaactttttcatagaaagagaatcattttgtcttttaaagttgctagcaggtggtgagttttcttttccaatggacacaatggctgttggaactgaaggttgatgcttgagggggacatttaaggtggaggaagatgtatttgagtgaagatgagttggttggagtggtggtggatatgtggcaaaagtctggttttgaatttcaggcatgtaaatatgtgagaggtcagcaatagactcactaggagtggttcggccagggtgaattgtaactgatgtttggtgagagtgggtgctggaagaggtaattggttgctggtgtacactgttgcagggagaaaaaagatgttgggagtgactcgggttgctggtgcaaatgtctgcgaggttggtgttggtgtcataagtactggggttctgcttatgagataagttggctgaaaaatccattggttgtttatttttggggttgctgtgactcagtacagggctaggaatggaggtaggtttctggtttgctggtgagttgggcggctgtggagatgcagcagaatatgggaaggaggcaggggcattagtgttgtgggagatgagagagtgtatgatgttggagtgagttgtagggatgagaggcgtatgcgacattggagaggtggctggtgtgaaggcggtttgtggttgttgataaggtgtgaagttgggagagatgtgagagtgagaatgttgctgatgcaaaggtaagggactattagaggtttcaccttcaaatagtgtagaaggagaagcttgaaatcagtttttcagagatggcaaagtggaagtaagtgtagttcgggccaagcgggtaattagcggccaaggattgcctttagcaaaatcagtccgatatcggtcatagttatgggtagggagtttagcacctttcatccatggtccatactgaaaatcgtcatcattgccgctgtccatacgctccataaaagcaacacatcgctcgaaaggatgtcccaagcggccacattcaaaatagaattccggaagcctttcatagcggaagtcaacccagaactcatctttaatccttggcagccgaatcatttggcctcttaacaacggtttgtttgtgcaaagtttaacacgaactcgtaagaagggaccccacccttcattggttgaatcatcataaacttcaagaaactcaccaatgatattaccaagtgcttcagcaagcaatttggacttacttaagaagggcagccgatagatttgaacccagaagggtgtaaaaactaaatcatcctttgagacattttgcagaacatctggcgtgcgtagaacaatgagatgattctgaaagtgccaaggctctttggtgagaacccgtcttttgtcgccttcacagccaaacttaatatgaaataggccatctccttcttgatattcagtgattataacacggtatcggccttgccaatagcttgacatttggtcagtaaaggcttgtttgtacacattctggtgggtgagaactttggctaagagaatgactggggagaaggatcgggtaggggaggattatattcaggtatacgaaaaattgatctttcctcatcagtgacagaaagagaagaatgtatatcatttgagagtgagtccatggaattgagaaggaatcgaggagggtaagggcaggaacgccgactatggaggaggaggtttgaaggggggaacggttaatacagaggaaatttgaaaatgatgaaaagagattgatgataaaggtagttaaaaggaaaaataactaaaaactgacacagacccaagaagagcacattcaaccccacattaatttaattataacactccggcaaaaaaattatctttatgatttttatagtcagaataaataaaatgagatcaaataataatgtgtagttaatatatttttattattccttttcaaataataaactgtaattattatatttttcaaatagaattatttagaaatgtaatttataaaaatagaatataatattgggagtggtcattcaaacttgaataattctagattacaaataataatgtgtagttaatttagatagagtacatcactttgtttttttacaggatatatttaaagaatttaaaaaaatgtgtatctcatattatataagtaagcacattttatgtgaacgtttgctggcaatgaaagagaaatggaaaaaagagactgaaactactttttgctcaaaaattaagaagtatacaaacacaaaatatcctccagtagctaaaatgtaaaattatatcccaaaattgcaaaagcttacaccaataactagaacttaatttcatttccctttgcctttaaatgaagaggccttacttgatgatggtttcttctgaatatctttctttggtttcaagttgcttgagcttcgtgaagacttgtcttgtttacctttccatttcttctctttcttgacattgtacatggtgattgcctgttcaaatcacaaccgagattaaatctattttcattagggaagaaaagagttagatgagacactatagaaagaaaatcaaaccttgttcacgttgagtatttcatgggaattcttggaaattaacttgttcataactttttctgtttgctctttctctaatgagttccctttgcctccgacaacgggtaagaactaaaacaaataatagaaaaataatttttttttggaaaaaggataatagaaaaataaattcagtaaactaaggtcaccacaacaattaaagg

SEQ ID NO: 220029 - DNA, 1320 bp, Cannabis indica
caaagatgtaattaacagcataaggatgataacccaggaaaatgaaaaaagatcagaggaaagatgatggatcacttactgttcgaaattgagttgtcacacgatgaaaagctttgcaaccaaggacggaatgaatggcttgatgactcatgtggattcctgaggttgaattatatattcgagtagacgcgcaagaaatatgtcaatgacaaggagggcatgcaaggctttaagaaatcagaatggttttttgccaaaaaaagctcgaaattttttgaaaaagcagaaatggtggaaaaagggttcctgttcagttttatactttgagattgatctctgtcagattaaaagaacaaaagatccaacagataggaataagggagaattagaaaagatgacttattaatgctaatgatgtgcctcgaaaccatgaaccgccaaatttaaaagcctacaatttttcaaattgagttaagaccaaaatacactttgtaatcatttaaaaagtactttttattaagaaaaaactttttaaggggcaattgttatacccgaaatttagctgtactttagagagtgacacgtgttgaacaaatggaatatgaactgccatatataataacgattatgtcattaaatgcaaaatggaacaactcattaaatatagagttaatagagtatattcataactcgctgactgtatagtcttaggtgagacaaggatacacaaactatcaattcgtgtattgacgagaaaccatactgcctcggaaagcataatcctaagggaactacggacaatgcatagcgagacatctacctcacaacatgtaaggaagtattgatgaggcaaatcgattgttgaaacacttagcgtataatccatatcatataactaagtgtaatagcttgggagcatggaggacatgattgtccagtctgcaaggccttatggtcaaagagcatttcttaagtttgctcagtacactggtgctcatgctattgctggaaagcatatgaataaaccaagtcattcatctatgtacaaagcgagatgcctctagcgagatgctcctatcccacgtcagtgtccactaccctaaatataagaataacaaacagttatgcagatttttagctctacacgtgttaaaatggaacgtggtcaaagcccacgtttcgtgaaaacaattatgtatttcaaattcaaatgtaaataactgccaacctataatcctataaataggggcaggggcaggttatacagaaaaagggacggaaaatctttgagaaaaaaagatcactgattgtaatactgta

SEQ ID NO: 220030 - DNA, 1926 bp, Cannabis indica
tgaaagatggtaattaatattattgtagatgttttgtaagaaaatgaagttgagataacgaagggccagtagctgttttttccttgttaatagcttacaatgtcatttttctactcttctctttgccattctttatgagaccatcaatacattcaataatgatttttaggtcattctgaaacttccaaaataaaattatgattcaatataagtttaaaagctagcctagagttggtcttcctaaacttaggaattttacatgttcacttgctcagctcttctcctcagcttccatgtggttaggtgagtagttataagtcaatttcccattataggttctattatttaaggaagaactccctactgaaaacattaaagatatcaacatgtgatcaacactagcccttcgttatctcacagaagtggtgtctaaagtcgttgataaagatatctatggtgatatggtggtggtgtttttgatagctaatagcttgtatttgtaagtaaattgaagaatccatagtgatatgttctgatacaccaacacagtagctcttttactatatatcccaactttaagctaacacctaattgcgcttattttgttggaactgagaatatataatattcattttatttgattatggggattacacttgtagataagtttttgcaattgttcacaaaacccatctcacttacatttatatatccttgttatatattctgatcccatgtaataggcgttttaagtgtatagtatatttaatgactttatgattttcgttcccattgtttctttttcttgccttcctataagtttctgcaattgtatttgttgtgctcctagctatcattttcttttaatggtaacccataaagtaaagatcaataaacattgtgcttgtgtgaacatgagaaagagatgttctgaaattgtgtttgtggttctatcatttatttatgtggtgtcttgtcaacagtatcttttgatataggaaactcattattatttgtaatatatattgtaacttcatcacctcgtattctttgctaaaatcattaaaaattttagttttcatcattgcattcaaatttccaatagctagctccaggcactctgcagttatatacacacatatatgtaagattatttcaaacaagccatatataaaagtagttactaaccttcaaatacttaatatattttataccttcaaatacttcctctcacaatgtttctttaagtttctgcacaatccaacaaaaccaaaccccttccaagtgattagaagttaggtttttgttttcggttatttgtttttgattttatgatgattattatgtttggtttagtatttgagagttgtctttaaaaaggattcttagtaatgaccctttttttaaaagagttttgtttttgcttacatttttaatattttcttaggtagtgaactagtgtacctatttctggttgttcttttgattaagttaattcttgtttattttctttatttacttgctttgaagaatactaataataattccctctcttaaaagaaaaagaataatatatttaagaatcaacatgcatgtatatatacgattgcatatggttttgtaacttgtgtatatgtggattacttgtaggtacgaatgcattgaaaatgatttgttgagctctcttttgaaagcttctagtattgcttcttacaagtcaacaggcgtggacaaagctttagaactagcttgttaattcatggtatgtgtccatctttgtggaagagacttaaagaatctttttggtactctcttgtggatctaaacattaaccctttcaagaggattgacaagaactgagttcgctcctaaacttagtgattataacttcagggtgcctttgaccttttatgttgatgatgaaca

SEQ ID NO: 220031 - DNA, 2675 bp, Cannabis indica
tcaccacctgtcaaatagagatcccgacactcaaatgggcatcaagtgacagaccaactccatctcaagagctggccgaccacccttggctggccctatggctcgccaaccttggtgatgcaccatggcaagccagactcgcctccataggggcttggccgaccaagaggagcacttctacacgtggacaacaacacaagggctgcaaattgggccctaaaagcccaacaaaatgctaattaatatctagaatcaagggaacttttgtatttgataaatatctaagaaactatgcaagcattaagggattgacctgtaaacctagggttttaggcctcctatataaaggccttaaccttagcctagaaacctaagttgcctctaagcttgaaacctgcttctaaactctaagtgtctaatacctaacttcctctctctcacgcgcctaccctagaaacatctcaacagttgagttttttcattcttgattcataacttgtaatcctatgagtgctatagcagatcctacccatagtgatgtggatagtatttccctcggtatcaatataacaaaaaggggagtaggtcattacccgctatcacaagatggtcgaacatctacaataaatcttgttgtttattgcttttcattcttgtttgtgcaaacacgtgccaagcatcaaatctaaatgaccctgctgtcggttgctcactttttgaggtcaacatgtatgtttcgagtactacttgtgagatggggtccaccaaagatcgttgcaatgtggttgtccataggcagcagagcgagtccaagaggatatagggttcccaaacccaaggcaaataattccaccccatctggggttgacagagtagggaggcttatgaatgatgttcttagagattgaaggtgtcatacctctgtagaggatttatggcgctctactgtcctgaaattatcatgtgcccatgcgtaaaccctatttgggatagatgataagaatacggactcacactcccaaatgtcatgcttggactagcattttaacgtcttcaaataatcacactcgctggttgtgttacccttctctccgtgatactttctctctttactttggtcatgcctattccttcttacatgcaacatgcgtagaggctttttataatggacaatattgtaggtcattttatagatattatcccgagtatctatgaagctttcatactcaatatattttgaatcatttcccttcctcgacctttttgaagaattattgcagttgttgttcataccccttctttttctccgagagtgtcttccgttagaatctaggacatcactttctcttaccttggagcaacactgcgtcctatctatgccgccttatacttggaaaatttggtctgtgtaggggcaagactagacgtagtaggtccatagacggtcggggaaaattgagatccgagaatagacagggcaggagatagaacttggggagagaagttaggaacagtcacagaaggagttggagtaggtgggactctgaaagcctatatataggcatcctccaagttgatgatggcatgtgcttttgccataaattcgcttaaagtctttgccctctttctctgcatttgtcctcatagtagagaaccaacaaccaatccggattggagggccatcaactttatatcatcactgactttggttttgccgattgcctccatcattctttaaataaaggcctttaggctttcattatatttcttttttaacgttggtgaggaaaccaacctctatgtccttgtctcacacaataatgaactgcttatagagggctgagtgcaggtttttccaactgtcaattgatcttggggctaactgctttcaccaatcctctacaaacttagtcagggtcaagaaaaagcatagacatttggcatcatcactgacccgagcaacctgcatcatcttgttttatttgaccaaacatgcttgtggatcagttctcccttcgtacaacttgatatggagcacctaaaagtcatcttgttatattttgccaaacatgctcgtggagtttttgcaatccttcttacccaaggtttcggatcctcatcttttgaatctaatagtcctccactttttttcttgacaactcagtcaaagtagcagctgtctcttccatccgtttggtgtcgttgttagggagatcacgtcccctcatcttatcactcaaatggttcctaagatcatccccacatggcgtttctttctcacttttgtacttttgtacttggcatctaatccccatcagaggtcttcagtggactagctatcctcgaaatgccccactgttgtccttccatcttggttaaccgaatcgctggggtggtttctttgttttttagttgtgggtaccttcgcagcttgtcctcgtgacacggtttttcatctagggttagaagggtgccaaggttcaaaagcatccgtggccttttacatctggagggctagccaaccgtatttgaatcccttaaaggatgtctaggtgcgggcttttgtgtgggctcgcccaccctacccatgcccttatccgtacgaggatatgaggtctcaccctctgtttatttttgtgcatgtgttgggttttatgacctaaataaaactcatt

SEQ ID NO: 220032 - DNA, 1235 bp, Cannabis indica
atgtccttgcacttgctggtgcaccttaccctgaacaacagcttgtgtcaaacgtgctatctggtttggacatgacttaccttccaattgttctacaaatcgaagcacgccagtcaacaacatggcaagaacttcaagatctcttactctgcttcgacagtaaagtggagagaatgagttctatgcacagcattaagtctcagaacaacacgctgtcaccaacagcaaatcttgcaaacaaaagttctcctggaagtaacactggatctggctatccgaggaacaatcgtggaggacacaatcaaaatcgtgggaggtctggaagcaggggaagaggcagatctggtggtggtggtggtaacaaacccacatgtcaagtttgcggaagatatggtcactcagccgctcattgttacaacagatatgacgagtcatacatgggttcagccccttcgaatggtgcatctgagtctgcaaaaaccacacaaaacccagcagcttttactgctactcctgaaatggtcgaggatgatgcttggtacgtggatagcggtgctagcaatcatgtctctgctgacacaagcactatgaatcagaaaaacaagtatacgggtaaggatactctggctgtaggtaatggcagtcaactcaccattgaacacattggtaatggtactctttattctgttaatagctgcccaataattcttaaagatatcctacatgttcctagcataaccaaaaatctgattagtatttccaaattaacagcagataacaatgttattgttgaatttacatctgattgttgttatgtgaaggacaaacaaacaagggagatggtactgcaagggagacttgaagggggactgtacagacttgacaaagccagaacacattctacaagcctttcaaattttctcactcaagttaatgtcaagtcccaacccaagttttttactggtttagcctcgttttctggtttagagtctaaagtttctgttgctgaaaaacaaagttatttagtttcaattaaggataaatggcatagacgtcttggccatccgtccaatcgtgtgttaaatcttgtactcaatgaactgaatgtaaacactattcgaaatgaagaaagtcacttttgtgaggcatgccaattcggcaaagcacattctcttccattcaaaactaacactgctagagctaattctcctcttgacttgattcattccgatgtt

SEQ ID NO: 220033 - DNA, 3377 bp, Cannabis indica
accctaatttgggaaaccctaactccaactaagggttctactattggtcactactatagcaataccccaaaaatcaaggaaataaccaaccatggcacttggaataacactaatttacaacacgaaaaattcaggaaaccggttaactagttttatagagcatgtaaaaccaattaaccaatttgcaccatgtaacccaaacaaatttgaaaccttgtccaattcgtatccaaaccttaacaaaccttcctgaacacctgtatcaaccccaaacaatatattccaagtagtaacagtaagtaaaacactcaaatactcaatatgccattattgagtcaagtttgagtttcttaaaactcaaacttgctcaacctcaaaaccagccaacaaaaacagtgcaataaagctaaaaacgtcaaacctaatctacaaaaaccaactctagctaaaaccctaacaaaacagtagctaacaaacaattatgcataattcaaaacttaagaaaaagttagctctagggctcaccttagctttcctcctccaaggcttctcctaaccattgaattttagctagaattaacaaggaaaaatctgaagaaccttggttctatggctgctacaaaaacgcgagagaaagagagagagaggaagagaaatctcaaagaaatagggttttttcatatatttttctaatattaccccttttcctttactgttatcccaattttttacactcagacgtggcttcacacaatggtgacacgtggaatcaattttatgaacctgctcgcaagagatatgccgaacagagcaccacatatattcgctcagacaacgccttcttaaccgagcagtgagcaatctgaacagcacgccaacacttagaaatttcatcttttgcattatcagtcaccgaagaaatccatacaattttgggatcttatcacaaagatatggcaagctgtccggatcccttgattagtgtattttgtatttaatatgcaatcttttcaattatatctattgtaatcagaagggaaattcttccctctcaagcttatagccctataaatagtgattcatactcactgggcaaagggtcgaaaaacttgtctaagaattcatattcagagatactattataagagctctaagaaaagggattatattccttgttcttgtgtcaatacaaaccaagaggattaggctattaccgaaatgctcgaggctgaacctctataaaattcttaagtctttatttacttcggtatattacatacacattatactacttgtcgctcacaatttagactcactgtcgttggccaaaagcgaggtcaacattttggtgctttcattgagagcaaaatcaaggatcgctctttatttcaaatctagtcgcaaatacaatggtggtacagcctcgtagaggcgtggttgatcccgtaaatccacaaacagtaaatccagcactgcaaaacctaggaaacacaagggttccaccaccacgaatcctgaacatccatcaattgtaggtcacggtgtcacaagtcgtgtgagtgaaatcgcgcttggtgtgcaagagattgggaataccagttcaacagctaatcagggcattcccaacctccgtgctgctcttagagtcatgcaatgtcataccaacaccctacatcatgatcaggaggaactccacgctgtggtgaatctcacatttgaagagtagaggcacatgttcattgaatgaagggataaagaaatggaaacgttgagggctcagcaagtagccattgacgactaaacctggcaggccactgtgttaatacgaaaagcctattagactaccggacaatagtctgttaccatcattcccttaggcaagacaaacaatgatccagtggtgaacacctctcagactataaatggtcatccatccaatcctcggtcataggtcccacttgtgggccaagtggtacgcgggcaaaccttgtccagcaattcatgaggagaagtcatacctaataattccaaccaagttaatggtgccagccagctaattggccaaaaaaacccatcattgagacaaccatgtgtttctatatttaatcgattgggaacaattcatgatcttagagatgatttaaatagaaggagaggattggacgaccagcatgatgcaccaatcgtacagcccaggatacgtgctcaaaatcccgctcaaagagatgttgacgtgactctggtcggccaagaggctgaacaagttaatctagccgtgcagggacagttggatgaactaaaaaatatgttcgaaggcttggccggtcagaggaacaatgacctcgagttggaccgagcacgtggatcccctttctccgtagagattaatgtcttagaattgccccacaagtttaagatgccaaccttgaaaatgtaaactgggaaggaagatcccttatctcacctcaagtattttgaaatacaaatagaccggcagggagcacgaggagatgtatgttgcagagtttttcctaccaccctctcagaggccgcccaacaatggtatttcaagttggtgctcagaaagttcaactcatggaaggctttctcctcgaaatttcatgcacaattctcctcttcttgccaacttctgttgcacttagaagatctggtcgaagtgaagcaaagaccaagagaacctctccgagcctacatcagcagattcatgatggaggcaactaaggttgcacgggtgaccgaagacagacatatgtccgtgaaactggggggcattaaagttcttggagaactttggaaggacatcgaaagaatggactagtagattctatgagtgacttccttgatcacgcagaaggtttcattaagcttgaagaagccattcagcaggcagaagttgagtaaaaacctagccagtaaaaagctccctctgctgggatatcctccagctcccccaatacccaagcaattcaagctcgggtggtaaacggtccaacaacaacaataagcaaggaaatgggaaaaacggaaagtatgctcgtaaaatcgaacaagctcccacggagaatcctaccaagtttactgtattttctgtcttgacagaagatatagaaagcatgtacatggctactcaatcattagccttgtacaagaagcctgcacccatgaaaaaatatgtaagcaagagagacatgaccaagttttgccgttttcacggagattatggccatgacaccaatgaatgcaacaaccttaagcgagaaattgaatttttgataaggaaaagtaatctagacgtacagaagtatgtcaaggccgatcaaaatcaaaaggggtgataacaaccaagatttactacc

SEQ ID NO: 220034 - DNA, 4049 bp, Cannabis indica
cccccaacgatcctcagaacccagaggacgaagaagcagcctcacgagtaaacgtggatttaaagagcgagacgaatcaaatgacgaggaatacgaagaaaaccaagaaaggtatgatgcttagaggctattttctcttgaatttcttcatgaaatttttgtgcttcttggtgttgagaatatgtccatacatatcaaaacaatactcagtacaatgaggaagactatgtagttcaatcgtcattagaagaagaatgcacgttcaaatcttgatcatactctgcaacagaaaggatcaagggttagagatctgaacggaaggagtcatattattattctgccatcactgtaagtattacttaatccctaaggtgtttatttattatttttaggaatttcatatttaggatgttagattatagaattataatcaacatacatgttagtaaatctagatcttagtaaaataagtttccaacagtgtcgatctcctattcacttggatgaactggagaaagaaagtatttggatcctgagttagttaaaaagaccagggaggccatcgaaaagaccaaggcatgaatgcttacttcccagagtaggcaaaagagttatgcggatcctaagtgccgagacatagagtttcaggttggagaacatgttttcctacaaatatcaccaatgaagggtgtaaaatgcttcagaaagaggggcaagttacgtcctaggttcatagggccatttgaaattctcgagaaagttggacaagtagcatatcagctagctttacctctagcattgttagtagtgcataatgtttttcatgtatcaatgttgagaaagtatgcgcctgatccaactcatgtcttgagttatgatgccctagagttggcaccagatctatcgtatgaggagcgaccagttcagttccttaataggaaggacaaagttttactacacaagactatatcattagtcaatgtactctagaagaatagcaaggtggaagaggccacctgggagttagagtttgaaatgaggactcaatatccatatttattcaggttagatttcagagacaaaatccttttatcggggataattctaatgattgttatacttagacatgagattagtgaaacattattactaatcaatctgattatgtgattatatatattttttgcattctaaaccatatttttatgaaaatagatgttatgattgttattttttaattttagagatttaattaaattataggtgtgatatgtatgctatatgtgaattttcatattttcacatttttgtgcccagtaatagtggaaatgggtcagatggcaatttgagtcacatggatacaaatttgtatcaagtactttatagggaactattattgtacatcttataatattgggatttaacgaaataacaaaattggactattttacccctagggttacgagataacttagcagggaagtaagggcatttcagtctttttgccctaagtgattagtcaccttttttttgaagcttttatatggctgtgacccaccatttattggtggccagcagcttaaggagaaacacaaaaaggaaaaggaaaaggaaaaaccaaaaccaaaactaaaaaccaaattcaaaggaagaaagaaaaagttaaagtttaccttttcttctccctcaactttgtctctaccacaaccaaagaaaaacccagtattttccaccattttcaagcctctccatagctggaattcatcaaggtattcagcccttagcttctccatgtaatccaaggtaaacccaagctcatttttatggttttctagggtttttgtttgttttcagtagttatttttagttcaacctattaaggaagtttaggaaggttagtaaaagcttcttaagtttattgaggactgtttagaagtgttttaatgtgttttgggtggttgtagaaaaaattatgcaagtttgagttcaaagaactcaaacttgacttggttgtgataatttagtttttgttgagaatttaattaaggttccttcatcaaaaatgttcattatgatgcttctaggtaccttgcaaaatttggaaaggtttagcttagaattaaatgagttatgaaagttttaaattgggtttggaccgtccaataggcataatttaggggtccatttttttaaacgacctgtttgttttgagacttttcccaagaccccgacaaattgttttcttgatacttaggttattgccttgatatatattgataaggaaacttttagttttgaatttaagtccccaaaagtgttagggcaatacttattggttttacctagaattgtgacttagggcctccgattatcaatagctatttccactcacattgaccggcacacctaaaatctaaattgaggtaagaatagcataacatacatacatatgtacttgtttatgtttaccagatgtatgccatatcagttagaacgataattagtgtatgtatgattgcatcatgatatcgtgaatatatgtgtttggcaattcagaaagtatgaacccatgctaccaacactagtacgccagagtactgattgcatgtggtattatggttggttatacttccaaaagtatgaactagtactaccaacattagtacatcagagtactgagtgcatgtggtattatggctacttgtacttatagtatggattaatgctaccaaaactagtaagactacaatactaaatgcatgtggtattatggtcaatcatactatggtgaagaacattcaagactcaattatacgtgtttgacatggtttatgacttgttgataggtgtattggcacttagccgcaagtcgattatatgttatgttttatgagttttcttactgagtcttttgactcgcagatgctatgttatgtgttggtaaaggcaaagttgttgatgaacagctgtgagtttagatctagatgaagattgtatatatgacctagagtgttagatctttgggacaactagggctcatgattttgtaatcgctgtgcgacatctcttgattatgtatagttgaaaaatgtagatatgggatcccaaagtttataaatgtaatacaatttatgtttatttattaaagtttaaattttatcactttttgataaaccctttgattagcaaaggttgcatagcaattaagaaaatcacagtagcatgcttaaactagtagggtgttacatgaggagtctttttggtaaccatttttccagtaaacaccatggttacagtagcactatgggtttagaacataacaataataaagaagattgagatttttacgtgatttaggcgttaatgagccttagtttacgagtcattctattagccttagaaggcgtatatgatgtttttacagaatctttgcgagaaaatcctaactctgtactctgtgtttctcttgaagaagaggaaatcttagagtaatttcagtagagcttcggctatctaggttgtgatcctccctatgtatgaaaataaatgggtattgttaagccagaaaattagcacttttaatttttgggactattcccctaagggaaaagtgacacgcgagagtgcgccaagttggcctacttgcccaatgcatatttctcaaaggcagtatttcgaatgttgggatacgtctgtacaatcacaaaagttaccccgtgaatcccgcaaaggtgcatgtgtgcatatatggaggacccacgtgcaagcccccgtgggggcttcgaggcaagctgagccttaagcgggcaaaggtggcacaagagtgtggaggcttgcatgcgagcccatggggggctcgcatacaagccatgtgtccaatgagggggtgtgttgcgtggatgtgtgagcatggggggctcggcatgcgagccatgtgtgcgagtggggggcagttacgtgtgtgtgtgagcgtggggtctcgcatgcgagccgtgtgtccaagtagggggagtggtgagccatttaaatgtcaattctaactatttaat

SEQ ID NO: 220035 - DNA, 2428 bp, Cannabis indica
aaaaccttcaaggcaccacaggatcaggttgtattcggctgaaattctttcagctcatcccatagggatttgagtttcgtgaagtatgtagtgacggaattgtcaccttgttgcaaccgagtgagttgcgtttgaagttggaagattcgaggagcattgccctcattgaatctttcagctaagtcttgccacatatcagtagctaggtcaaagtacataatactttgagcgatttcagcagagacggaattgacgagccaggacataaccatattgttacaacgaagccaagaagggagaagagagttaccagattctggcggagggagtgagccatctatgaatgcaattttgttcttcgcagccaaggccatggtgattctccttttccaagattgataattgatccccgtgagtactgtcgaaaccaaaaccagaccaggatggtcaccggaactgaggaagaaagggctggaatcttcatgaacatggcgatcttgaagagaagtggatcggctgttgagaatcgggttgtcttcggttcttggagacggatcttcgtgaacagctgtatgatttggaggtcgagtcctggttgtaggtcgtcgagaagtcgccattggatctgctgtgggagcggaagtaacctcagcaggagggtctgaggagttattctcaggtggaggatgaaggagtccatacctgagatcttgtggaaggccttgccattgaaatgggcaggggtaacttctgataccatatgagaaggccttaagctttgtaacagagaaaacagagtgaaaaggaaaagaataatctgttgtatattggttgagctgaattacaagcttttatataggcaaaggtacaattagacatgtgctaataaaataaacaacttggcaaggtaattaacagaaaaataattgattacaaatcagttagaataactaattaacaaaccttaaaaaactaccttacaaaaaaaaaaaaattataccccctttaaatcttgagttgccatataattattaaatatttgcagcacaaaatggtcaacatccagccaacgtataatatcatggctagttcaaggttctgttcttgatatggtttagaagaattttgaaatcaaaatgttcatgcgattttcccaaaatgaaaaccaaaccattgtactaattaaaaaatcaaagcaaatcaattcattgaagaatagtaaaattattgaaattgaatttttttaattattattataaaattagaaaataattcgcgcttctcgtgcgattatttataatttttttaaattatatataaaaaattatattttaaacttcaacaatacaaaggttaattttaaacgcatgatccactcaattgtttgatttttttattattatctaagcacatggacacacaaaagaaaatgataaataagagtacaaatatgaaagctttcaacttttagtaatctccattattattatttcaagttaatgaaaaagtaagtaaattatttgaacagtataaatattttaaaataaatattttgaagattatattttgtcaaaatattaaaattatttataaataatctaaaatatatatttaaaaatttatgttctgggtaaagattaacactgaactttaacttttaaaagtaaatttcggacatcgtggataaactttttatattttaaaaatcatgtgatgttcaattggaccttttacttttaaaatttttttaatatgcaatatgtagagaaaacttgtattatagttggatataaatataaaaaaattaataatttgaacacttaggtttttaaaattctttaatatgcaatatgtagagaaaacttgtattataattggatacaaatattaaaaaaaaaattaataatttaaacatacaaaggtgaatataagtattgatagtaatcgagaattaacacaagacataatgatagaaaattaacacacaacatgaaaaatattaataaaaaaataatattaaaaataaagaatatatgtgcgtatgtctaatttgtggaaattttttcttaagaaactcataacgaatacacaaataatataggaataattacataaggcactattttttgtaaaatatttacatttttacgttcaaagaatgttttttttttatatttttacggttttctaaaaaataatacgaaaataacataaaatcaacaagaaaactacataaaagtaacatcaaaataacaaaagaaaaatagcatacatataacaaaaaatcaacaataaattaacaagattacaacataaaaatactgtataatctgtaaataaaatcaaaataatcgtaaaaatgttcaaaattccgtgaaactgtatttttgtaaattttttgttgtttctatgttttcgtgaaataatc

SEQ ID NO: 220036 - DNA, 10387 bp, Cannabis indica
gttattataatttatttattgttactattttatttttcaatttttattaacgttattacttaatctatattataacagttaattcaagcaaagatgttattagcccaagataaaaaatacgacaaagattttaaatttgatcatgtgtggcatatcttcaaaagtattcagaagttttcaaatgatgacaacattaatgcaccacgtagattctaacatgaaggtcttagtttcacttcatccagatcatcgtcttacaattttgagtctccaatatcagcatccactggtatgagtttatttaatccaaacatgaacaatgaggaaatcaatacttatcgaacaaatagaccatgtggtgtgaaaaaaacaaaggaaaaataattaggtaatgatcaattccacaaactaatagaacaacataaaaaactcattcaaggtattgaaaaaagtaacaaggatagaaatgaacgtcccagaaaaaaggataaccaaaaaattttattcacagatttgaattctatatccgatctagagtttcatcagtacattcaaaacgaagaaagacgaatttacaatgaaagagcataaacatttgaaattggagaacaaggagaaggatctcaatatcagggatattcatatcagtgatttcaatattagggatcacaatatgagggatcacaatatcgagcatctcaatatttgggacatggcgttgaagatgaaggccaacgatctcaagatcaaggtgaaagagctgaaaatgactcacaagtttatagtccatattatgtctctctcggtggatcacgaaatagtcttatatattatctcattttatttctgaaagttcatatgtacggtattattttgccttttaatgtgtttggtgtatttaattttaatttttaaatgtatgtttaagtttgtaatgcttttattatatactattgactgtgctttaattttatattgttctgtgacatcatatttttattaaccaagatttcacatactttatattacataataaaacattataaaattaaaggacagtcaatagtacataataaaagcattacaaaattaaacatacatttaaaaattaaaattaaacacactaaacacattaaacgacaaaataataacatagatatgaactttcagagataaaatgagatacaacaatttaataatatgtaagactatttcttaatccgccgagagagacataatatagactataaacttgtgagttatttttagctctttcaccttgatcttgagattgttggccttcatcttcaacgccatgtcccgaatattaagatgctcgatattgtgatccctcatattgagattcttttccttgttctctaactttggatgtttgtgctctttcattgtttttcgctttgaatgtactgacgaaactctatatcggatatagaataaaatccgtgaataaaattttttggtcaaccttttttctctgatgttcatttttatccttgttactctattcaatacttgaatgagttctttattttgttctattagtttgttgaattgcttattatctaattgtttttcttttgctcttttcataccacttggtctttctgttggagaagtattgattttctcattgttcatgtttagatcagttgtcacagggacaaatttcactccccaaatttcccttgcgatggcctagattaccacaatctagtcagccaacacaactcacaaatcgcacacacgcccactcacttgttcgagtttgcccagcacacactcaatagcacgccccttattatcaagtaaaacaacacaaagcacactttacaggaaacactcccaacctttattattaccacaataatacaaggatacaatatgttgcactggacaccacaacccgtagttggtgcctcaagtgcctgctgcctactattcataacccatgaaagggtacggttgacacccccaatcgttaggcaactctgaggctgcggacatgttgcttcaccaagcaacacacccgtgtagcaaggctgcaccctgccgaagcatcgcatccgctcctttcacgaatgtacgaaccaacgcgtcccgtcgaatcgttgcatctaccacccagcagttgttcgctaaccgatgcgcttgttcctcccaggctctagccgaagccttgcacctgtttcctcaatagatgcgcgcactcaccctgatgcgcacgtcagtcagctcgccgcccagctcgctcgagcaatgtccaagcccgcgcgcgcggacctgagtaggggtctcacaaaccacccccaccagaagaagtcgacgtcctcgtcgacacacttctgaggtattcgttcaacttgtcttcgaattgccacaagttgatggctttttcccacgaagcttctgcctcgctttcgccttcccaaaccaaatactccgtccttcggtttttcttgctaggtcccaatatacgatgatccaggacttttgccaatttcttcccaaattgcatccgaacagtaggaggtgctctcacgcactattgtcttccttcttctgagttgtcttcatgaaatttcttcaggaaactcacatgaaaagttggatgcaccttgaagcgctctggcagcttcaatttgtatgcgaccgcacccactttctgaacaatctcgaagggaccatcatacttctgtactagccctttgtggcagcgtttgtcagtgattatcttccaaatctggggtgtaagcttcagcattactttgtccccgactgacatctctaagtctcgcctatgcttgtcagcgtatttcttcatgcgcctctgagcttttgttaggctatccctgggaagttccaacaactcgatctttcctcgcaaaccgatatgctgcagggcatattccttgagacttttgttttgcaacttcatgtggtgtgagcggctgtctgccaaagactatctccgctggactcatccctatggcagaggattgttggatgttttagcaaaactgtgctgtgtcaagcaactccacccaattcctctgacttgctgttacataatgctgtaggtattcctcaagcaactggttcatgcgctcagtctgtccatcagtctgaggatgattagctgttgaaaattttaaatctgagcccaataaattgaatagcgcggtccaaaacttccctgtaaatcttgaatcacggtcactgattatgtccttgggcaatccgaaatacttcacgacattttgcacgatcaactccgcagccacctccgcgggacatgcgtttggggcaggaatgaacaccctatactttgagaatcggtctaccaccaccaagatagacctgcatcccttcacgtcttgaaatcctaccctatactcgacatcctgatccatcttcggccacaccttccttagtatactaatccggatgcaccagttgtcacagggacaaatttcactccccaaatttccccttcgatggcctagactaccacaatctagtcagccaacacaacacacaaatcgcacacacgcccactcacttgttcgagtttgcccagcacaatgtcaatagcacgccccttactatcaagtaaaacaacacaaagcacactttacaggaaacactcccaacctttattattaccacaataatacaaggaatcaatatgttgcactggacaccacaacccgtagttggtgcctcaagtgcctgctgcctactatttataacccatgaaagggtacggttaacacccccaaccgttaggcaactattaggctgcggacatgttgcttcaccaagcaacacacccgtgtagcaaggctgcaccctgccgaagcatcacatccgctcctaccacgaatgtatgaaccaacgcgtcccatcgaaccgttgcatctgccacccaacagctgttcgctaaccgatgcgcctgttcctcccaggctctggccgaagccttgcacctgttccctcaacagatgcgcgcactcaccctgatgcgcacgtcgctcagctcgctgcccagttcgctcgagcaatgcccaggcccccgcttgcggaccctagtaggggtctcacaaaccagcccaccagaagaagtcgacgtcctcgtcgacacacttctgaggtattcgttcaacttgatttcgaattgccacaagttgacggctttttcccacgaagcttctgcctcgctttcgccttcccacaaaaccaaatactccgtccttcggtttttcttgctagctcccagtatacgatgatccaggactttcgccaatttcttcccaaattgcatccgaacagtaggaggtgctctcacgccctgtggcagatgactgttggatgttgtaacaaaactgtgctgtgtctagcaactctacccaattcctctgacttcctgttacataatgccgtaggtattcctcgagcaacaggttcatgcgcttagtctgtccatcagtttgaggatgattagttgttgaaaattgtaaatctgagcccaataagttgaacaacgtggtcaaaaacttccctgtaaatcttgaatcacggtcactaattatgtcctcgggcaatcgaaaatacttcacgatattttgcataatcaactacgcagccacctccgtgggacatgtgtttggggcaggaatgaacaccccatactttgagaatcgatctaccaccaccaagatagacctgcatcctgtcacgtttggaaatcccactatgaaatccatactaattgactgccacggcttctcaggtatgggcagggttgcaacagctctacttcctgccttcgctcagtcttatcctgttggcataccatgcacgtcttgacatagaactcgacatcctgatccattttcaaccacacataagattttgatagcaacgccatcattctggccacacccggatgaccagcccactgagggtcgtgggtttctctgagtagttccttgcgcaaaccaccacagctaggtactaacaatctgccacccttggcataaagaagtccatcctcttcccagtacctcttcaattcaccctctttcgcttcaccctaaagctttttgtaaacgagaacgagcactgattgctccctcacccggtcgagaaaggttgtgctcacctgagacaacgccccaacaaaggcctgtacttgtttgcgattaagagcaatcgccacttgattctatgtgtggccgaagatggatcaggatgtcaaaatggatgagcatccgccacttaattctttgcgatttctctttatactaaggaaggaaccggtgcgttcggatcttcacaaccatccagcaagaggggtgttggatgctttgtctgtcacggtcctcatttgatgagggactgcccgaatatgaaggagaaaatcaacgcaatgttgtcacaagagggccaaaatggtggtgattccgagtcaacacctcggatgaacccaatgcaacttctgaatgcaatgactacggtgaagtcaagtcccttcaaaggctcgatgtatgtcaaggcattcgtgaatgggaaagaagtgcgggctatggtggactccggggccacaaacaactttgttgcctcgagcgttgcttacagactcggtcttgaagttgttcaaagttcgaccaaattgaaagcagtgaactccgaggcgaaacagatccagggtactgctaaggtgaaaatgcaggttggggcgtgggtgttgcacgcaaacctcatggtggtatcactggacgatttcgagatgattctaggcatagaatttttgagtgcagccaaggcaatggttgcaccgcacctgcgtggtgtgatgatctgtgacgaagagtgtccgtgcttcgtggaggcactaccttctgtccagagtcatggaaaagacgttgagttggcgacagcaaaacagttcgggaactccataagaaagaaggggaatcaatcttatgtggcaacgctagtggaaataaagccaggcgagatggtagaggtgcccgatccatttgctgagttgctgagggaatttgccgacacaatgcctgatgaattaccgaaagaactccctcccaggagggtgattgatcacagaatcgagttggaaccaggggcggttttgccggctaaagctccatacaagatgggaccacgtgagttagaggaactcaggaggcaattaaacgagatggtggatagtggatgccccagttttattccaaaggaaggcagatggttctttgcggatgtgtgtggactatcgcgcattgaacaaggtgacggtcaagaacaaatacccagttccaaatgctgcggatttgttcgataggcttacgaaggcgtcctacttcactaagttggatctccggttaggatattggcaggttcgcatagcagtgggcgacgaatctgagacaacttgtgtgacaaggtacggttcttttgaaatccttgtgatgcctttcgttctaactaatgcacaggctacaatttgcaatcttatgaatgaagtcttgtacgagtatttggatcgattcgttgttgtatatatcgtgatatatagtaattcattggaagagcactcgctacatctgagggaggtgttagctaagttgcgaaaagagaagctgtacatcaagaaggaaaaatgcgagttctgtagacaagaagtaaaattcttgggccattgggttggtcaaggcaaactgagaatggatgaaggcaaagttaaggcgattatggagtggcccgttccaaagaaggtggctgagttgcggtcgttccttgggctggctaactactatagaaagttcatcaaggggtactctaagaaagtgagtgcattgacggacttactcaagaaggaccagaaatcaaactccgccaaatactctggccaacgagcctgctttagagttaactttttctgagacttgaaataagtattggcaatattgtcggtcaccaccatatatttcgtacccagcaaatagtgcctccaaacatccaaacaatgcaccacaacgaccatctccttctcgtgggccgagtaaactttgctgatcgtaccttcaactttcgactctcgaaagcaattggatgcccatcttgcactagtactcccccgagtgcacggtcacttgtcttcatgaaatttcttcaggaaactcatatgaaaagtttgatgtaccttgaagcgctctggcagcttcaatttgtatgcgaccgcaccaattttctgaacaatctcgaagggaccatcacacttctggactagccctttgtggtagcctttttcagtgattttcttccaaatctggggtgtaagcttcagcatcactttgtccccaactgacatttctaagtctcgcaatgcactcactttcttagggtaccccttgatgaactttctatagtagttagccagcccaaggaacgaccgccactcagccaccttctttggaacgggccactccataatcgccttaactttgccttcatcaattctcagttttccttgaccaacccaatggcccaagaattttacttcttgtctacataactcgcatttttccttcttgatgtaaacttctcttttcgcaacttggctaacacctccctcagatgtagcgagtgctcttccaatgaattactatatatcacgatatcatccagatatacaacaatgaatcgatccaaatacacgtacacgacatcattcataagattgcaaaatgtagccggtgcattagttagaccggaaggcatcacaaggatttcaaaagacccgtaccttgtcacacaagttgtcttagattcgtcccctactgctatgcgaacttgccaatatcctgaccggaggtccaacttagtgaagtaggacgccttcgtaagcctatcgaacaaatccgcaacatttggaactgggtatttgttcttcactgtcaccttgttcagtgcgcaatagtccacacacatccgcaaagaaccatctgccttcttttggaataaaattggggcaccgttgggggctttggatggctgaataaacccactatccaccatctcgtttaattgcctcctgagttcctctaactctcgtggtcccatcttgtatggagctttagccggcaaaaccgcccctggttccaactcgattctgtgatcaatcgccctcttgggagggagttctttcggtaattcatcaggcattgtgttggcaaattccctcagcaactcagcaaacggatcgggcacctctaccatctgggctggctttatttccactagcgctgccacataagattgattccccttctttcttatggagttcctgaactgtgttgctgtcaccaactcaacgtcttttccatgactctggacataaggtagtgcctccacgaagcacggacactcttcgtcacagatcatcacaccacgcaggtgcggtgcaaccattgccttggccgcacccaagaattctatgcctagaatcatctcgaaatcgtccagtgataccaccatgagtttgcgtgcgacacccacgctccaacctgcattttcaccttagcagtaccctggatccgtttcgcctcggagttcactgccttcaatttggtcgaactttgaacaacttcaagaccgagtctgttagcaacactcgaggcaacaaacttgtttgtggccccggagtccaccatagcccgcacttctttcccattcacgaactcccttacatacatcaagcctttgaagggacttgacttcaccgtagtcattgcattcagaagttgcattgggttcatccgaggtgttgactcggaatcacctccattttggccctcttctgtcaacattgcgttgattttctccttcatattcggacagtccctcatcaaatgaggaccgtgacagacaaagcatccaacacccctcttgctggatggttgcgaagatccggacgcaccggtgccttccttagtataaagagaaatcacaaagaattaagtggcagatgctcatccattatgacatcctgatccatcttcggccacacatagaatcaagtggcggatgctcttaatcgcaaagaagtacaggcctttgttggggcgttgtctcatgtgagcacaacctttctcgaccgggtgagggagcagtcagtgctcgatcctgtttacaaaaagctttagggtgaagcgaaagagggtgaattgaagaggtattgggaagaggatggacttgtctatgccaagggcggcagattgttagtacctagctgtggtggtttgcgcaaggaactactcagagaaacccacgaccctcagtgggctggtcatccgggtgtggccagaatgatggcgttgctttcaaaatcctatgtgtggttgaaaatggatcaggatgtcgagttctatgtcaagacgtgcctggtatgccaacaggataagactgagcggaggcaggaagtagggctgttgcaacccctgcccatacctgagaagccgtggcagtcaattagtatggatttcatagtgggatttccaaacgtgacgggatgcatgtctatcttggtggtggtagactgattctcaaagtatggggtgttcattcctgccccaaacacatgtcccgcggaggtggctgcggagttgattctgcaaaatgtcgtgaagtatttcggattgcccgaggacataattagtgaccgtgattcaagatttacagggaagtttttgaccacgctgttcaacttattgggatcagatttacaattttcaacaactaatcatcctcaaactgatggacagactgagcgcatgaaccagttgctcgaggaatacctacggcattatgtaacagcaagtcagagtaattgggtggagttgcttgacatagcacagttttgttacaacatccaacagtcctctgccacagggatgagtctggcggagatagtctttggtagacagccgcttacaccacatgaagttgcaaaacaaaagtctcaaggaatatgccctgcagcatatcggtttgcgagggacaagactgagttgttggaacttgccagggatagcctaacaaaagctcagaggcacatgaagaaatacgctgacaagcataggcgagacttagaaatgtcagttggggacaaagtgatgctgaagcttacaccccagatttggaagaaaatcaccgacaaacgctaccacaaaggcctagtccagaagtatgatggtcccttcgagattgttcagaaagttggtgcggtcgcatacaaattgaagctgccagagtgctttaaggtacatccaacttttcatgtgagttt

SEQ ID NO: 220037 - DNA, 4486 bp, Cannabis indica
tttgtcataatccattttaaaaaacgcatgtcctctgattttggcggttttgtgattttgaggtacattaacatttaatgaccatcctttctacttctatttcaaattctacacgcaggatcaagtatctccctgatttaacggaaattaacccaagagtataaaatagaaaaaaggaaccacctttgcaccatctcttccattttagaaactctgagaattttctaagcttctccatcaaaaaaccattactagatttgctcaaaaatttacatgccatttttgtccttaacattttttctacgaatttcatctgatttaattttcgacttcaagcactcgaagagatcttcacgacatttagtgattcacagattacacagccgttcatcgtcccacatcctaacttcaaacattaagtggcttttctctttaatatctcacatgcttattatgttgtatttctggatttaattactatcttctgggttagcatcggtgttatctcatttggttttagcagtttttagggccgaattatatctgggtaaatattagggtttagacagtacataggttttctagaatctccaatttaccaacttctagtttgataaatttcttccaggaattgggattgctttctccttgtagcaatgtcccaatttggttcagaagtttatcgtctagaagatttggaaattgaataccctattgagattgccatccctcacaaacccaagatttcagaaccccaatccaaattagagataaatgatgcaagaattagacaaaacttagtgaaaattcaccaggaagagattgctagtcgccacagacacttcttgcaagaaactactaaaggcaaacgccgtttcttgcgagatgatgctttgcctgaacctttcagtgtgtcttctattccttttgctaaacctctatttttacccaaggtcacaattgcttgtaaaccaggtgacttgaattttgaaataatgtctcaagccaggtaaatcaaagactctccaggatcctaacgtcaccttcgaggtaaaattaatagagtcgagggtgcaaactatctcgggttacgtaggcgactcactaaggacctgaggcattgagtataggcgagactgccgggttagatcagtacaaaccagaaaatttagttattacccacatgtgcgtcttacaagcgagatctctgaggggaacagtggtgagaccagtacaagtggcttgactagtataggcacttggagccttgagcacataggccaggggcaataatcccccttcgtgattatttcaaggactttataaaccaccttaggctttcccatttcaactgaatcccgtctcctacagaatcctagcaagtttgagggttctgtacaaaatcctgaattgggagtaccccactcccttggaaatagagtatctttactccgttaaagttgttccaacgaggaagaatgccgcatgaggcttttacgatctcggcactcactccggtgagcacaaaatcatcgtggatttgccaaacaaaacatccttcaaggacaacttcttttggacgaccgacctctccccaattggcacaaacactttccttataattcgtaagtgattgtttgcattacacttggttaaattaacccatgtctttttattctaagttatctgactaaaattttgttttatgttcgagaactatcttcaaaaaggcctgcccccactcctgagacggtcgagtgacacatgctcttgttaactctttctcttacggccttaggtcatgtgcttttcttctaaatgaggtaaatctgaggtctgtggacctcctgactgacaaggagtttacttgtgattacaagtgtcccaagtattcttcttggcaacaggttcctatcccaaacgaggagaaagctcgggatcacgtggctcgggcatggtgccttcagaacactgcccctagagaagccagtgaaggagcatcccgaggtaatcaatgtggttggtcacccacattgtttagggctgagcgtaacactctagttacattccaagatagtcgctttaacttttatatttggcaccccctcctcgtagatcatataaaacatagctttagttggtatcccagattccatgtccaaattagctataatgagtcgtactacggtatagccgagcaacatgggaccatgacaaatagggcaagtcacctgaacgcgagttgggatttagaaccagttgatccctttgatatattcaagatcactggttgtagggattttagtggatactatgttccttctaccccatcttctagtgatacctcatcttctagcgactacggtaaattccttaggcggaaaattataccctaaactcccctttcactggtatttaattaatgctaatacttttaccttgtctcgcaaaaattcacttcgaggacctaatgtagaggaaagggaagaagaggatgaccaattcggaggctccttcagatgtcgaagtggagcccctttaaaggaagaggaaaaccactagtagcaagaagaaggcctcccaaagcgtttacctcaaggtccctgaggccaaaatccaggatccgattcctcctctagtctttgcaagtaccggcgaccctctccttaaagcaactcacgcctctgcctctttgagccaagccattgaaacactacctgccgaggcaggaaagactggctcagaattcacccaggagtttggagctgcttcctggcgccagttcaaggctctccttccccatgattgggatttactcaatcatggggatttggaaggaatgcttacgaggggcttgtctcatatcctcttggtaagtttctttgtcctaatctactcacttcttgtatttttcttctccttcctccttgtttttttatacattttcgtttgtgaatctcgaggcttctttcatctattttgtcgcccagcagcgaggcttagaaaagattaaatacttggagagcgaggtccaaatttcactaggccaacatgaggtcatggtcaagaaatggaatgatgctcaactggaaattactcgcctcactaaagaagccgagcggatgaagaagagccttaaagatgtcgagaaggtgacaaaggccaaaatcaatgaatgcgagaagctcaaaggagaacttgaggggaaagagaccgaaacccaagaacgatgcaacaaagttggccttcgtaccctttatcgagcctggatgacaaatccaaacatggacacgagtttcttggacgaagaggaggaggaaattcttgctttctacgagaagactaggaaggaggaggaagaggccgaggcagtagaagaagaagatctgtccaagtctcctactatgtaggcttggttttttatttatttttactttgtttaaggaaatggccctaagaccgagacaatggtttgccccttgcagcaccttttttctttttgtaaagataaatttgcaaggttgggcgaccaactttgcttttacctttattaaatgcttcatatttttatacttgaacttcaatatatacttgtttgttttcatttttattcacaatttaaacaattatagtttaaataaatgcaaaatactttaggcctttcgattgctcatattttcctctaataatatgtaagtacttagtagtctactatatgcgcgagcagtttattatcttccatgcttttaatttgcgaccagttatcaattctgcctcgcaataacagttataatctatttcatgcaaacttgaatatacttttaatgattatcactttttgtatttttgattgcttatatgaatagttagatcgtctattcatacactaggtttaagtacttttttgaagacaccttgatgtctcgtttaatactttcctatacaatgcgagccattagtattcagcttcacatgtaagttatgagttatatctcatttataacttttgattttcctttctcgtcagacatgtttttaatcaaaaagttattcataatagtttgatcctcctttctcgtcagataggtttgatcaagaactttaaaaaatttcaaaaattttaaagtggtgggtttgcattatatcatgtatttctagataaattttgattaatcacacacatatacccctcaagtaattttaaagagtaacactttgtaattacttaaaaaaagaaatgattaactttattcataacggaatttcaaaatattacattagaaatgtgagttactgtaataccctagaattaatgaatagattagcaaaactctaattagataattataaataattgaggaattatattattatataattcagtatatgtgaattaatatgatttatttgattaattatatgttaagactctgttggtgagctaggggcattttcgtaattatgacccgagaagggtaaaatgatg

SEQ ID NO: 220038 - DNA, 2572 bp, Cannabis indica
agatcctggtaaaataattcccaacatatcatgcagcaatgtggtgtataaagtggcaaccaaggtcatatgtaatagatagaggaaggttcttcctgatcctattgcagagaaccaaggaggatttgtgcatggaagattcattgctcacaatgtgctggtatgccaagatctggtgagattatataggaggaacaatggtaaaccaagttgtatgatcaaaattgacttaagaaaggcctatgacactatagaatgggagttcttggaagagatgatgactgctctaggatttcctggtaagttcattaagctcattatggaatgcatatgcactcccaaattctctctgttgttgaatggctctatttgtggattcttcaatgcaaagagagggctaagacaaggtgatccgatgtctcccctcctctttatgttaggaatggagtatctatccagaatatttaccaaggtagggacctccacagggttcaaatttcatgataggtgtgcatccatcaaactgaatcatatgtgctttgctgatgacttgctagtcttctatcatggtgattatatatctgttttgcttctacttcaaggattgaaattgttctcagcttcatctggcccgcaaacaaatgagcagaagacaacaatctattgtgcaggaatgcaggaattggaaatcactagaatcattgaggcatccaattttaaaaggagtacacttccatttacataccttggtattcctatatcctcaaagaagatatctagagcagagtgacaagtagaataaagatgtggagcactaggaacttatcttatatgggaagagtaacactgattaactcagtgcttctagccatacatacgtattgggctcaaatctttatcctaccaaagaagcttttgaaggatatagaagctacttgtaggtcctttctctggaagagtacataagatggagcaggtcctggtttagtggcatgggactctgtttgcaggcccaaggcagcagggggtttaggctttcgaaatgtgcaacattggaacatggcagccttagggaggtatgtgtgggatatagctagtaaaaaagattgtctttttgtcaaatggattcacaatgtgtacatcaaggaacaagattggtggagctataatgctccctcggattgcagttgggcatggaggaaaatagtggctctcaagaacaaacttcagcaacaggtttcactaactagttttgttatgcagaaatacaagattcaacaaggatatcacttgttgtttgctgaatatgataaattgccttggagtaatcttgtttgggatcggcttgttgttcccaaccatagattcattctatggttggtactttgggaaagactaaatacaaaggagagactaagtaaattcatgattaccatggatggaaaatgtgttttctgcagcaaagaagaagagaccattgtacacttgttttttgagtgtgattagagccgaagctgtctgcatgagatgaaaaaattcctgcaatggaacacaccagccactaatattaaatagttgctgcaagcttgcgacaacacgaagagattttcaggagctaggaaaagtatggtgaagactgtacttgcaagcttggtgtactttgtttaaaaggcaaggaatgaggtgttatggaatcaacaacagtggcttgtcaataccacgatcaagaagtctcagcaagtaagtaagttttgaattaaagggctgcttcctaaaaaagctaaggatgaggataaagcatggattttaatgacttgaattgtttttaatgacttgtatagaacagaaatgtaaatgtattgatagcaaagtgtaaagattagtgatgtaatagtttgtttggagcaataaaattcttattcataaaaaaaaaacgtgatttttaatatactgtgcagctcgttgctaatcaacgagattaatgaaaaacgtgattaattaaaatttgcttatttaattaaaaacataaagtaatacatctataaaatctcgagatcccgttacaaaatatatttacaaaagtttgctattcatatacaaaagtcgcctagcgactactcagcaaaagccttgatgtcccaaagatcatacgctccaggcctaaccgccccgacatgtacaatcttcacctgcttgttctcaaggctcctcagctttagccttgcccttacctacacatgaaaatagcattgtgagtcgacagactcagtaagaaaagcataacataaaacatactaacatcctgggttataacctggcgctcatacacccgatcataaccctaatcccagtgtcccacgcggtactgagtctagaacgttcatacgacaatactatcaaccataatgtcagcattgatcattgtttcagccaacatacatttattagtaatcagtacagctctaagtatactattactgctatcaatgtaatctaacaggcataaatatcatgtatgataaatatgtaataacatatgcataacattatactaatcttacctcaattccga

SEQ ID NO: 220039 - DNA, 1853 bp, Cannabis indica
accccctgaatcccaacacgaacataccatcccagagatgaaaagtgtgctctgttccattatcactgtcatcatcgccctcagcaaaaatccatctattgaaatcaacaaagatgcctaggccatcaacatcacgattggatttgactacaattttcttgataaaatcttgatctcccaacgccagcctactatgccaagccccttcctctacgccataaatctctgtgcgtcttcccacactagacacaaaatcaacagtcatattgctcagacgtgaaagggttcgcaactgaattccaacaattctagtcttattcttgatgtactcatcaacacccgtgaacaagtcaaatgtagacttgggttcgattttgcctcgtgtaccaaactctggtgagtaatcgatcttgtattggatttgtggtgtgcccttggaaagggatggcaacggcggtatgatgacttctatggttggattgctatgaaaagtgtggaatattctctgaagtgtcaccaaatcttttgttgctaggaccgcgacctcattaagcttagggtcattgtatccgccataaaaatcgtagatagattgtatttcctcgatttggtcgatcagttggcatactttggagaattttcccaccaagccaagatctctaaatcccatgcccactaatttattccgatttgaggcaatggggttaaaaccgttgtgaacaccaacaacatgttcatacccagtcgtttcaaatgcaagaatcttgggtgctgagagtttcatgctcggaaacttgcgcgcaaactcaattatctcttcaaatttgggcaactcataactattttcatgtcccaaaatcatttggttgaatgaaatctttgttttaaaactctcaacaactcgattcactttcgcttgcaaaccaaaattgaccgagccgaatgtgaataatccattgcccttcagctccaactccaaattgtatctctcactttcggtttctgtgtgaaatgacaacactgcaatatattcccctccagttgtgatggaggaaacatatgcgtcaccatgatggaaaaagaagtctcttatgtcacttatcggaacaacaatatctgatgccaatctagcgcttgtctgagcctcccttccttccacttttcgagcatgcacaacgattgccaaagttgtctcagtggtattcagcttcattagaaacttcagcttctcattaattgatcccaatttgacattgatgtcaagcgattgtttgacgtcgattgtagtcatcagtgacttcacacccttgcaaagcgtgtaagtaacctcgctctgaacgccttcgatcttgctttctcctgtcactgcggtcgagtgacaggctccggtggtgctcgaatagccttggaagagtttgatcggcgtcatcacgacgtaattaattaaaagaagagtggtgattatgagagatgtttgaaccctttttttcacttttgtaagattgttttgctttgatttttaataaaaaccttaattgcatgctagctatctatttatggcagaagaaagatagaaatttacgtagaatataatataagcatatttggtgtccatagttcattggtggacaaggaatagtactttaattttgttttcaaatgtgtacatctgctttatcagatcctttaacaaattgtgttatataactaacttgttacataattaatatatcaatagcaatatgaactttaattacggcaagaacaatgactaaaaaatattaatttttaattataatataatttttttaattaaatattaattttaggcgcactaaaagttacttgtcgct

SEQ ID NO: 220040 - DNA, 5191 bp, Cannabis indica
ttagtcacaacaaatattgtgatgtttcacggaagttggtattggaagtaaatagttgcagccaagaaccaaattaaatgtctcacagatgtacatcagtttgctaaaaaaaatacaagatttcagctggctataacttgatttgtcctgtacggaatcgagttgcatggggtaatgaggtttgggggaggttcaacacacccaagcatagttttatactttggttggctgtgcaaaatcgcctcaagaccaaggaaagactgcagcgtttcaggttgcttaatgacccgacttgcagcctatgtatgatgcaggctgagacacatgatcatttatttttcaactgtcccttctctgaatattgcttacaacaggttaaaacatggctgtcatagggggcacgaaccattgacctttctcagctactcaaatggattcacaaggcaaaaatcagcaagtttagaaaaaatatgctcgctcatttgatgtattccatttggcatgctagaaatgaccaaatttagaatagtcatttagaaagtaaagaggcagttgtacaaagaatcaaaaatagtgttaaacatagaatagaattgttttggccaaaaaagattggccaacaagatagagattggttccatgcattctttgtaaaaaaaaaggggcagatgttgttcatgagatctttaacataaagatgctcttcattgtaattaattgtacaaagtgttgtggattaataataaacttgttgatttatctaaaatatatatattgtgactaaaaacacatttattcaccacaaattataattgttatgactaatacttttagccatgaacattttagtcacaacacaataatgaaaatttataattagccacaatttttttatctttgctcacaagctcacaaattttgttgtgattttttgtagtgttagagcaaactaaaaagcttgtctctgtctttgacctctgtttgggacctttcgaataatgtgtcattttctaatgttttgacatatttcaaaaaatccacaaattttctaatttggctttgtggcattcttccaaatgttactttcgaccctgtggactattaaggttgtttatgagacttacacttttcagacccaaacgtaagaataatgtattaaaaagagttctacaatgctaatgtgtggaaaaatttatcatacataagaagaatagaatactcctctcattgttaattagtttaagatgaaaccgactgcaccttaatcctaaattcaaataattcataataggattttgataaatagtaataattggtgtgtttgatgtgattaaatttatccaaaaaagaaactcatttttgttgtcccatcactacaaaaaataactacttatttagtgataattttttagtcacaatataaattattatgactaaatgtgacttttagtcacaacaaaaagttatttgtgactaaaatgtagtatttagatacaagttgtcactaatttagttttagtaaccacaagtatcgtgactaaaaatacatttaacaacaaattgtaatttttgtgactaatacttttagccacggatcttttagtgacaatataagaatgataatttataattagtcacaactatttaaattttagtcataagttttattaatgtgattaaaagtaaatttttttatagtgcatattacccatatataaataatttgcagaatttatattacatttaatatttactaaaaagtcttaaccctgtgataaaatttttgtatttgatatgtgttaaccaacctttattagcctaacagttctttattagttagttaataggttgttatcttttgtacagtcagcattaccttttatttctcacgtgctatagacttggtctatatatagtctacttgtttccttgtttttatatagcttttagcaccattttcggttctgtatttctctggttctgtaaaaggcttttagccattttttctctgttttaatacaaggcttctagccattttttctctttcatcagaatttttacattcttcatggtatcatcgtcactgactcacgtcaatggaatcttgcacctccgatcccctggccacgactgctcccgctgcaccaccaccgccggttcaatggaatccattttccaattcgttgtcttcctccctcacggtcaagcttgaccgcatcaactacctgtcatggaaatcccaggtagtaccaactgttattggtcatgaattagaccggattttgttctctgatattacccctacccccaatctcatcaatggcgcccccaatcctgaattcttgcactggaaaaagaaagatcagctccttctttcttggcttcgttcttcaatgtcggaaccgattcttgcatctgttgcttccttcaccacctccttctcggtttggagagcccttgaacaaaggttatccagccaaacaaaggctcgtctattacaactcaaaggggttttctctcgactccaaaaaggatctttgtctatcgctgaatatgtcgacaaagctcaggccaccgctgatgccttggcgattgctggctcgcctgtcactcctcaagatctggtgctgcaactattgaacggtcttggaccggaatttgaccccgttgtctccggaattacatcacgcagtgaccatctctcctttgaggaggttcaggctcttctcctctctcatgaaacaagattggaacaccacagtagtgtcacagatttttctctcaagatgcaagctaacttgagtatgaaccagtcaagaaatggaggcactaatggccacggtgctccccctaatcgcactcacggcaatccccatggacggttttttgggcgtggaaatggttcaaaattgctctgtcaagtgtgccttcgctttggacacacagcggctgtttgccactaccgcttcgacaagaattttgtcaccccaaagtatggtagttctccctcttctcaagcctttctaactgaaattgaatccacttatgatccacaggccttcaccactaccattcttcctgatatgggcgatgatgatctttggtatgtggacactggagctaccaaccatgttagctgtggaaaccccaatttggactcaatcactccctaccaaggcactgagacattagccgtgggaaatggtaagcaattaatcatttctcatattggtcaattgtctatcccttctccacattcctcctctttaaacttaaacaacatcttacatgtccctgctatgaagaaaaaacttgttagtgtttctcagctcactactgacaatgatgtctatcttgaatttcataaatcttgttgttttgttaaggacaaactaacagggacggtgcttcttaaagggagagccaaagatggtttatatcagcttggagaaacatccacttctgccattcagtttcaccttaccacccattctagtatagataaatcttgttgtaaatgttcttgtcattgtcattctaatgtacaaaaagattcttgtaattctcaagattttaataaaggcaatcaagatttttctgatgtttctccacaagcttattctgtttcaaagttcaatgatataaattgttggcactctaaattgggacatcctgctgagaacactttggctaaacttttacctcatatttcccacactggatctctcaaagcattacaattttgcaatgcttgtcatcaaggaaaaagccataaacttcgttttccattgtctaatagtcgggcaacccaacctttagcactaatccataccgatctgtggggtccctctcatattgtcttcaaagatggcttcaaatattatgttcacttccttgatgactatagtcgatattgttggatttttccattaacacacaaaaatcatgcttttgatgtgttcctcaagtttaaaagtcttgttgaaaaacaatttaacttgcctatcaaaagtgtccaagccgattggggggtgaatataggccttttgctcgctttcttgctgatcagggaatccatttccaacacccttgtcctaggacaagtgaacaaaatggtcgcgctgagcgcaaacaacgtcatatcacaaaaactggtctcactttgttagctcatgcgggtctcagtatggactactggtggtatgctatgtcttgtgctgtgttcactattaacagacttccaacaccggttcttggaaatgtgagtccatatgaatgtctatttggcacaaaactggattataatattctcaagtcttttggttgcagttgttttccacatttgagaccttataataatcataaacttgaattgagatcacaagagtgcatatttttggggtattcctcacatcacaaaggttatttgtgtgaacacccaagtggcaggatttatatctcaagaaatgtaacctttaatgaaggccacttccctgctacctcgggttctagcagtgactcaacacagcaggtacaatccttgtccattgttcccacttttagtttcaaactaatactattccttcatattctaatcatggttttattaattcccctaccactcataatgccacggttattgaggaacatgacaacactgttcatgaaggacaacaaagtgtacctcctattgatacatcacaatcccatcttaccttacctacagtacctaccccacgccccatcccctgtattatgcaacctttgaccacaacacatgacagccggcccacccctatcacacatccctttcctacttgtcctttacctagcctacacactaaaaccaatgttgacaccttacctactccctcaccaaacacatgtcccactatacccgatgcacccacacaaagctttcccactccattaataccttcggccatccccattgtaccattgtgtgataatgacaacccacctttacccaatgtcactatcccaacagctataccaactttacctttgagtgataatgacaacccacctttacccactgtaccattgtgtgatagtgacaccacaactttatccaatgtctctatcccaacggctacaccccatattcccattcctgatcacctcacagccccttctactacaagaactcaccatatgaagacaaggtctt

SEQ ID NO: 220041 - DNA, 2446 bp, Cannabis indica
ttttttttttttgtcaaaatagtagtctcaattattgcagccaatgtgtatattttatatttgaattttaagagtgaccactaatgacaccttattatattttctatttttttttctttctttctagtagctatattttcaaaattctattaatttaaatatggtttttttttgtcttctttctagaagtatcatattatgacttgtaattctaaaaatcccttaatctagtgggcttgtattgtagtttttaaaatatgtgtactccactccacttattaatgttttcaacttttactcttcttaactgcccaattcaatgccttacattattactttcaaaacccaaaatatatactcaatagtttacataatccaaactatgaagacaaacactatgctttcatttattaatcatagtgggactggcactagtttgaaagttcaagattgaaactttgacttattttcattcactttgagcatgtaattcaatgaaagcgaatgatacttattccacacatatataggaggtatcgaatgatacttatttcacatatgtctaaactgaaatcccgtgtctccggttctcctgtactctcacaaatctggttccaatccagcgtttttcatcttgatgatgtcgttttgatgcttcaagccgtgcccttttacttcctttttaagctttgcatttgacttttctttgttctgtttgttcatttattactcctccagtcatctgttagttattaattgctctggtgttttaaatctgttttagatcttttttagatacttcgcaggaaggtttatttgtctcttgccctctctccttggtttgttctggttccatttaatgcctgccgtcgttttgagaagcccaaggatggaggcgatcattgctctactagctatggcgatcctacggagataccgaaaggactgatatggcatctgcagatcaccttcttcagcaagcctcctctctccaggtatttctctaaagtcctctatttaaggttttggtacatgctacgttccctgctcattcaactcttggtacctagttctttccctgtaatattccctttatttgactttctgaacctatccatggattctcttgccctcaacatgtctgaaattcttaatctaactgaccgagaagctgtagttcatgatctggaagatgatactgggggggttagccaacatagtagaaccttctgtctggtttttagaatcctttcccctagaaccatcaagcttgagtggttcgaagtggctatgaggaatgcgtggattacccgtggccctttaacattctctgaatatgggtccggtatgttcatggtggagtttcactatgagggcgacatgcgaagagtcctcgagggccagccatggcactttgaccattgtctggtcacatgtgccaaccctgcaggcctggacactctccttcccaaccagcttaggtactcacctttctggatacaagtccactcgatcccttttggccaaaaatctctaaagctggccaagctcattggagatgaggtgggagacttcttggaggttgacaagattactcttttcaaagtctctgaactctttcttcgtgttcgcgttctcattgacatctccaagcccatcactcgtggaatcatggtggacttcaagagtatccaccgtgagaaatggctcacttttaaatatgagaacctgccaaacatttgctttcactgtggattatttgaccacactctcacaaaatgcatcacctaccttcaaaaatgcgacgacagtgcatatccccctgaccttccctacaaaatacccctcaaagcccctccgaaatcaaactttaaaagaaatccgtttgacctctcaaactctgttccgttggacgaacctcctgcacagcaggaaaatgttgatcaatccctggcagctgcagtcagccagtttcttactactgcagacattggcacaggttcctctgatgctgcctctcgtggtaatgctaccactctggagtctatgggagtcgatcctaccccaaactccactggtctctctcatgaaggctctcctttgagccatggaagcttccactctgctgttatctgcgaccttccctacacaaccactcagcatgctacggctgtgactagtgaatgtgccaatgagggcactgctgtggaggatgctactccaagaactactgaaaaagctagggggaaagcagtggctggagctaaaagaactgcttttctccctcaaacaatagtggttggtgattctctcaggaatatcctcaagcgtgctagagctggaccaacaattgctgatgtttctactgccattaatcaatccctggaacaggcgggtgttgcaaggcaaccccgcccagaaaaatgagtctcatgagctggaatgc

SEQ ID NO: 220042 - DNA, 3925 bp, Cannabis indica
ttgtgggatcttatacaagaatttagaccacaacctatttgtagttgtggtgcaatgaaagtgatacaggaataccaggatgaagatcgggttcttgagtttttgattgggttaaatgagtcgtatagtaatgccaggtctcaaatattgatgcgagacccttttcccaacattaataaggcctttgcttctgttgttcaagaagaaaggcaaagagggattactactgcccctcaagaagagaaaaatccacatgattcttcatcaaattcagggcaatttgctggtagtgtccagccacacaagcccaaaactattttccatcattttagagttgcaggtcatatcatggaaaagtgctataggttacatggctacccttcaagacacaaattgcatgggaaatttcccaatagcaatgcccaggacttgcaaaacccccactgccaacctttctggtgtgtaagaaaatggtgttgctgcaggagaaaaccagaatattcaacaggactttatggctgcctttgctcaatgctagaagctaatgaatatgttgacacaaaggagcactgaaccccctaatcttgggcaaaacagtcaaccatccgtgtcctaattatctggtaaaatcctttcaaaaccttctcaatcttgggtgttagacactcgtgccactcaccatgtctgtcataatttatctttattcaaagatacttggacaaatgtgtctatttcttctgttaagttgcctaatggtttttctgccaaagtttcttgaattggtaccattgttctttcaccaaatctcattcttaaaaatgctttatatgtccctgattttcaagtcaatcttatttcagactcatccatgcttgattccaacacatgtattttcactttttatttagatcattgtgaaattcatgacagtacgaggacccagctaattgggatggctgagaggcatgggaaattattctatatgaaattgcataatgagaaaatcggcccccttgtttttcctttaaattatgattccaagataaataatgatactatatggcattatagattaggccatccctcttgtatcaaaatttatcctttgaataaaagtttacaatttcataatcatgcttgtcccaatttttattgctctattttccactatgctaaacaaagaaaattaccttttgtttcaaatcataatattgccaaagaatattttgatttaacacatattgacatatggggaccatacaatattcttactattgggggacacaagtactttatcaccattgtagatgatcattctagatacacttgggttcatttcattaaaaccaaatctgaagcacaaacaaccattcccaatttcattcaacttgtgaaaacccaataccaaaagactactaaaggtgttaagtctgacaatgcaaaagagttgaaatttataaatttgttcaactctcttggaattgttcattatcattcttgcatccataggcctcaacaaaattctgttgttgagagaaaataccaacatttacttaatgttgctacagctttgctatttcaatcccacattcccttgaattattgggatgaatgtgttgctactgcaacatatctcatcaatagaacacctacaccaaatttgcaaaacatttcatttctccatttcaggttcttaaatctaaaccccctaagtatgagcatttaagggcttttgggtgtcttgcttatgcctccattttaaatgtatctagaaccaaattttcaccaagagcagctccttgtattttcttgggatatcctactggtatgaaggcctataaattgttagacctctactctaatagagttttttgttctagggatgtccaattccatgaaaccatctttccctttcatgtttctgattttttacctaatgcttacactaattttttccaagacaatcatcctttcagttccctgattcatgatcattttgttgaaccagatcagtttcctagtctcaatgttcctgcatctgctattcagcatgatgaggaagatgttgatgatcaaaataatgataaaagtgcatctggttctcaacatactgacagcagtatttgaggcactcaaaactctggtgtttctacccccattcataccagacctgttagaacttccaaaaagtcatcatacctacatgattatcattgttttcttgctataacatgtctcagaattcccatactgttaccccttactctatttctcaggttcttgactacaacaagttggccccccattttcgagcagtagtcttggctatttccagccatcatgaacctaaatttttccaccaagctcaaggcataccattgtgggataatgccatggataatgagattgatgcccttgagaagaatcacacatggtttatagtcactttacttgctggtcatcatgcaattggatgcaagtgggcttacaaaattaaatacaatgttgatggttctatagaaagattcaaagctaggattgttgcaaagtggtcaatcagcaagaaggcattgattacatagatacttttgctccagtaactaagttggtgactgtcaaacttgtccttgctcttgctgccattaatggatggcatcttcaccaacttgatgtcaacaatgcttttttgcatggtgatttacatgaggaagtgtatatgactattcctcctgggtatagtcctaagggggagcttccacctaatgcagtttgtaaactcaataaatccttatatgggttgaaacaagcttcaagacaatagttggaaaagttctcttgtgcattgtttgaggaaggttttcaacattcaactacagatcatttcttgtttatgaaacataatgaggagagtttcatcattcttctcatttatgttgatgatgtgataatggccaacaacaacatatctgcactagaggaattaaaggttaagttgaacaaaagatttcagcttaaagacctaggaaagttgaaatatttcctaagattagaagtagcaaggtctgaaaaatggatcttcatatcccaaaggccatataccttgcaattacttgaagatcttaggcatctagggtgtaaacctgtcaatacccccatggaagcaaatctaaaagtgtgtcaagacaaaaaggataagctagctgatcccaagctgtacagaataacaattggtaagattcaatatttgaatatcactagacccaatatattattttctgtcaacaaattaagtcaatttcttgctaatcctcaagccaaaaatctcaaagctgctcaaagggtattgcaaaatgtcaaaaactgtcctggacaggggttatttttccttgctaagtctgaagttaaactcaaagcctatacggatgttgactgggcagcatgtcctgacaccagaaaatccaccacaggcttctgaattttcattggagtgtccctgatttcctggaaaagcaagaaacaacaggccatttcaaggtcttctgcagaggccaaatgtagagctatggaaaacacgacatgtgagcttgtttggttgctgtccattctcaaagaacttaacattgaacaccaaggacctgctatgttctattgtgacaacaaagcagctcaacatatagctactaatcttgtttttcatgaaaggacaaaacacattgaaatagattgtcacttggttcgtgagaaggtgcagcaaggagttataaaaacttttcatgtttcttctaaagatcagttagctgatgtttttactaaagcactctttcctactcagtttaatgaattcaaaagcaagatgggattaatgagtattagttccccatcttgaggggagtatcaagagctagttggtagttaggagagtttg

SEQ ID NO: 220043 - DNA, 9613 bp, Cannabis indica
aagagaagacgatagtaaggaaggggaagtgaacggttggttcgaagagggaagagatgcgctagctacttgctttgttagaaagctaagcgactagtttactgttgagaggtagcgaagaggacagataggcaggggttagcgctagctagtgttagagagcttgctggatgagagcagactagactgagttccacttccatactccagtttacagtacagagggctaatggctggcttctttgtctagtcccacctcttcaccctaagctcttctcttagttccatccatacacaagcatcccctttctctctaacaacagcaagtagtaaactacctgtcctctaacaagcaagaaagccaactaccttatctcattagcgaagctagagtacatgagtagactgctttcttagttataaaatggaatttataaacaaactttctgtgggctttgctcttcaagttatcggggataaaaacctcggcttgcccgttcccctgtggtgcgggtacctcggagttgaggcctgctgcaaaatcccatgctccttgcagaatgccgagaccctcctttgaattgcttaccgttgtcagtgatgaccgcgtacgggatcccaaatcggcatatgaggtgctcccacatgaattttaccacctcctgttgctttgggaagaggtcccactatgtccatcccccacatagcaaatggccacgggctcgcaatcggatggagttcttccgccggtgagtgtatcatcttcgagtgtcgctggcacttatcacatttgcggacataccttctggcatctgcctgcatatatggctaaaagtacccttgagatatagctttatgcgccttcctcccgagtgatccccgcattccccttcgtgtatttctgccataaccaactcggcttggtctgggtgaagttgaggtgaggtcctccgaaggacattcgatactgttctccttctagttgtatgtacttgcccgccttctgccttatctttgctgcttctctcctaccgtctggcagttccctgtctctcagatagcgaatataggggtccatccagctaggtccgaggtcctgtgtcactgggaatgcctcggcatgaggtcggtttgctatgcttggctcgggttggaactcgatcgggattgttcgggcttcggattcccccagcattgaagcaatataagcgagtgagtcggcatgcctattctctgctcgggggagagtcggtagagacccgccgttctcctcatagtatagttccgttccgtcagggccaactcctcctggatcagggccaagtaccgcgccatccgttcatcccgcgcctggaaatctccattattctgatttacctttagctgtgaatcactgaaaacaaaaatctcgtatagtttcaattcccgtgccgcccgaaggccgttgagcactgcctcatactcagcctcattatttgaggcactaaaccctacactgccttctccaatcgatcatttgtcggagtcaccaatacgactcctactccggaccaatttacgttcgccgacccatcgacgaagagtctccagcctgactcgggactccatgggttgggatcaccatcacatgggagggtatctttctcgtctggctcggcatcccaggtcgggtcgtcaactgagcgagaaaatccgctactacttgtcctttcccggcagttcttggctcgaaggcgatgtcaaattcccctaactgcacggccctttttgctattctccgcgacttttcagaccgctgcaatacctccaggagggggtattcggcgaagaccctgatccgatgtgcctgaaaatgcggcttcacactcggcggtccactcgaaatcattctttttacggagcagctcgaataaaggtcggcatcgctcggaggatctagagatgaacctattgagtgccgcaatccgccccgctagtttctgaacctgcttcacactgctgggtgaaggcatctctgatagagctcggatctgctcaggattggcctcaattcctctcagggtaaacccccaggaatttccgatagccctcatatttctcccggttcaagcgcatcttagactctctgagccgagcaaaggtcgcccccaaataatccaaatgctgctctcgcttgcggctttttactaacatgtcgtcgatatataccttccattgtcgtgccgatcatgtcgtgaaacatcttgttcaccagccccctatctagtaagtatgtggcacctgcattcttgagcccgaagggcattactctataacagaatagcccttgcttggtgataaacgtggtcccacccaatacaccctgctgaggacgtacagtgtcttgcacgttctggccgaagttctggcctccgggattgttgtttgcagttccctgagacccatttggctgataatgggttgtcattgggatcaatttgtgttgttggacttgccctcaattattcttgcctgaggatccttttcgcttggcatgctatctcaagagaacgaggagagtaggactgaagaaggagtttgtgactcggaaattggggaagaatctccttgagatagggtatcggatgttttgccatgatgatgatgacgaaagtctgttagtttgggcctaggcctttcagaaaccagtataccttgtgcgtctcaggcacaggacatcctatcgcacacaagactcacatattctcttaaaggcacgcgcacctgacggaacggaatgaaatctaatgaccggaaaactgcttcccaccgcattaagtgcatgcaagatccaattggcttggccactccataagaaaatatctttgaatagcttccaacaaccaaggggaatccaaaacagcgaaaggaagtcaatttgaaggctatggagacaggatctcagtagttagatctgacctgcaaatgagaacaaatggacccaggctaacctttgcctagtacacttcaacaccagctcccaaagagctttagagcaccgccctgtgaataatggcagcccaaaatgacgtggcagggatggattgtgagagatggaaacaggagtcaagtcccgaagcagccccctaatcaataagcctaccaagggagtccgccatcaagattcatcggtatggagaaagagaatccccttgtctagtctctctagtcccctgaaagtaaccttagggggggcaagtagataagattgagtatgaaatcgtggatacacaagccctgatccactcacactatctagaggtgaaaccaaactgctgcagcatcctcaatatatcagaagatatcaaattggatatctcttccttttctgctccccttatactttctcgaattcttccggagaagccttttcttggtttaatctcctcttcagcttctccctttctggatctaggtagaaaacgggcttcttttcttcttttaaacgacgacgaccaagtctttgaatgagcttcattttgaaaacccccttctcttagatcaagactttcagctgagatatcaaccgagaattcttccttctgtgcttcccaatgcttgaaaaaagattaaccgaagttcaagtcttgcttgaattctttaatatgacttcggttaaggcctacaatgatcactccggtggcttgcagacctccaatgatgacgaactaaattcttagagcaaaaaaatttcagcaaagcacggtcctatttcttaggcaggatctgtctcggaaactattcccgatctcctgtagtaggaaacagagaactcattactaaagatttgttttagttaacgggcgggtaagggcagcaatgaaggaagactttcttggagacgaaactgattctatggattgagtctggcagtgatgttagttaagtccactacctggggattgtcttgcttgagaacccgtttggaacaatctggattttcccctgtgagtcactcgaattcttatatttttcattctttcatgaatagaaagatctccgcttcgtctttcttccaagaagagatcccaacccattgatattggtcatgcatgggctttaactcaatctttcactatgatctgaaaggaatagcaaacaaagatattagccaagcgagatagatcattagggataaaaaaaccttgccttacttcttccttcctctgttaattcaatatctgtctcgcctgcgaatccttatcctaatctgagattgcctgctattcctaacagaggcgatgaatatcgtgactattgggataacatattcatatgcctctatcaatgtattccatccattacacccggcaaagtccttactacatgcagcagtaggcgggcattaaaacacgagtttcagcggtctctgctagaaccctatttgagagagtttcaaaggccttcaggagcgtagcctttcactccgttcctcgcacgcttggttgcaaagggctatagtcagagagagggtgtggacttcaatgaagtattctctcctgttgtgaaagacagctctattcgcgtcttgcttgccatggttgcactctttcgatcggcgattgtgaaaaagagacgatttgaatattgataagagatatccttcctataattcttctatggctatttccgatcggatcttgccaagaatacgctgttgtttcaatgtcattatcttcccttcctccaagacaaaggagtagcggggaaactgactaacgtcagtctatagctcctctagggcccaatagactgaattagtccttctaccctgccaaggcgcgaagcgctagttgagctaggagtttcaagcgctaagtcctttccttcgggaagtcattccaggcaagaaagccaatcagggaggaaagcaagtcagtcaaacggtagcaagccagttccctcccatcggtcctagtcagcctctttcctgtctcttgtgcaaggctagctgtccatagcgcttacatgctcgggctcctgtctgtgatagaatggtttcatgctcttcccctcgctctgccttatccaatcggggattttttagaactaatatctgtcttttgatgcgggaaaatgcaacttttgaaatgcttttcgtaaggcaaggaagtcagtgcaggtaggcgagggcagttccggtctacgatttatgggtgtatatactctttccttttgtcgttgtagcaatctttcttagtgcacccttaggcgagtaaagagagaatgcttggtagcaggacagtaggagttcagtaggcgggccagtagcacgcatgccaaggatagctgtccaaggtctcattccattcaatccagtagtaaaccagtcagctagctgaagttagaaagttcagaagtagctgctctcctagctgcacattcatcgtatataatagtatgccacactgtcctttcctgtcgatggtgagtgaaaaagatgattcctataataagcatctcatgccatggttgttgtgaaagaagaaactcttggaggaaatgccttcttagcaattgaatcaactcctggtgatgaagaagaagaaggagctgtgaggaagggaatgattgcactagtcccacacccacggacagaaggaatagaatacgctctttgaaggacgttaatcaataggagaagatagccacgcacaagaagtagctgcgctatttcattctctcccactcttctagctctgatcgtaaacgctcttcttccaataggagtgattctttgccttgacgctgtgagagcttccggtccttgagtatgagactcctatccgctcttgggttcataaccggtcctattgaatcagttgcacatgaatacggtcttctcggctttccctttcccgggatttctccttggctttgactctttcgatctctggtctgcctgtctgtaaccaatgcctggatgactgtcttggctttctgtctcgactctcttccttcctgctgtcttggtgaagactgtggtagtggtatcggttctttgcttggttgattgaatatctctttccttgcctcccgagagtagccttagtcttaatccgcctttagggagtgaagtgaaccgggggtgatataataagttgtgaaagaatcggtttagaacgtatccgctgttttagccatatccgttgctagagtaaccgctcgtcctttcttcctagatgctttgaatatccccgtcgattgcctttattccggattactagaaagttattcaaaaggaatttctcgacccggaaaaatgaaataagtcaattgccactggtcaaagaagagacaagaggagaatcaagacaaggggggatggctaattccgggaataggaaatatcccaaacccttgactattcgacctgctcctcgaagcaaggaagggaatgaagatggcatagaatgccctgttagcaagaaggaaaggagttggcttaccgcatctaccttctcatcggcgggataagggctggggcgttaactaagtactaaagctgctggagcggctgccttcgttgattccccacgaaggaatcggaatatcgctacttccccttactgtcctaagcgggggagaaggctcgagagaccttgtgtgaaggaaaggctgtcaaagtcgttgaccggtcttcgaaatgtgaatgagtgagagaatacagaggaattcgatcttttggtgggtatcgtatataagaaagagaacggctgcttttaggactccggtggtcactttcgaaagagagtctcgaggtggcggtgtacacgtagctccatagcggagctagtcactggctacaggtttctttcctaccggaccggaggcggccgagaatgttatgtcaaaaggaccaacgacgatgaaggagaagaaggagtaggagtaggagctaattcggacggaatcgaatgattacgagatataaaatgagacaaagccaagaggagagagcacttagacaattcactttgagtacagggaagtctgctggtaggaattcctcagggcgtattacggtttttcaccgagggggtggatcgaagcgattgcagcgaagaattgatctgaaacgaagcacttcgtctatgggcattgtagaaaggatagaatatgaccctaatcgttcttctcggatcgctccagtacgatggattgagggtgtgcagctacagctacgccgccagaggaaatgcaacacgatagaggagttcgctccgccgcgtaagatcctcgaacctaccacgaccaccatccgcggcctattttcgttctcttccctgcccgggaaggtggatcaaagaaaggtagcttgcttctctcctggactgatggcggcttatgtagtggttggccttcctaccagaatgcctccttggttgaagagcccctttactagtaagtgcgcaggaagcaaaaaaacttgcgcgaatgacgttttcttctctgccttctcctctccaaaggcctttggagagacagcatccctttccttcgatagctcttttggtttcccaaggatagcggtagctggggcaaagcccgctttcctcgctccgcgaatgagagagaaactcataggaaaaaacacgttctctctttgcgaggtccgaaagtggagaacgcatagcattctctgggcacataggatcaaacgtaaagcagcgctttcttggcagagttttaggcggcaagagactttagggcttgttggagctgctgagcataacgaatcgaagccaaagacggatcaaggtagcttgcctgccaagccgataggcgaagggccgaaggatggagcgtgcaaagtagatcgtgcacctgtcgtgtgacccgttggtcctaagcaatgtcttgcgcgaagcgacccacctagaaacagctctcctttcttttagggggcactaaaatggaacttcgatcggatgcgggtatccaatcccgccgctgagatgtccagcggattcctgggccttgacgaatggccggccaccttttttttacgttagaagagcaaaaggcccggggcatagcaggatgaaccaatgtgaatgagtgtaagcttcgttgcccgaacacgattggtgctgaccacactaggtgctaccgtggtagcaagagaggccaggcggtgacaattgagaggttgtcactgagcatttctagtcacacgggaagagaggtcaaatggcaaggcaaggccatacgcccgtttggctcctcgcggagtatagctcacatccaaacatctgattggggaacggggcaacgcccatgaagctccggcggaaagggaaggcctgccaggccgtatgcccatgggtgcgggattcttcgaaaaagcgcgggctgactcggagacctgggaccttgacttagcaacgaatgaaagggagctcttcgagctttctccgccagagcggcttatgtagtggtcggccttataaagctcgctaagcgaagcttacctcccccttcccttattaaatgaagtggaaagtcttcacttagtagtcggcattctataagcgacttgtcgagtctacgaagctttgcttcttgtagtcggccctcccttcatttgcttgcctccttccagctcagaatgcctaatgcctattatcttatctagttctagaagctaaccgccagaagctcacccttcgggtgtcgcttccagcgcaggaggccaagcattctgccagacgtcctggcctgggagccccgttcgcctttggtacttcagtagatcttcaaaaaaaagcgctacttcaatgcagccttaactacaactacattacgcaagctccaccaatacctatacccacctatagagtacaaaaaagtaccagtgacgtttactttctaggtttatggattcagtcagcgaaactccatcaaactcctcaataaatatcaacaaacaagatgtcgtgaccggttaggcttggtttactttgtaatgaatggaaactaaaataggcggcgtttattcaaacaaagggaaccgaaggtttccttggtactttagtagtacgacagttgttgcactattaagtagctgtacaacagaatgccgttctttagtattgagtagtacttaagtagctaagtttccaaaggtgaacagccagccctctgtcctttatagtcgtaaagggcttctcagaaaaggaaggaggcattcgaaaggccgaccactatatcataggccttctggtgggaaggccgacgactacacggactctataccaagtcatgagcgatagcgaagccgcctataggcgaaaggacgaaagcccgacgaaggcctatgatatagtaagaaagaaagtacgtttaaggttacgaagtaacttagccgtctacaaagggaaaggcgtcggtacggagtcacgtcagctgtggatatagactaggctataaggaacggagtcttaaactatggaccgagactacactaaggaacaaggaagcttgactgagcaaagaagtcaaggaacgaagctgcttctctaatagccccgttgaatcggagggcgaaggctttttgaaaaagtattttttt

SEQ ID NO: 220044 - DNA, 2201 bp, Cannabis indica
ttttttttctttttttttacattcccgacgtttaaaactgtcacctataccctgttataggcgatagatttaaaccgtggggaagtccacattagcgactgtttttaatcgtcacctattttgctcgttttacgaccgtcgtatatgcgacagttatagaaattgacagaaatactttaaacaactatttagaaacataaaaaaaaaaaaaaacaatttttgtagcagtggtgttgatgaaaaatagggatccattggtggtttataattcaatatcattgatgaatttgaatcaatgatgccatgtgcttcctcatcctccaatatcacattatctacactttcatctaacaacccttctttttgttggtcactctccacttggttatccatacccttgcttgtgatttcctattcaataattttatgatcatggatgaattcattctcctccatgattttattcacttcacgacattcattatttattgttacgcaaaatatgaacaactatgcaagtgcacttaatcaagtagtacgcacacatgtgaggtcaattccacaagaaattgaactaaataccaataagttagacttatacttctatttggcaaacaataatttttgttgaagataaaaacaaagaataacaagaaaataaacttaagcaataaaaatatattaaatcaaggataagaaaatagggaaaagaatcatgttcatttaaatacccaattgttaatgctaattaatattctctttctcaatgagaatgacaaattataaaaaataacctaattctttttagattttttaggtcctaaaacacatgttatctaatcatctcttaattagactaacatataatcagcattaagaaataatctcaatgtcacaaaggctatgcaaatactttcgtttcacatcaaaacctagtttatctaattttggcattcccaaaactcactttttagattttggattaggatcataaagcatgcaaaaggtgatcaatcttaaacaagtaattaaacacaaatatggataaattcacaatcaagaaatgagaaataacaattatcattaacctaagaaataatgtcaatcaacattcatcatctccccaaataggagtttagttcataatctccatagtcaaatccataattaaaatttaaatagaaaatatcatagaaaaattaacagaggagaaaaaaactggttgaagcaatctatccaggtcgccacaagccgctcttgaagtcctctcctttgtttctagggctccaatccttaataatcatataaaattacgagttaccttttaaatgagtcaagttttctctttaaaatttgtgaaattatgaaactacccatttttttcatcaggaaggcttcgtcgcgacaaagcctattccccgtcgccacgactggagcactctcaacttggaaaactttctaccaagttccgttgcggtgaagcttattcaccgtcgcagtgaaggattctgcccctcgcgacgggctttggcagaaaagaactttgtagattttttcctcaactttttcatatcttgtcctctattcttgtgaatacttcctttaaacatccggggacctaaaacaaaagaatcaaacgtaaaattgccttaaaactagaaacaaaagtaaaaaactacccaaaatttaaactaaaattagccttacatttatcaagtaagaatttgatttagccaaattttgagttaataccacttcaaaaggatgttgatcttcaatagtaggttcattctcttcgatgtattcaactaatgaaacttcttcattattcaaaaaactctcataactttcattattggagttgttacattctgaatcatgagtcatgaaattatctcataaggatcttaccatgtccgtgaagcgattaatctctcctagaagtgatagtatactcttctcttcttcagttggttggggtgattttgggcaataaggaggttattgatgaatccaatcctgaagtgatggatcccaatgccagtcgtaattaaaatttggcgtatcattcaatagatttattacatcatagcctctccttaatagaggcgctctagttaccgctgctccataatcaacccagcttcttgtttcatcatcaagtccattataaaagagccaagtaaaatacccacttgaga

SEQ ID NO: 220045 - DNA, 5382 bp, Cannabis indica
aaaaaaaaactaaagaagacaaaaacaagaattttagaaagatttgggggaggacttagatatatagcataaaataaaattaaaagaaaaaatcatttgttgactttttattggtcatcgttctcgcatactggtcttcgatcggtattatgaaagccttcattctcggacgtgtataataataataataataccccgcaaacgccattgttttcaacgtaacaaactcatctcacatctaaataccttccgttatctgccctcaacacaaaatatacattattatttttatttatttttaattatcttctattacttattaacccactagcacaattaaacaaaacaaaaaagaaagaccatttatttttttttcttttgtaaattttaatacgctatttgtttatttccgggaattcctcaaagtgtgatctgtgaaaaagttgtttcacaaatcaaaatcccctaaagacctcgttttgcgccagtctgagatgaacactcgtcgttttatacgtttccgcttaatttgattgtcgttttgtgaacctctgtagtccgtttcgtttctctcctttcttctctccgttctcatctccctaaccgatcacaaacacaacgaagcattgaaaagaagagagagagggagagaggagagagaaaggttaaagcttaaaaaatggaggtgtctggtaacccttctgaaccctacgaaaacagtggtagtccgagaagaggtggtgttggtggtggcatgttgcaccatctgcctcccctcagtttatttcattcgccgttatcgtttttgttggagtattccggtatacttccggcgaggtcaactaaccgggatagcgaggaggaagcggtcaatagcgttggcgctgttactcctgattcgccgcctacctcccctgctccgtgtgcagctggcggaaccagcggcggtgactcggctgaggtttcgattaggattatcggcggtggagagcaggaggataggtctgtttcttctccgcggcgtagcggagaaggaggtgtggatggggatggttcgttgagaatgcatgaattggatgatcagcctggttctgcacgaattggtggcggcgcaggagttgcggaggcgagcgggagagcgcccctggtttctccttcgtcgtcggtacccgtatctcgttccggagtttcgtctcttcaggatgagtcttcttcccagagttacgacattcaacaaattgccaaatggattgagcaaattcttccgttttcaattctcttgttggtggtcttcattcgtcagcatttgctaggtacttttctgctcttccatcttcattataatataattttcaaattaagtttcttttctgcaaatagggtagttttagaatttcattatttgctaatgacaattggggcgaattcagcaagaaaaacgaatcatttgtggaaattctaacttgagatgtagtctttcgatatgtctcactactcagctgattgatgcgcttgataccataataggtctggttcaggaaaattgaggtccccatagttatggcatgtatggacgtaacttggttcatagaaagacatttctgtgctcgagggcatttaagttacattgagttaatatagaaactagtctcgagggttaagtgctcgtgcgtttgcgtaatgaggtatccatttgattactcacgggacatactttgcaatctgctagagtttagaaagatgatgtaggaagtaaaactagggcagaaggtggaaacttttgttttccagttgcatactgatgatcgtaggccattatgacaaacttatggaagatatttgggtcctaagattccttcttcctatgcagtagtttttaaatgattttatgtatacctagtagtttcatttgacatttgggataaatgactaccaattgatagtttgacagagaactgttgtataagatataacataggtgttgtaggtagattttctcttgcatcttttattattattattattgtcctattgttattaggatgttattatttatttattctcatttgaaaattcttcttggagagcttcaggtttttttgttacaatatggatatcagctgttatgtttaaatctaatgatattgtgcggaggcaaacagctttaaaggtgtgtattcagctttcagttttttattttataaacccaacccaagttccactaggagcaaattgaggctgaatagttgttggtttctacagggagaaaggaaaacttatgtccttcttggcatttttagcgcttttatgcttcatgtggttggtatttactggtggtttcaaaatgatgatctattatatccgttggtcatgcttcctccgaaagcaataccacctttctggcatgctattttcatcgttttagtgaatggtaaggatttttttaaattttttttcttcattgctactcttaaattgtttctaatgtctatcatcattgttttattttaataataatattgtatgtatgtatgtatgctcgtattttttttttcaaatggagctgttagtagatgtgtgccagtgccatgcagtggatctatagcaagttctatttctaaggagggtttcgacatttaagatacacatggagctttgaataagaattgcaatgctttccctaaacttaaactgtgatttatattcatgtatatatatatacttttgtcatatatggttgggtagtatctctgctctggatttttcagtattggttgcttccatcttgaaaaatgagaatcgtctttttgcttcatctttagtcttttctcttaatggatctttatgtaattctgtgcacatgtctatgttttggctttcattattgtcttttaattcctacactcgctgttgcattgtcattagatacactggtgaggcaggtgacaatggctttcaagtgtttgctgcttatatattacaagaatgggagaggctataacttccgccggcaggtaatatggtgtagattataataagagttttccatacaattttttaatgagaaatacagcttttgatttcttgtagctttcttttcttttttttcctagtcattttaaacgattagctaattactgattgctatctcactttgaagggacaactgttaaccctgcttgaatatgcattgctgttgtaccgtgcttttttaccaacacctgtctggtatcgcttcttcttaaacaaagaaaatggaagcctcttctcatcactaaccacaggattgtatctaacgtttaagcttacatctatagtcgagaaggtaaagttatacacaatatccagccgagctttatttttatttgtcgcattctatagacaaaatgatactggaaactatatctgttatgtataacttatttatgttgcttctaggttcaatttttctttgctgctgcaaaggcattgacacggaaggaactccaatttgggtctcatgccacaccagaacaggtcaataagtagcctttttgtcaatgaaatgcttatattttatgtactgtgctggattcttgcgttttaggaaccttgtgaaatatcattcaatttaatatagattagacatgatcttctgcttagtacaagaattatataaatcctctcaagactgtttcatggggttctcattttttctccttttaacatttttatagacatcacaaccaaaggaattgagttcaattttaaatctttttgctaccatgtttttgtttatatctctttgctttatatgcttagtattatttgagatgtcaagttcacaaccaaaagaacctagctaggtgttattttgtagctttattaccctatttttctctacatctctttgattctgtctgtttacatggtgttggtaaaataattaatatcatatattcgatggttttctaaagcataaaaatcacaaccaaaagaacctagctaagtgctattcaatggtatcagcatttgtatgattaagatggattattctgtcgcaactaattattgttacatcctaagtcagaaagtttgtgtttcaggtaaatgcagctggagatctttgtgctatttgccaggagaaaatgcatgctccaattcttttgcgttgtaaacacatcttctgcgaggactgtgtttcagagtggtcagtttactttctatgtcttatgtattaacaattagatataatttgtgtagtcaatgatacggtttattcttcatttaagtaagtattatcttaagcattaagaagagcttcagcatgtagaattatagagcaacacaggcgaatattactgaaggataaggctcagtgtcaaaatcacttgatatgttggtacttcatgagattttatgtacccattcaaatttgaaagtttgagctttaagcatcattcaagcatataaatattagggtttggatataagaaagtaagttacagtatgattcgttgtttaatgagcttcatttgctctggctcctaggattaaattttccaaatcagtacgacactacagctggaagttttcatctttttatttgctaaaacccgttgcgcttatgctcttagtttgtttttgtgtgtttatatatgctctttaaatatagattactgagggaattttagtgcccttgtaacatttaattgtaagatgttaatagccagatgaaggagtccatgagcatcaggagctcatgtgttatgtgtacatcttacttttcaccatatgtttaaacttaatttattggtttctggctgcttagctgagcttttactaatagcacagtcacgaattgccatatactcgcttctatatagacgtgaactaatagagaatcgcatgcgtttcaggtttgagagagaaaggacttgtcctctatgcagggcaatggttaaacctcctgatttacgaactttcggggacggatcaacgaatttgctgtttcagctattctgaaaatcaaaggtctctgttttgttttacaagcagccgccttcaattaaaggagccatttcgtctcatcagcaagtggtatatatgtatacttggttacacaatctcaccattaagttgcctccaaaatattcgatggaaggtactatcaaagtccaatacgaacagatagtccatgttttcctagtcatactcaaaaagaaaaaaaaaactgatgagatggttaaatactgtatcctcatccacacagattttgaattattttttctataatacgaatcccataccaatcttttgtatatacattatataaaaaacttcattcctctgctccaaaatttgcctaaattaaaatcttccggccactttacttctgctttt

SEQ ID NO: 220046 - DNA, 5042 bp, Cannabis indica
acttttcaccagatgtaatgctgagtttgctaatacgacaaggtgggatgaaacctgtttccaaaacatttattaatagagcagagatgacagagagacttcatcctagagttgggatagatttggctccattccatctgatttgttgaccaagagctaccaccaattgtaagcgttagggttgataggtttgcaatgatggcaagtcggggaccccatctacatggtagatactatgaggacccaagccaacactgtaagttaacttttatttaaattttctaaggcaaaaaatgtgcccattttatttgtctggttcattcacaattccttttacaaattaacctgatggtggagagacaatgttgtccgagctctagctgaagctaattccaaaatggagtccatcatcaaggaacgagtaaatgattctcttgacaaggatatgtctcatgagaagaaggggaccaagactgagagagatcatggagacaaatataaggaggaatatacacaacctttctcttggatcagtgacttggaggcagatttgaagcaagctaagctgaacctcaaagagtctgaacaaaagcacacccttctatcttaagaatataataagcaaactcgaatcatggatgacaaaattatttctgaagccactctaaagagaaaagtgaaacttcagatttgcatcacaaggcagaggaggctaagaaggaggctctcataaaggttgacgagactatagctgaattgggctctaccaaacaaactctggctcaggcttgtgaggaatcccagaaaaagactttgaagctggagggctgaattcataaaatggctcaagagaagcagaaccaagatgctaggacatcaaaagcattaaagcaggcttttgtattctctacacaccatctagaagctcaacaactccgtgatggattttttggatattgaagacataaaacaactgatggaccaggttctccaactagctgaagtagaagaagccaagaaggtagtaagggcagcaaaggtgattgatcttggaactttccccctaaagggtgagaacttggaagaccaacctcttctagccgttgagactccttcaataacatataagatcagaatttgtagattaggagatttccacgaatgtctaaataaagaagagttatttcacgctatattctttttcttttgattgagttttcaacctggtagactttttgacaattattttttttaattgagataatattatagacatccaaaaaaataattatgaaatattatatacatggatgtcgaaatcatatatttccactttctcattttattcttctatttatctttctcttttctctcttctcttcattttttttatttaattctatattattttataacaatattaatattaataaatatttttgcccttttcaacgggaccttacgattcaaggctgttctgctctgtctttgctcaatcattacccagaaacccatttactacgatggcgagcctctggcgggccgcaatgggacaatgggaaaatcagcctgaagactacggcggcgtcgagttctggtccgacccggagcggactggctggctaacaaagcaaggcgagtacatcaagacctggcgacgccgctggttcgtgctcaagcaagggaagctcttctggttcaaggaatctaccatcacccgcgcctccaagccacgtggcatcatcccagtggcctcctgtctcaccgtcaaaggagccgaagacgttctcaacaagcaaaacgccttcgagctctctaccaggactgacaccatgtacttcatcgccgattctgagaaggagaaggaggactggatcaattccatcggacgatctatagttcagcactcgcgatcagtcactgattctgaagtcgttgattacgataacaagaaatgaatctccatttccgtaaaaggaaatagttgaaaatctgcaccgacgaagcaataggtgagtgagtcgaagctctgatcgtttctgattgtctacgtgcgtgacttggatggattatgtgtgcatctttctttttgtatatttatctacagatcatgttgtatcttgatttatgtaagaaattattttccctttgttaattatagttttcaatgtgaaaattttgccttcttgatttctcttttggttgtttgttgttagggtttgagttaatacttgtttaaatatgataattaaggctgaattgtgtgtattttgattgtagaggagaaagagcataaatgttatcaaattggaataagatttggggtgaatggagcttggttatggccaatgcttttagaaatagtttttattgattttgatagatcatattcttcctccatggaagattgaaaataatagattttagtttaagagtggagttttattgaaattgaaggaagtttggaatattgttggagtaaatatactcaaatcatgttgtttagtatggttggtttcaatctctatttataatggcttagattcttgggagtttgtattgtcatgaaaatccattgatttcagaatccaaagaggagtaagcaatcaagagtttggttgcttcagatggagtttgagacctaaagcttctagttttccagagaataaaccaaatcatattgatgttttttcaattaaggttgctcccaaaggaatcaatcaccctcttttgtggcttttctttgttcaatcggaagactttccctttgactaaatcaaaggaatcaatgaaaaactaagaaggctgcagcttttttagccaagaaaccttctatgaagaaagaatgtgttgtttccagaaattgatagaatcttttgtgagtgcacttgaaaggcgctcttgttttgatcaaaagataggaatgattaggtgcatgtccaaacactttctatatttatttatttgattatttcctaaggtcctttagtactaataaaatgaatcatgaccctataagaattggtactaatatgaatccaatgaaaaaggttagaggtcaaaacattcagtcttgcgctcatgtttaatcacagaagcttatatggctccaaatgaaagcaagacagtagtagtatttgctaaaatcatggttgattttgttctccttctttcgtgcggaacatctgtttgaggtgatcaacgacacctatgtgatctgcaggcgatttcgacctcaacaattgaaagcaggcaccgtatgtatgcaatttcttgagtttctaaattaggccttactttgaaaatgactatgagactatcagtttatgccttcctcttgtcattttctcatctcaaagtgctaatcactacaaaaagtgacactaataaattttaaatattggatttcagctaactaattagagattgctatatcagtgtactattgatcaccttatgccaaaataacagtacttttattttatgcaaaatatagaaactaacaaagctgtacttggaggtttgctcaggttgtgttttgtttttgtttttttttttttttgtctctccctccataacgacttatctaaacaaaaaatccagtactcataaaaaacactttttttttttatatatatatatatatgcaatcaaagtatattttcgtcctaatatttattaggataaattatttttttctcaaattatgactctagttgagttttgttctattttgaaacaaatagtatggttaagagcagtgccggcacaaggggtgggcaccttgaaccaaaagccccatttttttttttaaaatttataatattagtttaaaaataatgttaattttgaagaaaagtgcataaaattgttcatgtaatttaaaaaataaaacttctcaatgactactataacattatagatttaaaatgtcagtgagttcttgtcccaaaaaaaaaagttagtaagttcattaatgtcaatacatatattaaatttcattcaaaatgtgcttattagacaaataaaagattaaaaaaaatatggagtatgtttatcacttgtgctagtagttcaattctatatttttcttttgaatttgtagtagtaatttatttattttggtcaacaagaaaaatctttcattaatcaaccaataactttataacgaatctaaacaaccaacaacatccacaagcacagaagcagattacatacatctcaaattcagcaaaattcttctcataatctttcatcttcctattcaataacatatgaactccatagagtgactcctttttaatttctctaactatataatgcacttgaaaaacaaaattgttatatatatactagtgttcgccaaatatgatacacagttgctgcaaaaacagtagccataaactcttccatgatctctttcctaacacccttgagccagccatgccaagcagagtttttcaacagccaaactgatcggcccagctaggaactaatcaaatgaattacttgttgagaataaatgcaatcaaaaaacaagtgactgtgactttcttcaaaagcaccacaaatctaacaaagtcacaatctataaagatgtggcagttgagtaaattgtctctagtaagaagattattattgacaacttgtcatagtataaattgatgcctaggcatgctcattctgttccacacacactgataatacttcatattttcttgcttcaacaaggagttgtatagtttgcttgttttaaattttccaccgacccttgcactaatgtcttgctgagtaaaaatatgtctaaaaggcataatttgcgccaataccagcttgtatcagctttaagctggtacccccagttatcttttccttttaaataggtgtgattcacccatttaacccaaaggacctctttattagaactaatttcccaaatatactttgcaagcaaaaccttgttccactaattagttccttctttaaagccaagatccccacaaactttggaaaggcaaaaattttcccaagaaatcatatgc

SEQ ID NO: 220047 - DNA, 3031 bp, Cannabis indica
ggtaaaataattccaacacaaggtcataataacgctttgtactatgatcaggaggatcttcgtgcagccataagccttgcattcgacgaacaaagatgtcaatttatagaatggagggacaaggagatggaaactctaaggactcagtaggcagccattgatgatcgcactaggcagaccaccgtactaataagaagggcctaccaagtcgtcaatcaacagccggctactacgtccagtatccccctgggcaaatcaaaagggtttgcagcaggacatactgcacaaactcacagtggtcagtcctccaatccagccaggtccaacctgtgggccaaatggtaattggccaattcctgccagaccgtcgtttgggaggagttataaacaccaaattcacccttgcgaaaattttaggccaacctatcgaccaaacaagtcatacaccaaggccatctggtacctcggtgcttgctaggttgggtgctgcacatgacctcaagattgaccaaaatcaaagaaggtgcctagaagaactatacgtcccaccaactgtccaactatgtatccttatcctagatccatttcaaagagatcccaatgtgacaccggtcggtcaacaaggtgaaaaagtttatccatctgtgcaagcacaactagatcaacttaaaaagatggtacaaggcctggttggcccgaaactcactgattcgaacttcaccgggcaagaggatcacccttcttccatgaaattgaagtccttgaattacccctaatgttcaaaatgccaatctagaaaatgtatacaagaaaagaagatcctttatcaaatctgaagtattttgagatgcagatggacttgcagggggtaaggggtgttgtacggtgcagaatcattccagccacactcgtagaggctgccgaataatggtacttgaaattacctccatgaaggttaattaatggaatgctttcttatcagagttccatgcacaattttcttcctctcgtcaacttcccatgcatcttgaagacctggtcgaagtaaagaaaatgccaagagaaaatcttagagcttatgttagcaggtttatgactgaagctacaaaaatgtaaggagttgactgtagaaaaaaggttggctgcaatactaagggcattgaaccactcagagagttgttgaaggacattaaaaggctgactatggggtcaatggctaaatttcgagatcgagcagataggttcattaagctcaaagaggctattcagtgtgtgaatactgtcagaaaaaagaaaaactagcaacatgccacttcggtaggaactttcacccagaatccaaagtaccccaatagctcaaatcgaaatgggaagaggtctaataacgataacaagtaggttaatggaaagaaaggcaaattcgcttgcaatgatgagatgcaccccagggaaaatgcctcaaaatttactgccttcttagtccctacaaacgacctagagacaatctatgcgacaactctgtctatggtactgtacaaaaaaccatcccccatgaaaaatgatgtaagtaagagggatacatccaagttttgctattttcatgcggactacgaccatgacacaaacgaatttaataatttgaagcgggaaattgagtttttaatcagaaaaaataacccacatttacagaagtatatcaaggtcgaccaaaagcaaaaggccgcccaagcagacaataatcaagattaattgatgcctccaccgatggacgggcacttacaggtcattaatgggggtccacaccttgttggagacttgggcaaagctcaagaaaagtatgcctcagccctaaagtatggacaaattgaagcagtattggccgtagaagagagaaaaccaaaaataacatgggtaggggaaccaataataacattcactgaagcagatgccagccatttccatttcccgcacaatgacctcatggtcgtggaagtgaaaattgcaaataagatagtggcatagactataatagatgatggagcttcctcaaacattctgtttaaaacaacttaaaaaaagatgggactccaacttaaagatttgatcccctacacctagctcgtatacggtttttctggccaaagcgttgcacctctaggaaagatccgcctgcccctcactgttggacaagctctgagaagcataactatgatggcacaattcctgataattgatgtccctttagcttttaatgtcatgttaggccgactgaccctatatgagttaaaagatgttacatcagttttccacctgtgtgtcaagttcccaacaaagaatggggtgggatgtctcaaaggaaatcaaaaaattgcacgggaatgctacaaccttgctctaaagaaggtcaagaaggaaagtacctgcggccagagttcagccaaggaaagagcattgtccaataggaagtcgcccaaggcagagatgaagacatggatcctcgacttgtgaaaacaaacataaatgtaggggcagtggaagaactggaagaagttgaaattgacctaaatatcccagccaggaaactcaaaattggtaagggtttgttgctcgaaataaaattagctttaacaaaatttctgagagcaaacttcgacatttttgcctggtcacatgaggatatggtcggtattgaccccaatgtgatgtcatgccctaaacattgacccaaactttcattctgtccaacaaaagtaaagactacttgacaaagaacgggtgcaagcactcaaagaagaggtagaaagactatacgcaaacaagttatcattgaagctttctacccggcttgggtggctaaccctgtactagtgcccaagccaaacgaaaaatgacgagtatgtattgatttcaccaacctcaaaaagctgtgtcccaaagactatcttccacttccaggaattgaacagctcgtggatgcaacaactaggcatgaaatcctgagctttatagacacctatttggggtataatca

SEQ ID NO: 220048 - DNA, 4497 bp, Cannabis indica
attcaggaaactgcctttttcagaaaattgagccatcttcttttctctctatagctgaccctcctttctttcttctcttctacacaatttcgagataccctagtgaaagagtagtgcccacacacagcaagtggtacctcaatcatagtcttgaagatcgtgaagaatccaaatctaagagaaggacattcagactcagatcttgataatactctacgacagaaaggatataagggttagagatctgagtggaaggagacatattattttgctgcaaccaatgtaaggttttcttaactttatatgtgtttattatcgttttagaaagttcatatttaggatgttaaataacatacttgtgagtagatctaagatcctgctaaaataaattcccatcaggaacataccgaatggattttttttagggagtatgagatctctaacaaaatgtaaatctatctcaatgtgctttgatcgtgcatggaatactggatttgcagcaatagcagctgcactttgattgtcaacccatagtattggacattgagtagaagtaacatgtaactcaaaaaggagtgagactaaccatttgatttcagcaatggcattagctaaagccctgaactcactctcactactggactgagcaaccccctgtacttcgtctatcatcaacacacgatgcccagtcagcatcaaaatacccttctaaagttaaggaaggagctggtgtgatatgaacaccatgatatatggtgcctttgagatatcgcataagcctcttgcaagtttcccagtgaagacttgtgggagcatgaataagctgacttagtttattgataatgaatgctacatctggtcttgtgagggtaaggtattataaagcacccaatgtgcttctgtaaagagtattatcaccaaaggttctccttctgtaagagagagtttaatgaccgaacttgtaggattagaacaaggtttagctccttccatgttgagacgaacaagtaaatctgtgatatactttgtttgtgacaaatacatgcctgaatgatcacgataaatttcaacaccaaggaaatagtgaaccggccctaggtcctttaaagagaaggacttgttgagatcaataattaactttgaaatgagatgagtgttaggaccagttactaaaaaatcatcaacatagataaggaggattatgatgttgttacccgaaccataagtgaacaaagaggtgtccgattttgaagcactaaaaccccattccagtagcttgtctctaagtgtttgattccatgcacgaggggcctactttaatccatagagggccttgtgaagttgacacacatgagtaggtttggtaggatcaacaaagccttctggttgactcatgtagacaatctcatgtagctcaccatttagaaaggcattggagacttttaattgcttcacttgccagttaagagacacggctaatgtaagaataattcttactgttgctagtttaacagctggagaaaatgtttcctcatagtctatgccaggtgtttgcaagtagcccttagctacaagtcttgacttcagtcgatcaagattgccataagcatcaagtttcaccttgtgaatccacttgttgccaatcacagtcatatgtggagaataaggaaccaaataccatgtacctgctttttttagagcatcaaattcttgatttattgccttgaacaaccttggattgtttaaggcatctgtagtgttctttggctcatatggtaaaagtgactcgggtaggggatatttggtggctgtgaaggctttgggttttctaatcccatttaaagaccttgtcttcatagagtgagtccttatagttgtagtactcgtgacttgattgtcctgatcaccactaggaggcatattgggggactgttggctatttgtcactgtctgctgcaatggtaaagtaccatttgtagccgttgggactttagagtgtataggtgggctaaagttgctttcgactgggacagatggaaagttggcagtaggtaaagaattatttaatgtatcatgggatgtatttggtatagggatagcatttgtagtagtgtctatgctagaaaaaagaatagtgtgggtaatagtggtgaggttgtcattttgtggggtagtaggaggtatggactgtggggtagtggttggtggaggggctgtagcaggttgtccttgtggtgatgtgttgtcaattccctcattagtcgtggtaggatgtgtggtgggagagtgaacaacaccaacattagtatatgtattattgttattagtctgaaaactaaaagtaggagattgattcaaggacaatacctgattggaggacacctttggtgagtttgacaaggcagggaaatgtccctctttgaaaatgacattgcgtgagatgtagaccttgccatttgggtgttcacacaaatatcctttgtggtgagaagaataacccaaaaatatacactcctgagatctcaattcaagcttgtgactattgtatggcctcagatggggaaagcagctacacccaaaggtttttaaaatattgtagtctggcttagtgccaaagagacactcataaggactcatattaccaataactggtgttggaagtctatttattatgaaaacagcacaagacatagcataccaccaataatccatgctcaaaccagcatgagctaataatgtgagaccagtttcagtgatgtgtctgtgtttgcgttccacacgaccattttgttcacttgttctaggacaaggatgttgaaaatgaatcccttggtcagataaaaaaccgagcaaatggtctatattcaccccccagtcagcttggacacttttaataggcagattaaattgtttttccacaagacttttaaactttatgaaaacatcaaaagcatggtttttttgagttaatggaaaaatccaaccgtacctactataatcatcaagaaaatgaacatagtatttgaaactatcttttgacacaacatgagagggaccccacaagtcagtgtgaatgagagctaaaggttgggtggccctactggtagataaagaaaatggcagtttatggctttttccttgatggcatgcattgcaaaattgtaatgcttttaaagatcctgtatgagagatatgaggtaaaagctttgccaatgtggaatcagcagggtgccccaattttaagtgccaactatttatatcattaaactttgagacagagaaaacttgtggagaaacatcaaaaacatcttgggtagttttattaatttcttgagaattacaagaatcgggttgtacattagaatgacaaaagcaagaacatgtacaacaagaattatctaccctagaacttgtggtaagatgacattgaatggcagaagtagatgactccccaagctagtataaaccatctttggccctctctttaagaagcacagtccctgttagcttgtcctttacaaaacaacaagatttatggaattcaagataaacatcattgtcagtggtgagttgagaaacactaaccaagtttttcttaatagcagggacatgtagaatgttttgtaaatttaaggaagatgaatgactagagggtatagacaattgaccaatatgggaaatgagtaattgcttaccattacccacggctagagtttcagttccttggtatgggatagcagtgtccaaggtgacattgccatggctaacatggttggtggcaccggtgtccacataccaaaggtcatcatctcccatatcaggaagaattgttgtggttaaagcctgtggatcataagtagagtcaatttcagttaaaaaagcatgagaggaagcggaactaccatacttaggggtgatgaagttcttgtcaaagcggtagtgacaaacagccgctgtgtgaccaatgcgaaggcaaacttgacacatcaattttgagccatttccacgcccaaagaaacaccctgttgtgcggccaggttcaacgtttggagcacgagaagaaggaacaccagagtgatgattttccccatttcttgactggtttacactcaagttggcttgcatctttagggaaagatcgattatactgctgtggtgttcaagtcttgattcatgagagagtaacaatgcctggacctcctcaaaagaaagatgatcacttcgagaagtgatgctagacaccactggatcaaattctggtccaagaccattcaagagttggataactaaatcttgtgtgttgactagtgagccagcaattgccaaagcatcggcagtggcttgagctttctcaacatattcaccgattggcagggtgcccttttgaagtctagagaaattaccctttaattgaaggaggcgagccttggtctgacttgaaaatcgttgttcaagtgccctctaaactgagaaagatgttgtaaaggttgccacaga

SEQ ID NO: 220049 - DNA, 1371 bp, Cannabis indica
aaaaaaaaaaaaaaaaatgcatagcatttattgtaaatttggcatcatactatattgtgattcaaatttgtgtaactttttgttatgtgatatatttgcatcataatttgacacaacaatattagagtagacttttaacaaattgagctatatttgacatattatatcacttatttgtagctccattaaagatactctgagacgagaagtaaattatagttgttaattagttttgagataaaatcttagggtcatgataactagccaataaatatagataattacattattagggtataatagtgatttttaataataattattaaatatttaaatatgtgagacttaatagttaaaaacattatattatttaacaccttcaagtgcctattactatcctgatttgcgtgagaacaagagagaagaaagggaattttgtttgggttttctaaaattttgagtgaggcagggagatgtttagaacgatgggcttagagttttgttttaaacatatatgagttttaagtttcagtttataactgagactaaacaatatcttttagtctcggttattgtagaatcttagaatatgaaattagagaaaacagagtaaaagaacaatgaagcagaaaaacagagaagaggcaaagaatgtaaaaccagaactaattcattattgagtggagaagcttatttatacacaaccttttacatcattaacagaattagttaaaagataaaattgtcagaatacagttgaaaaacagttacaatattagctgtaattaacatcctaaacagactttattcaactatattaacatcccccctcaaactaaatggtgttgaaaccattttttgtttggattttaagtatagaaacctatcagttgacagtgccttagttaaaacatctgcagcttgatcgaccgaaggcacatagcgaacagagagttgtttgtctagaatttgatctcgtacgaaatgaagatcaatctcgatgtgttttgaacatgcgtgaaagacaggatttgctgcaagtgccgaggcactctgattgtccacccatatgacaggagcttgagcaattgagacttgtagttcttataaaagagaccgaatccatttgagttcagcagcagtgtttgcaagtgctctgaactcactttcagtgcttgagcgggctactacttgttatttcttggcagaccagctgatcaggttgtctccaaggaacactaaatatccaccagtagaccgccggtcatcgacgcggctggcccactcagcgtcagaataagcatgaagagtcatgacagatgagggtcttatccataatccatctttgattgtgcctttcaaatacctgag

SEQ ID NO: 220050 - DNA, 3099 bp, Cannabis indica
ttcttcgcatttgactctttcagtccatcaattatataattcagacctacagaaaaaaatataataaacggaaagctgttatcagagtctattgcaggttttatattttcatttcagccaatacagtaatttaaaagtcgaatagagaaacaactgaaaaactcagaaattgccgcttttataacaactccgagaaacttttatgtttgctttctcttagcatgtctttcactaactcatactttagctagcttgttgagcttcatgtaggttccacacacacacatatttaacacttaatgatgtttcattctttacttaaaatttatcatttatatgacaatggcccaccttaattagctgattttgaaagttgtagttctggctttataggtattttaacaactagagatcactgaatagtcatgaactttttttacatggaaagtatttttagtaattatgatgtgcacttactgtttctgttatagcgaaatctgtcatgaaatcttcatcatgctgtttaactctgtgcttaatctattaagtttggttctattttatgtttttagatacaataaccttcagaagcatcatcacacaagtgaagacatggagtcttccacaactaatgttgctgcaaaatatgtcattcttgaggagatggatgagcaagaaaatggtagctgaaagccttattcatatgttcacctgagaaatctcaccttcaatgtaagcattacttttaactaaatggaatctatccgttttctttataaaattcattggaagtctcattttaaactgctcgtgcactattaatatatgcaacaatgcattagaaagtactttcaactacatatttcagcccattgcattgatattacgcttaagaatgcaaatagaaggttcttcattcttccgataattatgactaagataatttttttttatcccaagaatttcaactttttttgtaattctttgttgttcattctatgattggtttacaggcagaatgataatggtcagtcaagtggatagtaatcatattttaatcaacatttgaatgccacctattccatgcatattcttgtgtttctagcctaacccaaaaattggcatgtacaggttttcgcaaacaaacaaaaatttcattattcaaatttgcacgttgacgaagatttacaggaagcagttttggttagtttcaattttatagccacatttgcatttatttcttcttctttttggggttttctaatcaggggttctgtcaaagcattggaatcaaaatctaccattgggctcttcacaatcaaacaagcttgttggtgaaaatcgactaattagtttgtacaagctccctggattcccatgttttccccaaatataatattccctctttgtagctaaaataggggccaaagattacaacttcaagctgaaatggtttgagtgctacttttgtctttggaattttatgccatcattttggatgtacataataaatgattttttttttttttataacaacataataaatgacttgagcttgtgttatccctaaagtaaaatgcttgccagggaatatattgacaatttatatatacctactcattacaataaattgttggttttcaagtgctgtgtcaactgatgttcttgtgattttgaagccacaaatattaatgataatgttaaatttaggtgaaatgtttattcaaaggttgacacattatttagaagataaggttgatgcagccaatcttcatggcaatgacataatcctcaagatagttggaatatattattttatatagccacaaatagtagattaatattagaccataacaaattatgataaaagactaatatctctcatcagttcattaattgacattgaattttctcaaaaaaagtaacttcaatgagaaggtgctggtgaccctcaaatggcctttctctttcgattttgtcgctgagtgttgcggtggccctcttcacttcagggagggtatctgggctctagagtgttggttctcttcccctttgtttggatctcagtgtatgtcacgagtttctttttagtcgttctggttctggtgcacaattgcttgtgttgagttttcgaagttttgtagttgttgaagggtggacgtgcgttttaccccaaagggatgtgcttccctgtcccgtctattctgaccctaaatggaaaacagagtatgctttgttctcgtcgaaagttcccattactcatttgcttgcgattgcttgttttgagctgtcccattggctactgccttttgttagggagaggcactttgaggcctttatttgcttgctttaggcctttttcatggggcttgtctctctagatgctcctatgtgagcttattgctcctttgtttcttggtgtggttggttgtaattgtttcttggtgtggttggttgtaagttgagtcttcttcttgtgagatcgtgagatttgttcagctttgtctctgtctaacttgtaaggcgatgtccctcttttagtaatgaattaattttatttctcaaaaataaatacatacacaaataaaatttttgtgggtagacaaacattgacttttttgttctttgttgagaaaaataaaaattcatgttaataagtaaatctattacatgatgtaattgctcaaagagcataattaacaatattaggcaaatcatgtcgtttacaataacaggaaagaaaatcctaacaccttcaactaaaagactaataaactggccgctagcgatgatgcatcaaacaagcgcgaagaatgctagatctcaaattcatatgaacacgtgacaaatcacacctattaatggctatcagcccggctggactccaccagatctgaagtcaataaatggaacccggcataggcaaacacccaaattgtcgttaaatcgaccatcaaagagtcagaccacgtacgttgtcccaaaacacttacgcacaccaaaaagatctccatagaacagggacaaaacattatgcagcagaaaaatgcacatcggagatgccaaaggaatcaaagagatgcctgaccagagccacac

SEQ ID NO: 220051 - DNA, 2536 bp, Cannabis indica
taaacattattttaaacaaatatgtttataaaatggttacccgttagatttaatgacaaaattatccttcaacttattgttaataataatattattgacttaaaataaaatcaattaatttttttaagtattataaaatagagtgttttatgaacatttaaatttatataaatatatttgatgtatattaaattttttgaacataaaattattaaattaaaaaaataaacacactttatattaatataattgactataaaataatatcaattaattttttttaagtaatataacatagaattttttatgacaatttaaatttatataaacatatttagttatattaatttttttgaacacaagtttactaaaattaaaaaaaaaatggacacaatttctattagtacacagagtacatttcttctttctcttctcttctaattttaccatccatacttcttactcctatttatagagattgtggtttgatggtgacccaatactacacatttttttatatgattttgtacataagaccacatcctacatttataagtagcattcgcccaccattggacattcgtcttcaacttttacttattttaacaacatgaaggcatcgaaccaccatcaaatcaccatcatgcctggcaaaaaaaactaaattttttgccaaaaactcagatctggctattttcgactcttaatatctaatatcaactcactagtaacaaacattaattatacaatttattcctaaactaataaacttataaataaaatcatttaaatcacacagaacacaattaaaataaaatgaaaaactcacattcatggtgtagtgatcatatagtttagagattctaggacttgagttggtggtcttcggttggaggcacagtggttagcagccgttagttactagggtcttcgcgtgcatgagaagaagagagcgagagagatagagaatgagaatagagaaagaggagaggtgagtaatgaaagtagtatttttgagtttaataaaaaagtgacatatgtaattactaattttgatataattaaatttagtgtatcaattttatcaaattacatgtatacatgaatgttaattcaaattttctttttccaacaattataacatatttgttttattatttttcttttgagccttccgtaaaaattaatcataaaaacaaccttttgaaatcgcgaaaaatataagataaatcgtgtcaattgcccctttaagtttaaacagtcagtcctatctaatggttttcttaaaaatcactaatactctccacaaagagtacaaaattatattcttataaattaataattaaactcgaaaattatcatgtatatttaatttcataattgagcggcaaatacacgcgacgcagagacaaaatactgctcgctagacgtggaagccaacttatctacttaacccatataacagtctaattgtacgtgacacgtggcgtaattatagtgcgtggttaggcaccgcctcgggatccttatacgtccacctgtacacccgacaggtcgagtggatgaagtgggtggctcacgtgaccgtaacgccacgtgtcggtacatgagcctaatcacatgttcgagaacacttccctacgtgattcgttggccaaaattttttttgcctagttggaggccactacgtccgtctacccaataaaatagggacacgtagataaaattagcggtgtgattggcggaaattcaaggcggtgaacgcgcgggggccgagtccaagataagaatatctctatatctcgcttttgtggctaagtcctctgaacgagggtataattgtaaaaaaaaacactaaacagaattagaaggcttacaacggaaacatactagtagtactcctaatttgaacgcgaccaacggaaaagaataacgaaaattcaaccctcgtttttatttatttttttttaatttagtggatagactatgaaaattcacagatatggatgaaatggctgcttaatatataattattaaaaagaaaaacttgcggctacgctttattaaatatttaaattattattttttagtattataatttagttttttttttatgaaatgatggtgcaagaacttcagggtatttattcttattcattgaatattgtgggtcttgttttcaaatcttacagtcagtcagtcagtcagaagtgatatagttcatgcattattatacagctattttcttgttgttttattttattttgtttttaattgatttaaatatcttttacttcatttgattgatgaggaaaaatacaatacttcgagtttcgaaaggattaagggcaagggaatttagttatgatatagtcttatgtagtcatatgattttttattttgaactctatgattcagtctatatatatatatgaacagatttgaggtttattgtcaatttgtcataatgaagccttattttaaattttaatattactcgactaaaacaaattatttcaatcactattcattcatt

SEQ ID NO: 220052 - DNA, 2895 bp, Cannabis indica
ataataaaccatgtttctcctcagatatgatccttgtaacaactcatactctcaggatttagagggtagtggtttgatatgttcatctgttgacatacttcctactgaatttgcaaaagaggtgcagtgtttcaacataatcaaattcagtgttatttcaaggaaattatgtggtgataacttttgatgatttaaaattgcaggcttctcaacacttcggagatatattatctgaatttgtgggatatttggcttcaacaatagacattaaacagttaccttcacacttaagaagagcttgcatagcccatagaggagtgcttacttccttgtatgaatatattcctcgtatgctaaaatccgatacagagtaagcttcaaaatctctcttcattaaaataagctcagttctgataattttggtttctagtcattccaagtatatatacatacattacaaggttctgcctattcaaaaaatgcagggaaatatcagagaatcctgaaaattcccaatctaacaagaagaaatacaacatactggttagtttccctatttaaattacagctttcactacttcaatcatacccagtttggaaaataataatcattgtaaaaatactgacaggtgtccttgagtggtcatctatttgacaaatttctgataaatgaggccttagatatcattgaagctgcaggtggctccttccacttggtcaagtgtcaagtgggtcagagttcaaaagctatgtcatactcagaacttgaagttagtagacctttcataagattgattatttgatatttattatctttttgttgtggtttgttgataagtctttttcaattttgtcttgtattcacaggttggtgcagatgataaggctgtactggatcagattattgattctttaacttcaatagctaagccaaatgaaaacaatggatttttagataatcaaacaaataagctctctttgataattggtaaagtccaggagatggaaaactgaaaaggaaaatagaacaacagaaaggaaaactggggttctaattcttggagcaggtcgggtctgtcaacctgctgcaaagttattagcatccattggaagcaattcatcacctcaatggtataaaacatttcttcaagatgattctgaagagcttaatgatgttcatgtaattgttgcttctctttatctcaaggatgctgaagaggtaaaaatacaaacctttttctgttcatttcttaagatgcaatgataaatgacaatttctaattctacactatttgagttcaaatgagtgtaaatgactgaaattgaagtaatggatgcagaccattgaaggtattccaaatgcaacagcagttcagcttgatgtgcaggaccatgttagtcttttcaattatatttctcaggtaagaaagaatcacaaagaccataaaccttaaatgatgtgaatcaccaattttaatctgagtggttcctcttgtttttgttttctcacgcaggtcgaagttgtcataagtcttttgcctcctagttgccacatcattgtagcaaatgcatgccttgaggtactaaggcatctcattattgttttcagtgagaaatatatgttgaaaatattgaagaaaaaatagtggcatgataattttaatatgagttttcataaacagctgactgcattgtttttctgtcaatggacacagcttaaaagacatcttgtcactgctagctatgttgacaattctgtgtcaatgctagatgaaaaggcaaaggatgctggtataacaattctgggtgagatgggcttagatcctgggataggtaaatactcttctgctatgtcctaatggattaattcattacctgaatatctaaataaagaaagaatcaactaacaaagatgagaatttggatgtttcagatcatatgatggcaatgaaaatgattaaccaagcacacgttcgtaaggggaaagtccggtcatttaattcttactgcgggggactcccttcaccagcagctgcaaataatccattagcatacaaattcaggtatatcaagctatttccatgtattaatctgtagtgacattctacttccacctttagctttcctttctatggaagttactaacttagaaactatttagttggaatcctgcaggagctattcgagctgggcgaaacccagctacctataaatctaatggaaaaatcatacatgttgatggtaagttttagaaaatcacagctgagatatgaacaaaacaccaagacaattctttctttcccagtgaaaatatacaaaatgcaattccatattcaaatttgcagtacatgtttgcaggagaagatttatatgattcagctgagagactgcggatacctgatcttccagcttttgcattggagtgtcttccaaaccgtaattctttagtttatggagacttgtatggaatagccaatgaagcatcgaccatatttcgtggaacactccgctatgaaggcaagattttatgagtttgttactcttaatctatagaagattaacttacgcatttggtatgtatgttatatgttatggaacttataatgaagtgttactttgttttaggatttggtgagataatggggacacttgcaagaattggtcttttcaacacagaacaccacccccttcttaaagatggaaagagacctacattcagagctcttctgctagagcttctcaagattaatgatgatggttgtttaaaaagagaagaggacattgctgaaaggattttcaggcttggatattgcaaagaaaaactaactgcagtaaaggcagccaaaactatcatgtaagggtctctcatagagaaattaaagagttctacactca

SEQ ID NO: 220053 - DNA, 1352 bp, Cannabis indica
gctctagaacaattgtcgaaaagtagatcacggagatcaactctgccacatcctcaatgttcgagcaaccttcacccgtctattcatctcttcatcatcaaaattagagacagatagagtatcactcctagcacctcagccactgattcagttttgagcactacatttgaagaaataggtcccctcttcttagccgataccttcctttttccttgcatcttagatccaattgccttattccccagagaaaaagctttgcatggtcgaccccgacccactgtggcaccaaaaaaatctaaagtcagaaccctggcaaagtgtttccccaaaactaatacaaacttatttactatacaaataattttccttagaagctttattattgctaacattgaaagttacatcattggtgcacaatttcaccattcccatacaagagtgccccttgccccaaaatacattagacttggtaagtatgagtttaccagactcataaatggccttaatatcgagttttaaaagtaagtctccactattcaagttcctattcaagtcaggcatagaaagcacattcaccaatctaactttatttccaaaggtgaaaattacattaatagtaccatttcctaatacctttgattttacttcattgcccatttgtgtctcgggtaccatttgactcttcaaaggtcttgaacaatgacttatcatatgtgacatgaacactgacacatgtatcatacaaccatcccagtacttttccttccacagaattcacctcactaagagtagtaatgatatcctcctcgatagcattcactttgggttctttcaagtattttctatgtttacaatctttagcatagtgtccacttttgccacacacaaaatatggatatttttcatctttgaattggttaggattagactttggacccaaagtgttactatttttgttttaccttgttcttattaagaactttagaggttgcatttgttttgcaagtctctctccgttagacccctccacaaccttatccctacatatcaattcatcctcaattcgaatatatttttggatttcctccaaaaaataatcctcatttttatgaaggattctcttcctataattcttccaagatggtggcaatttgtccactattgtaccaacttagaacaccttgggaaactcaattttgagcatttttaatttgttataaaaatcacttgaagctcatgaattttggggtagaagagggtttgccatcaagaaattttaaacccaaaatattaagaaattaaaaatatcttagtaccttcttcagccttaatttttttttcaaggtgatccc

SEQ ID NO: 220054 - DNA, 3291 bp, Cannabis indica
taataatttttttatttaattagctgtagctttttatttgactcatctttttcttaagtttgcaggaaactctacatttctctctctctctacactacttcaattgaagagctcctaacatccaccattgcttctgtcggctctgcaatgccgcaatatcaacaaatgtggctgatcggagagaaaaggaaaggatggaagaacttcaaacagccactgttgcaacagccactgttgcttccgtcggctccgtaatgcaacaatctaacgattgtggctgatctgaaaggaaatgaaagaaaaggacttttgtgaattggtaaggtgcaggtataactagaaatgataaatctaatatcatcataacaagaaatgtgattttagaatttgagaaatttatatatatacttgaagtataatcgtacccacaccacaatgcaaaaatgaatgaggtttaattatttttttatttgcatgttttaatgtatacttatgtctatcttctcattcctcttttactaagcctttattttatttttcataaaaatctctattgattcttgtataacaatggattgaagatcttttgaagaatgtacacatttaggtattgctttagcttatcaagctttacattacacaagaattcataatattcattttatttctatggtacaccttaactttttagttaaaatcactttcttgtgtatttagatacttgatttaaattattactttctatttaaaacttccaaattatagtaactcaatccaaaagtaatttctttggttttaagccatgattatttagttttgcagattcttttatacttctaatgtgaggaatacgaataataaaaccaggaaaatatggtagataagaagatgtccacagtttagtagctattccaaagttgtaaggaagactttgcctctggttagattgggattatttcgccttgtgaagatatttaaagccttggttctattttagggtatgtttaattcagccatttcatcattcaaagtcctaaattaagagttatgaatatatttgtcaatgtggattttatcttcggatttgatgctagcataaaaattgatgtttaatttttttggtttgatagtggtttctactttttttttggttacatattttgattaggaatatttaaatacatttatgctaaatatctgggttggactatgatactactttaaaaataaaataaaaatagatttttcctttatttttacttataataataataataatatatgtctgatcttggttaggtatcatcccatttctgcaggtatccgttcttgcctcttttctttgaaaactgttgttgaacctctctctgagttcctctgtctgtcgatcttactaagaacaatacagttcgaagtctcactattacctcacaattcaatactcatctcagttctccacatgatcaagggggtaataggaccactcactttgccatcggcgaattaggtctatggtaaacacctcactcatttactctctctatcggtttggctgcatacaaatcaataaaattctttcaaaaatatatatacatatatgtgcttgaattgaattcgttaattattttgaatcatccaatactaataacctaccaagttataaacacaaataaatattcatgatttttggttttgttatatacactcacatttttctataagttagttatttaattattttgttcaatagaagcaatcaatctagaagagattttatttagttgcggtcagtacagtttaatacaagattttgcaagtttggaatgagccttagaattatcaactttccgctcttgattcagatgttagagcaatacaattggtgataaagaacaagcttatatacaactaacataaaggagtttagtagtatagatagagatcaaattaatgatgtatgtaaatatttttaactcttttttggttgtaaagtgctgaattgtaacttgtaactttgttcttgtatacacaagaaagctaatgcctaattttccaatataataggcacattggttttgttcctataggatagagacattttcttaaccctttttttatatgacttttaagtgtacatattactaaatgtgtacttgtgtgtatacaattaaatgtattaacacccaaaaaaagttagattatttaatatgaaatattggaaagacatatatcagtgaccctaatccctaatttctatctcttcgtctctagtttctatttctctatgatttttgataagtaagatgagtcagctaatgacagacgtgggagctcgcagcttaggaagttgacggtaagggcagaggtcactgctaaacagagcttttgggcaagtcgacaatgggggtaaaggctcacacatttttctaggtttcatacatgctcaacatcgtcagagaagtaagggacacaggcctgtgatgcttcatgaggcctcctcttctatgacaatgatttggtgataatgccaaatgatactctccctccttatatcaattacctatttctattatagttcatgggtatgagacaactaaaacgtcatctatcttatttttccaccaaaaaaaatcggtatttttgggcaaaagaattactttcactttagcaaaaatgatcattgtgaaataatgtttactttcctttgcaattatgtattaatatatttcgattttgattgtaaattgtatctgaatttgagtatgaattgtactctgtacagtaaatgttagggtaatgatattcttttaagaaaacaatgaaagcaagataagagatctcaactttgttgttgtcatacgttatatacatcttatatgtgtagacatttttttttttattgtgaagtcaataattaaaaaaaagttctttatttaagaaaaaatatatttccattagaagttttatgaaggaagagttaaaatataattttggacttaaaacataactaaagatctcatgtctttattaaaatttttagtcgaaaaatacaaataatgaagagaaaaaatacatcattatcttcttcttctattttttctattaaaaaaaaaaagacgtcttccctatcttttaaaactttaagatttatttttaatttttgttcttattctcatataggagtattttcagaaagaaaggaaaatgggagaggtggaagaaacgatttcatttatgtgagaagaggagggagagagagaaagatactaaacaaacaatgtattaattaat

SEQ ID NO: 220055 - DNA, 1960 bp, Cannabis indica
actatgtctatttgagaatttatcacttattgagggcgaaactgtaaagaaagagtttatagggtatatttattaattaagagactttaattagtttaattaataaatataataaatgacaatattatttaataattaattataattattaaatagttagaatcgacatttatatggttgaatgtgaaaattgacaatttttgagaaaaggggaaaaaaatgataaaataggaaagttgcaaatgtgaggcctattttcatattgccatggccggccacatcattaccctttatcatttaattttttcaattttttaatgccaagtaattcaaccccaaccctgtgtggtattctataaatagaaagtaaaggcttcagtaaacacacacaacacagcaagtagtgcccacacacagcaagtagtacctcaatcatagtgaggaagactgtgaagaattcagattcaacaaagaaggagtaaaataattccaacaggtatggtctgctatgctcactttaattatgaagatctttctacattttgtttcatatgtggtgttcttggccactctaaaaaattttgtgaaagattatttgacaccccatttgatcaattggaaaaatcgtatagtctggatatgaaagttgtcccatgacagaaaagccattcaattggtgcaagatggctgcaatcgggttcaataaacaaacttggagacgttgctggcatgggtggttcgatgactactgccgcccatacggcaaacggtgaaggaattcaaataggaagattccagtcaggaggttcaagcactaaaaattagggatcttcattgattcagccgattataaaggacaaaaatgaggctgtgattaagagtgcaaatgctgagaatatgggagagttgtctgagaaaattcgaaatgtagaaagaggaaaatcacctattgatgaaacagctggtgaattaaatgggtcaactgtggaggaatccttgttgattttggagaataaaaggagaagaatgggccatcttgacttacaagaatacggacactattagtttgggctcccatgcatcaagcccaatcaatatgatcaatcaaactatggacaacaatggcatggaaattgaaactgaaacaaatgttaacacaaaaacatgtttggggcggtaactatttcgcaggcccgccaagaattatgaatgtcctaaattggaattgtcggggtcttgggaaccaacgggctgttcaattcctaaaagagatagttactcaaaagaaacccaactttatctttttatgtgaaacaaaaagtgataaaagtaaaatggaaagagtgggtcgattattggattttgaaggggtctttactgttgaagcccaagggagtgcaggaggcttggcatttctctggaaatatcaagaaaatggaagtatcatgggtttctcacaaaaccatatcgatttcttagtggagtcctcggagaggggcagatggcatctcactgggatttatggagagccggtgcgtgcccaaagacaccaaacttggaacctgttgaggtttttagcaagagactcgaacctaccgtggtgtgtaatcggagacttaaacaacattgttagacacaaagataaaaggggaattcgacgatatccctagcacctcatcgatggcttccaatctgtcttagacgagtgtggtttggaggatatggatttggttgggcacccgtatacatgggaaaaaggcagaggtagtagcgcctggattgaaatttgactggacagagcattggttaactccctttggtctcaagttttctctcttgcaactctctttaatcttgaattctcttcatctgaccactaccctttgtggctggaaattgaagccaaacaggtgctgagtgttaataaaaaattcaagtttaaaaatgcttggttaaagga

SEQ ID NO: 220056 - DNA, 4588 bp, Cannabis indica
gtagcgtgccttagcattagggcgttacaagcagtttcctttgagctaatttgaagtacttaatgatagtgaactcattttagtgattatattagcttattaaaatcttattaagtcaactaagtgttttaaggatacaataattaaagggtaaattgtaattttagtccctactaattatagactttctatggaggtcactaatcgatatgatagaaataatggataataatatagtgtatttatatgttaggattttatgccctaaataaaattcaatttcaatgtaaccttattgtatttatcaataaaagaacataaatcattttattactctttcttatattgattggtttatatgttgctttcatgatcacatatttgttatataaattctattaattcctaatcatattgttactcataattatagtgttgtctacacagtaaaaaataattgtgaccatatgatttaaactattttagtctcataatttatcaatgcactggatttatactaacgtgatactaagcgatgtggtctactgtggaatgtcttttctagggcattagtaaagtaagcttgtataggatgtattggttataaattggactggacctatattgatagtagaaaagatatcataaacttgttgtaatatattttctaagtcaatatcacttagttgatctcaatcttgagatggttaggttatagcctaattgtagtacacgtgttctttgacttgtttgttacctgcttacccatatgagtgccatacatacatcttgggaacacggtagtacaattgagtggaagcgttaatcatagatatagaatctataacttctataaatatttagaagtgaagtgatggtttccttagagcttggctaaacaagttaaatggtagaatactcattttagtaattgtaatagaggataattgattatttagattgaaataatagataattatagcatatcttcatttggtatatagagcattttttgtaatccagagtgcaattctgaatctatagtggagtcaagaggaattaataagataagaaatttacttgtaaatttgaagatctaacttattgggagcttgattcataagcccatagtccccatattatttgagataatactgccttgtagactcaactaattgatttaataagtcaattagaattctaaagaagactatgtcttatttatgaatttttactaaggaaggacaaatttgagaagaaaagagttgaaatggcttatttgttaattaagacactttgagggtctaattattaactatatttaaattgtaattttgtttaataattattaaatagattaaattattatttaaataattagattagaataatgttagaattgcaaaagagaaaagtttcattgcatgaaattaaatggcaaaaatcaaacccaaagggccttatagtgcaattcgcccaagggtttaatttaagtgatattatcttttcttaaagtccattctattctaaacactaacctagagagaccctataatagggaaattatagctttgattcagaacaaatattttatcgacaaaaaccctaaaattgaatcaaaaaaagctctcttattcctttaagatttttgaaatccctcttcccttttcatattcttaaatttggccctattagttattgagtgtttgcccttatagttcaaggaaatactcagatctatgtgtaagattgtgaagaagaaggtgtttatcaattcaaggaagctatccaggtttagtacttggtgatattatgctacagaaaggatttgagggttagagtaatgaacggaaggagtcacatattttcgctgtcattaatgtaagattttgttgactcaaaaatctagacacagatttttaagctacacatgctcgctagattggcgagaatgagatattagctaaatataaatatgagagacacacaaggatttatagtagttcactccctttatgacgatagtaattgctaagctacatctacttcaagtttttattctcacgagctgaattatagaaaaatggctaagtcaggatgctttaatttttaaagagataaactagagagagatgctctgaccttatgagcacttttatgcacttaaaaaatgagatagtggatctctccttttaggggaaggaggtcctattaactaggaataaaataattcaaaaaatatgataagaaaaataaatttaggttgtttttaactctagatgatgatataacggtaaaaataaacttctaaagttaattgtcaatttttggagtttgagttgcatcggtgggacccgttttgggtaagttgtagcttaaatttgtaactctctctggagtaaaatttggagtcaatagcttcataattgcattgaagtacaagacatgaattgatagagcattgaaatagctttgaaacgcaagttgacacatgtaaattggatcaatattgagtgacctatggccattttactaaagactgtctaggcctagcgccctggttgacatctgatgtcaacctggacagtgggtgagtgggaaaacacgctagggatttattttgttgcataagtgatattttgacatcacttagtccatttctgtgttctggtgaagcttgtcaccagttctcggagatattgttgttctgcaaaaatgggaaactcaaaactacctggtttctgagtaaatcaccttgtcggaaaagtgaaaatatgaagttgtgactttgactcttatgacttcatggctcttagttattatgaaaaactagacaaacggtcgaaatggactagaattggataagccaaacccagtgcactagggcatatgtcaacctgggtcatgggcgcttattttggagcttctaggatgttgttttgatactttcaagattctagaacttgaggacaaggtctcctaccccatttttgccatttcagagagaatgcttggagcagaattgacatttgaatgatcgaaaccagtgcaccaggttgaatgtcaacctgggtgccgaactcaatttccaaaccctcgagattgtggttttctcccaaaatttacttgtatatttgttattttggatgatggaaaaaattctcgaaacactttttttggaaaattgattagaaatagggcatttgacctagcataaggtctcaacctgggcattgggtctagtttcaggccacctagaagttccgtttggtccccagaaatagttaaatcataatatttagtgaaaacagagaatatgccaagaggaatttttgaaaaaactcctcaaaattggcttaggttgaaaaaatgtcaacatgggtgttgggccagccccagctatcaacttgggcattgtacccttgttttggctcccatgatgtgttgtttcttccctttaagcacttattttcatgtttttgatgaagagaaagaagatgcacaagtcatatatttgatttgatgctttcaagtggcctagattaacacattgtcaacctagggattagggtgcccgagcaccaggtgtctaggtgctaaaaagtgaatgttctccaaatctaattctaatgctttaaagaagttcgtggtatgtatagttcatgtcccaatacaaattttgacccatttacactaaaatagtcttggaaactgaaaccagggtcggccctgaaatttagtgggctataggaaaaaaaattatttttgggcccttatttagaaaaaaaaatggtgtttttcaaaatcagcaaaaagaattgtgtaattttaaaaggggaaaattttttttggggccctggactaggtgggccctaggtacaggcctagcccgcctatgcccagcgctggacctgattgaaactgtaatgccctattcactagagatgtcgcgtgtgtgattttataaactagttcaatactaatatattaattaattatcaaaaactgtaagaatattaaaaacttgactaatataaaacactggaaacagacattataatgatagtaaaaaaggtattccgggaatccctattatatgaagttttacaaaataacaatatacaacgactcctcaaaaacataaaaccaaaacacacaatagatacatgccaaaacaactcctggtagcccggcacgcaagctggtcaggtcaatatgtacattgctagagaagactgtcgcctcatggatgtgccataatttggcaatgacaaaactctacaacagtttcattctgtcactgacgcccgtacctacgctcgatacgtcaccaggaggaaaccttacaatggtttcattctatgccataacctagcaatgagaaaaccttacaacaatttcattctatcactgacgcccgtacctacgcctgatacgtccccaagaggaaatcctacaacagtttcattctatcactaacgcccgcacctacgcccgatacgtcaccaagaggatcacatcatctaatcaggtgagctcgtacattacgtccatagtatgatcatattattattgcctaatcagacaa

SEQ ID NO: 220057 - DNA, 5046 bp, Cannabis indica
aatcacgtaatacgcctatgctagttagggtgttacagatatccacgctttcaatgaaagtaccaaactgttgaccttgaaaagtgatcaactaacagtgaggtcgtgcagatccgatgcttgccatgtgtgtgcacaaataagaatgaaaagcaataggcaatgtgattttttatagaggttccgcccccttgtgatagcaggaaatgacctactccccttttagttgtattataccaacagaattactatccagattgatatagggtggatctgctatagtacccttaggattacaatgtatgaattgatgtctagcagaactcaagtgctggacatcctagcttgttgtaccacctaggcttgggtatgtgagagagagaagaaaagaaagagtgtttgacacatagagagtttgagatttccagcttagaggaggcttaggcgacttaggtttttagttagaggttaagttaaggccgtttatataggagaccaaaaccctaggttacacaattcaaatcccttaaaaataggtagttagttagatatttacaaaagacaaaaatgcccttagattctagatattattcagccattctattgggcttttggggcccaattcacagcccattcttgatgtccacgtgcaggagagtcctatgggacgtactgagcaatccttggccggtcagggctttgtgttaaccaagctggcttgccatgatgatgtccctggtctgcctggccatggggccggccaagagtggcaggctagctctcgagagtgagttgtcttatcacttgatccctatctgtgtgccaggttcttcatttgctcggatactgactaggcctaccttttagtgagttgtactgccacgtggaacatgttctatccacgtaagcatgccacgtcatgaggataaaaactgggataacaaggtgcatctatgacggtactaccaaaaaaagtagttgtcttcaaaacagctcgcttcacaatgagatttaccttacctcacgtaagtgaattgattgccacttaacggatgcgatgcgacaaagttgtccctacgttaagaggtccatcactaaggtacggctcctatgctaaaagtctaatagtgcattagcacagtgagcatcacttcagttaagcttggatgaagtagaaatttttcaactgctgcatcaaagtgtattcttttttccttcaacttagctcatagtaatgtaattatacttaatttaatgagaaaaagcataatcaaaagtttttttggtacttcattcaaattaatcaattatagctcacagacttgacgacactctttaagtgttgagtaaagcttgtgagttggtcttgagataacttcagttatttatcaagtgaattaaactctaccacccacaaatcctcaaataagtggggagtgctcacacgtgtacaccactcaagattcatgatcaagaaggcccttgaggatttggtatggcaagtgactaatgaaggcacttctttgatcacttggggggcacataggttatattattgtataccagagccatatgttacttccagtaatcgatttccttaagacatggtgtactgtgcaagtgttaaatggtcaagcggtaacggatcatgcaaaataaaaaaaatatatattggaactaaagttttattaagatggaaataattttttatttaactaaaataaaattctaatcacatttcgctaaggcttatccactttgaaaggctgcctgggaacgaccaactaaaacactaaagctaaatgctaaaaataaaaaataaaaataaaaaggaagaatggactcaaagatggtcttggaggcctgtcacatcaattagagtctcctccatacctttactctccccaggaggcgcctcatgaatagaaggacgaatgttgggatgctcaaggttgtagccttcaactcctgaagcttctccagaaactgattcaccaacatttacagtgaagttagattcttcaaaagattctatagcaaaacacctctaacagcgattgatgaattctagagcatcatttttagagaaatcaatctagttgaacaattgggacctaccattggcaactcgggttgaataaatggcattgaagcataagtcataaggtgacatcaagcatagcctcatcttcgagaataatcactttcttctccaagaccttcacttggtcccccaggtcatcagccacaacaacctgcttctttaaagaatcatgagaagactgctcaagatcagaagctttcttctaagcagtcatcaagttcttcttgaaggtactttcccaagacttggcacttttggccccttctttaaaattggtcacctcattctcaagagaagcaactttttccctcaaggcattcacctagccttcagcaacaacaactttttccttcaaggcttgacctttaatcgaaattctaggctgatattgtatgtcaaactgactcaattccattgctcactttaagagtcttcctgacgactctagtttttgcaacacttgacagagagggtggttggttagtatccttatggcatgagcctaaaagtatagtcttaacttccatgaagcaatcaataagcaaaaggaaagcttctcaatcaaaggatatctggactccgcacccagcagtcttttgcttacataatatactgaagttgtacatttccttcttcttgccctaatgcggtgattacagcatgatttgacactgccaggtacagaaataacagctctccatcaattggtttggatagtattggggccttcactaaatgttcttttaattattagaaggttgtctcgcattctaatgtccattcaaatttgtgatttcctcgaagtacattgaagaatggtatgcacttatctggggatttggatatgaatctgctaagtgttgttattatccctgttagcttctggacatctttgtgcttcctaggtgaaggcatgtctacaagagctttgattttctcctggtttgcctcgatccctcaagaactgacaatgaaatccaagaattttcctgatgaaactccaaaagagaatttctttgggttcagcttcattgcgtactcccaaaaatggcaaaggcctcttctaaatcttggtagtggttttcagatgtcttcaactttaccaacatgtcgttgatgtaaacctccatattcttccctaagacattcttgaacatcttgttcaccatttgttaataagtggcttcgacatttttcaacctgaattgcatgaccttgtagtagtagattcctttatcagtttggaaactagtgtgcatttttatttggttatagccagagtatgcttccatgaaggttaacaattgaaacccttaagtagcatcaaccatctgatcaatgcgcggaagtggaaaatagtctttaggacaagatttgtttaggtatgtgaagtctatacaaatcctacatgtcctattaggctttgggccgaaattggattgggaagccatgcgggatatagagcttccctaaggaagtcgatgtgtaaatttgtccacttttgttttactgcttccaatctgttggatctaaaggtctctgcttttgtcgaattggtttagtgttgggatttatgttcaatgcatggaaaatagcatggagactaatgccagtcatatcagcatgactccatgctaacacattgctatttgccttgattgtggaaacaatttgtcattttactacaagaggtaggttcttccccacttggataaccttggtggaatcttcatgatctatgcatacttcttccacttcctccttcggttctatgactcgttccacgagaatttgtggatcaagctcatcttttcggatcaccccaactgattgttgggaagatattctggcttcagagttatttccttcccagaccatgactacagttctggttaaaacgatatagcaactccgctaacttttctgatctcctctaatagttcctatgcttctggtattgctatggaactttaagcatagattccggatggatgtcaccactctaaattccataaaatatggtcttcccataatagcattataagtagtatggcaatcgactatcataaatgtgttgtacttgaaggaggatattgtgttacttctaggaacttcccaatttatagtcattgaaagttgtatatttcccatggggatcaacgtatctccattgaagtcttgtagttgaaccagatagggtaacaagttggcttctactagagcaatggtgtggaaggctcctttgaaaatgatgtttatagagcttccattatccaggaggatttatgaaacccttttgtttgctatttgagcttctattaccaatgggtcattatgagggaagtgcacgtgccaggcattgtcttctgtgaatgtcatgggaaaattcatcattcttggatgctgagtaggtgattgcaccaagtgaagctttgccttgattcaactcatttaggtaccgcttctgcgcattctgagtgcttccaaaaatatgaggtccacctaaaatagttgctacatgaccatctaaggatggtgatgtagctcttagagggcacggattttcaagattgaggcctacaactactgctgctgctggagcgttttatgccttatgcatttggagcttgtattctaggaagttggggatggcctattccttgaggaggatttatggctccttgctgtcttggaataaaaagttgtccatgtgcaactgccttgcccagatagatgactgggattctcacccaattgattaagtgttcgttccgtactaacccctctatttcatcttttaagtagtcacactcattggtggtgtgaccaatatcaccatggtattcacactttttgtttggatctcttttgtgtattctacccttatacattggtggaggcttcctgtagtgtaccatattacaggttgccttgtatacatt

SEQ ID NO: 220058 - DNA, 3209 bp, Cannabis indica
aataaacacacgaatcatagcgatatgtcttcattatgagtcgaatattacctttcatgtattgaaatatatttactatataacaatgtacttaagcgaataaaccctaaaccttatatttattcaggtcctctaaattttttttcaaaagttaagatgcgcataaatatgagaaaataaccgacagactcagtaagaaaagcttataacataacatatacccgaccagtgatcaggtggccatacacccatcatcaagtcataatctacatcaaatgcatataagtcttgaacgttcttcacagtatgattcaccataatattagcccaacactatagttatatctcaatgacaacatcaatccataccataagtacaattgaccataatatcaacctgacaccatagttgtgccgccatgataacatcaactcgtactatccaaaggtataaccaattataatactaacctatactcaacactctagtcatattgatgtggtagcactagtccatacttcttgaattaccaaacacatataatcacgatgtgtagatgcatacttttgtacatcaactatcactataactgaatatgtcatatatctggcaatataaacatgtacatatatatgtgtgttatactattcttacctcaattataattccaagcgtgtcagtgaacctgaatagaaataactactaatggtcgaaggccctaagtcacgttcataaaagagtcgataagagtttgctccagaacacttcctgattctcgaaaagaatctagggttttctactgcactacgtggttaaaataccctaaaataaaatctatattttggctatgaaatatatatcatactatatagctcgtcgcaagctttgaaacagtatatagaacatctaaaacagacacccgagtgaaaagttatggccaaaatacaattttaatcatcccaaaattaccaaaaacggcagatcgaattactaccccttgtaaaagcggtagaccgtttttgcaataagaaacaaacatattttttcctcccgattctaactgaaacctttccaaactgtccaaaacttctaaacacaatataaccaacatatttcatcaagaaatcatgtccaaaaacacaatggaacacaatccaccatgttgaagccaaatttgagttcttaggattgtaacttgcaccacacttgttgcagccaatcaaatcccttcaaatcagttctaacaaatcctaattaatcttaagaagctttttctaatctcacattacgtgtttcattatatatataattagtagcataatatgaactacttggtcaaatctcttcattccttatataaaaagcaaattaacaatatttttttcctttcaaaaccaatatttggaagctttcatgtggttcaagtagaatctatttgaattggattctttcattaggttttactactcacgtaattgaaatagattatcttgcacttgtgtctactacttttaataaaaggcatttatttgtgagtgatcttagatcattattagaggatttgacaagtttgttatctaaatttttaagagtgtcccaaatttatatttgtcggacgaccaatataactgcacatggattatcggatcatgctcttcaggtggatgaacaatttatttaattggacaatctccctttgtgtctttgtgataattagtttctggttattaggccgttgaactctaattttttcttcaataatatattcattgctttaaaaaaaaaaattccttaaaaaaaaactttttcataagaaatggatttgtaataattttctttcaaaaaactaattaattatagattgaatttttgcctagaaatagtacaatctcgtttgcaattgacacctggattttagttcccaataaaaaattatgacgccatgatcacaatttgcgagaaggtgcaacagagatagggtttagtcgcacactatacatagcatagtaaagtaaaagtaggacatagagtgaagttagcaaagttgcacatatatcaattttatgcaatgaccaaatatttctcccctacgccagatgtaaagactgcatctttacaagcatcaggtctgaatgactaatgtatgcaacaacttgtctagaacccgcaagttcaatgttgttagtacatgaatgctcaatatgtgaccgacacagtcacatgcattttattttataaaacttgaaaggttcacgtatcaataaaaatccttagaggtatttttgtattttgaagtctccaaagatcttatatgtgagtagcaccaaagagctcgcgagtttatgtgttactcaagaatttggatttccaatgtacgagttcattagtcgcatctgtttggatattaaataagaacggtcgagattgttctattatttattttataaacttttttttttatcttaattaaatgattaatattataatggttttgtctaacgggttatgtaaactaaaggatcacttacattttatataaaataggaattcaatccgaatgaaactaatcacaatctacattttaaaagtagaataagcaaattaaactttgacttaaccattataattttgtgtgttttttatttgtttgctatttacactattaatggtttttttattatgagattttgctagattaggtgaatatttacgattctgtaaatgggtgttcttacttaatttgaatacttgcagttttattttttggtattttctaacttccttctataataatctccaattttttttgaccaaaaaaaatagtttttcagcgtagctctcggaaagaaaacacaacacaattttgagttcgtgatgaaattgacctcatacccacatgcaatgtttctctgaaaacaatcgagcaccaagaatttatgatgttttttcccctctttctttcattatttttaattataattgttatggttgctaatattgtcaaaacaagatttatgtggaaagaggatatgcctatatgggaccctcttttttatttattttattttaagagatttgaaaaccaactctatctagcacctaactttgaggtcagcctataattttcgtgcagagtgctaataccaatgttattgttgtataggcatgtaaccataatctaataccacaatttttataaggaaaagac

SEQ ID NO: 220059 - DNA, 3080 bp, Cannabis indica
ataaaatagattacattgaaatggagttttatttagggcataaaatccaacacttcattcctatgagatgcttctgacacattaattcgttcattccctctgttagcaaatccatgggaagtttggggaacatctcattgatgttcttgattccttgtattattaggattggtttgattatccattgggactcccttgtatccccaggttgttcttcctgggtgttttggcgattcccctagtttgtttactgccttctggttttggagccttgaggtcttccttatagtcttcttaccgtaggatcaggttggttctgaggaattgttccctgtaccgccttgggtgatgcagcctctctctctaattcagcgtttcgttgattagattcaactaattgttttagaagttgtgtattttctaactctaccaatggtacatacttaatttgatcacaagcatcctcgctcctaggcacgtatctggcagagtcattggcaccctcattcctcctttctgagttttgttcattattactatcgtttcttcttgaacgtggcatttcagaagtgttgggtctttgagatcccatgggttctttgccaggatgatgggttgtttcctcaggttgattattattacgttaatcatcaccatccattgaatatgggtagataatgtttataaggatggattttttctgagtttttatcaccaaggctctcaatgaaagcaccaaacaaatatataattaataaacaccagatatttttacgtggttttgtagttaaaatttacatactccacgagtccttatcattagggatattttttgagtacagattacattaacaatttttgaataagtaatcttttttctctcaattttgccgtcccttttcccatggattctgcccctatttataggaatataggtaggcagttactctttttgggattgattcaaatataactattcatgaaacgtggataattcccacatttcatttaatcacacatgggataatatctattaactacccaaccattctttacttttatccattagaaggttatgctcacttagaaggttgtgtctcgtctggcatgagttatcctttttgtccatcttgataggaaaaaatgctaagtgttgggaggtatttcacctcgttgcatcccttcattgaaatcagtattgcggggtgatcttctcgatatgtgtaacgcgaggctcttgtgtgttattacttttattctgcttgagtggatgaatatccttttattgtctatttctctgagtgtatcccgaggcagacatatgtctcgtcaatatcaatttaatagttattatccttgtctcactgaagactacacaatcaacgagtttgaatattttctatcaaacttttattgaattgtaacaagttatttaatttgtctttaatgatataacattattataacatcatagttgattcatattcctcctgtaggatacgtgttagcttccaaagtatagccaaaattcgggtataataaaaatgaccagtaagatcctggtaggcacatgatcggctagacctcaacctacagatcgctgtcgattggacaattctgaggtcaactgttgctaacctacatgtaactactatataaagagcattagcctaaccctaaaaccctaagtcttaagctcttagtcctagctctaaagttctaagtccaaaactcacttctctcttctcctctctctcgcacacgcccaagcattgtcacttgagattggccaactttggttctcactttgtgatcttaagagagccatttcagatcccactactattgtgatctaagttgtattatctctggcatcaatacaaccaaaaggtgagtaggtcattaccaactaactcagggggctgaacctctataaaattttgtgtcttatgtaatttattattcttattgtgtgacacgtgtcaagcatcaatattaaatacaactccgttatcggttggccaaatttgaggtcaacggtgtggtactttcattgagagcaagttgttaattaatctgatcaaacgtcatggttaacacaagaagaattatacagaggacatctcacgaatcttctatttaggtttgcattagtccaagaggtgaaaatcatagctctctttgggggatgacgacaacattgcacaatcatgtaagccattttcttacctcttctttgtgtttatcttcttatcttcttcgtctcctacgtctttctcttcttcttcgtctccttcgtgctcctcttgccactgttcttcgttgatatagccctaaaaattagggctcttcatctccttcgtgctcctctctctttgttcttctgtgatgtagccctaaaaatgagggaactgattagtttaagtttttgttaatgttttaaagattttatttagattaattatttttatattataagttttggtaaatgtggccacgttggccaattcttgagtgatctgtcattaccacgtaggtaaaataaggagttaacggggttgcgaatacgtcaccttaaaaatgcaaattgaacaatactttggaaggttttcctactaaaaatttgaggttaaagggttaactgcaagtgaattgaaaagtaatccaatagttattaatttgtgcggcactaatgatagcaaaaatttcatacgcgaggacaatacaatcttatatatatttatgagaaaggttaaaaagaataagtggtgtctaaaactctctttgttgtcatgtcgctattggtacaattaaatattgacttttatataatttaatataataatttttaaaaaatatcactaactgcgctatctttagaaagtgctacaatgataatgctcctatatatattaagggcttagaaggagaattggtgtttcatcaaatgggctatatagtttcaccacatccatctcaaactcaacaacatcaagaagactcctaatgctgtaattgtcttcccaatttctgttcgaatttcccttattttcttgcatatcctctctctctctctctct

SEQ ID NO: 220060 - DNA, 1680 bp, Cannabis indica
aaatagggaaaagaaaatcaacattgagcaacaagttgctactttatacaaagtgagaatacctctctctcaaaacttcattcgaacttggatgataatcgccaatggtggaataaagttcaaaagttagaaaccagaggtttttctttttttttttcctatgaagttaattttttttttttaaaaaaattatttattttttctgtagagtttgagaaatctcagtgagttttgtaccattttttttttccaaattatatttaaaaaaaataattgaaaagaaaaattattggtagagaaagaaggaaggttggaaaggtaaatggaagcgatggatatatgatataaatgagaaaaaagatattagaattgtccctacaaagttctaaatggagcgaataaaggttgccacgtaggacgccacgtaagaggaaaatgttctagtgcgctccaatatctatagctgggctgtgaattgtttaccgcggatccagaagcgatccgtcagatccgtattcgacacgtggcgttctctctgatgagtaaaaggtttcccaaaggaagtggctgcaaatcctttctattttcgaagccactttcgcttttccatccacaaccacacctacttttgttcttcccataccaattattaataatataatataatacaaatgagttccacaccatcaaatttatatcatgcctgaatcaatttaggtcttttttaaggaaattatcttttacatttgtatactatatattattaatatttttatgttagatattaaaataaaagaaaataaaaaagatagaatatttagtattttccttttctttttatgctttttttatacacttagtaaaaatggagaagtcttttctctctttttgtaggcgagaatacttcagagttttcttctgatttagtttttattattttatttatagtgtattcgattatattttgaattcaatttaatttgcatgatagcttaaagttattctaaaacaaattggatcagttattttagattgattactttataaatattaaattatttaatattaattataaaatatttttttttactatcattaaaatcacttaaatataaaatataaaatattctttttaaattctccaacaataaagtaaaataaattattattctacatctctaacaataaattcaaataaataaacaaaaataacaataaaagaaaaaaaataaaatttatatgtataaagaggagattgatatagttttagattatgttttatttttgtattataaaatatatatttgatatataaaattttaaaaatatttgtattatgtattagttttgtctaattactttaatgtatttataacttttaaataaatataaataaatgtagatttaattatgttgactatatttgcatgtaaaaaaaaataaacaatctgtactttgtaaattgcattagattatgtggattgaatttgattaagttctttatgaatagcactaagaacaactagtattttttttttaaaaaaaacaaaaactaaatactacttgcaattttttatttattttattttttgaaaactactactagttttaattctatatgtatatgtatattttccaaatgagttttgaaaaaaatatttgttaattttaaaaatattt

SEQ ID NO: 220061 - DNA, 1784 bp, Cannabis indica
aatatatatatatcaaattaaatatatatcatcaaataaatatgtatcatcaaaaatatatagtatattcatattatcttatttaaaacaactaatcaaacattatggtgggcttaaatattgtttgcacacgttgtgtacagctatatagatgtatgcatggatatggtggttagtagttactaatacatagtgcttaacactatatgattttatataattgaaaacatagttagtttctaaaattgaaaaaataaaagtcttgccgtctcaaacatttaaaatatgtactcaaaaataaataaataattctttattagttttggacaaatatgctattttaaattttcatttatttgtataggagtatttcatgtaattatcttcaaaccacatatttacaagacaatgtggattcgaaattagatgagacaatagggggggttcgtgaggcactcaattagattaaaatgaagcaatggcagaatgtgacactgaaaatcaatttgcttggtcgtggtgtaaccaatttgccacaaaaaaaaaaaataaagatgttataagtgtataaaaattaagatataaaagagttttgccataaatttttctaaataagaaaataaattccaccaaaaaaatacataaccaaaaaaatatactttctaaaacaaaaaaatatttattacaaaactagataaaaagttaaaaacacatagactaataaataacataaacttgttcatttaaactttattttctataatatcacgctgatcaataagtttttgagagggcctagaggtgatgacatgcaattgatgtattttaagccgacaaataggacatgttttattgattcgagtccacttagtgatacaatgcaagtgaaacacatgcatgcacggtgtggactcaacaacctttttgctcgttttcaattcattatccaataagttttctaaacaaattgcacactcttcttcctcaagtccatctcttattattattggattctcttcgtaattttcttcaccaatgaaacaatttttaaacatttgaataatactactttgtttggcaccaacatctactatgaggatttcttcttcgtcatcccaatcgtacaatattttgtagcaacaccaccaaactaacaacattatggtcaatatgattatcacgtcttcaatgccgatcattttaagtattattatgtgtttttttttgttgaactttgttgttaatatatataattaacttaattaatcctaattctaattgaaatttgtaaaaaattatatacagatatattatattattaatggttcgaaaatttaaatttgaaagtggaaaaaagataataatatattataatattatataattatatcattttcagtttacaagttttttttgcctctccgttgtcgtttaagcaagattaacaaacggagtctcgataatttttcaaataaggacatcaaaagaatatggctttgatatatagaacttcaacttgttcacatatatatatttcctgtcctatatatatatatatgctcaagcaaattatcccagtccacatctgagaatctttcaccattgatgatgttaattgtttgtaccattttcatgagcagctatggtgacatgcttcactctcttttgttcattttcatgggctcgataatacacgttataacttattgatgatgtcttccaccaatttttcacttcacgatgtgaatttgcaactcatcttaattctatgtatatatatatat

SEQ ID NO: 220062 - DNA, 3260 bp, Cannabis indica
gggcatttttgtaattttgctaattccattaaaccgacattctaaaatttctaacctagtccggaatattctcaaaataattcttccataaatgtcgtgacatttctaaccaaaatcgccgggcccaataaaaaatattttatttaaaattgatatcctcggtactcacatatcccaaaataatctccgtaattaataaattacgctatttatttcattgagtaaattctcaataattaccctaagtaagatcataatcttacttcattaccaacataattacatatttaataaaatatgcctatttaaatattatttattttccgggatattacaatatgtgctatgacaaatgattcttaaagattgctaaaccaaagtctatctttctcagctacttttttcggcattacactcacaattctgtgtttcaaaacccatttaatctgctgtagcaaagaaccggctgtgtgcatgcttgagttccagatttgagcatttctgttttgccaaacagagtatactgaagcttcaattgtagaataatacacttgcttcctaacttggagtatttccctctatcaactcttcgaaccatagcctgtagactgctcgaagtgaccctccaatcaagccaaagcttcacttgttgtagcacttcttgtgagaatctgcaagcaaaaacaaggtggtctgctgtctcataagtcaagttgcataaggagcagttttcatcatctattattccaaatttagcaagtctatctttggtttttagtcgattttgcattgttaaccagagaatgaaactgtgcttgggcacattaagtctactccagctgcccttgcaccagaaatagtgctgaaaatccccttgcagtagcttataaccagctgctattgagtactggtttgaggcgaaagtgttgatcttcatcagctgcttcactttatctcttgcctcagttattttgcgccaataccaactgctattcaaaggagctttatgctcccaccactcctcattcttgatgtaaacactatggatcccccttatccaaagattatcttttttattagcaatggaccaaacatgtttgaaaagggctgcctcattccaatcggaagtgttcatgaagcctaaaccacctgcagccttaggcttacacaaacacctccaagctacactacccgacccttcacttctaccttgcctccacaagaagttcctgcacatattttcaattttagagatgatcctttttggcaaaattaagatctgacaccagtaggtatggatagtcagcaacacatagttaattagacaaactctccccgcaaaagagatgttcctcgagctccaaactttgattcttacagtcattttctatactagacttctgcattcagcagctgatattctctcagcacatatgggaatgccaagatacttgaaaggaaccggatgtttagtaaaaccggacatgttgagtactctttgtatttctgtttcttgcattccgctgcaatatatagtagttttttgaacatttgggagcattttctctgaaaattcccactccatagtatcatacgccttttgaagatcaagtttaatcatacagctagccttgttcgttttcctcccatagtgcctaatgagatcttgacatatcataatattgtgagcaatatatcttcctttaacaaaacctccttgattttgagaaacaatatcagggaggatttgttttaatctagcacagatcatcttagttgctattttgtaaagaacattacaacaagcaatagggcgaaaatcactcacagtattggggcacttcactttcggtatgagtgttagcacagtagagttgatctcctttaataatgcaccagtatggagaaaagaaataactgcagcggtaatatcatccccaatcatatcccagttttcttggtagaaagaacttccataaccatccggaccaggagctttgatactaggaatgctgaatgctgcagctctaacctcatctcctgtatactctttcatcaacagatgaataagatcttcagtaatcaatgacccctgctggacaactctttgttcacaaactttcgattttttagtttagagcataataattcttgatagaatgacaaaaaagcatcagtgacttcagcttgattttctactctaataccttctttgttgacaatagagtagatgttgttttgagctcttctctgtttgagtgcctggtggaagattgatgaattagagtctccttctttgatccaagtgatcttcgttttctgctgcataaaaaagtaatatgcttgttgagtttcaaggactttgtttcgggctttcagttcttcttcaaggagagcaacattaagagggtccttatgcagattattctagcagatctccatatgcttcttagccagcagatgaacattttggatattagaaaaaccttctttgttaatacgcttaaaaatctgcttcagggacttcattttcgacacaacctggtacattttagtaccagtaattgagtgattccactcatcttcgactagctgcttgtattgtgggtggcttctccacattttgaaatacttaaaaggctttttccctgtaacaagagtcgggtaaacacttagtatggcaggggagtggtcaaaaagcccttcatttagaaataacacttcagcattttgaaatagatccatccatgcccgattagccatcactcaatcagttttagaacaaattctatctcctccttgctgcttattactccaagtaaagaaattacctgtgtattttacatcttcaatttggcaaaaatccacacattgagggaattcagatggaacatacctcactctatcaccaattctctcatccttttctagaatatcattaaaatcacccaaaattagccaaggatcattcgtcatttgcatcttcaattcattccaaagtcctttcctttcttcctctttattaaatccatagacaaaagtcacataaaactcctttttgttatcaatagcagtaacaaacaagtggattagttggctagagcacctaaggatgttaacaacaaaccttaaagggttccaagcaactataatacgcctaccttcatgccaagctatattggtcataaagcaccatcctgagaacatgttcacgtcaaagccccaagttttggggctttgactctcgtctcgaggagacc

SEQ ID NO: 220063 - DNA, 3892 bp, Cannabis indica
tgtagatacatttttaggccaaacataaatgaatctactctttacttcttcctttattctcctgaccacctcagagactctcggctcctctgattcccaaagcactagatttctcgttttccaaatctggtataccatcgaagccatgacagcaaaccagagacttttcctaaaccttccagcctttgatctctcaatccatctcaatatcgcatccaaatctattgactcaactttccaattcagccaccctttaacctgcattaagcattgtaaagagaaggagtaagagaagaagagatggcattttgtactgcaattactttaaactgcttcagtctcgcccttgttcgaagtcgatcttgcactacagtccacataacatagctttatcttggaatattttgcctattctaaactccatgactccaatttactttcccttgaggaggtcaaaataaattgtagccattagagattgtgtaacttgtgccaacaaactgctacaaactcattttctccctgatttggtctttgacaaataccagttttttccaataccagctcgcttgttgtggagcttggtagctccaccaatcctccccttttatataccatttgatccacaaattatcttccttgtttgcaatcgtccaaacatatttcgtcaatgcagccaagttccactctgctattttttttagacctatggatgctgcagccttcggttgacaaacgttctcccatgcaattgggccaggacctgtagatgtgtgatgtcccttccagagataggcacgacatatcgtttcaatgtctttgatgatcttcttcggtagaatcatgatttaactctaataagaatcaatagacatcaaaacagaattcacaagcactgctctacctgctaaggacaagttcattgtactccattatcttattcttgctgtcatttttttagctaacaccatacactctttcccggaaatacgtttagcacatataggaatgcctaaatacttaaaaggtacctcttatttttggaaaaactagatctgtcaatgaccctttgcacttcactttattccattccacagcagtagatggcaggcttagcagaattcggttgtaacccggatgtgcaagagaaaagtttcaatccttgaagcatataatgaatgcttttgaagtctccatggaagaataagataacatcatcagcaaacattaagtgattcagtttaagttccttgcatcaatcatgatattgaaattttggtttggccccaatccaaatcattattcttgacaagtactccattccaagtactcattattctccctggcaaagtcctcgtttcccctcaaagaatccatggagagttccattaaacatcaacgagaatcggggagtacggacacaaatcataaccagcttgataaattccccaagaaattgaaatgcttgtaaaatctcttccaataagtctcattcaagtgtgtcataagctttctgtaaatcaagcttaatcatacaccctggtctagcagctttccttccatagtgtctaatcaaatcttggcatatcataatactgtgagctataaatctaccagaaacaaagccaccctgattctgtgcaaccaaatcaggaaagtatagtcttgagtcgagaacatatcagctttgttgctaccttgtaaatgacattgcaacatgcaattggcctgaaatcactcactgtgtttggacacctgcttttaggaacaagagttagaacagttgcattaatttctctcagcatcttcccagtatgaagaaatgacaacaccgcttcactaacatcataaccaactatatcccagttatcctggaaaaagaagcttgagtaaccgtcaggtcctggagctttaattcctgggatctcaaagaacaccttcttgacttcttccttcgtaaactctttcattaagaagactgcttgctgctttgtaacctggggcccttgttttatgacattgtttattacttccttcctattctccattttactaccaatcaattgataataaaatgagagaaaggcttctctaatttggtgctgatcctctacccttatctcttgtttatcttcaatcgatagtacactatttttctttcttctttctcgaatacttgcatgaaagatagcagaattctcgtaaccatccttgatccaattgatcttagatttctgctgtaagaaggacgacaaccctttaagcaggtatccatatcttttccttataaccatttcttgttcaatgagatcatgttgaaggggagctacctgaaatttcttttgaatctcaactaattcctctttcgcttgagttgttgcctcttgaatgttggaaaaccctcttctattcaggtctttaagatcagcctttaacattctaagtttggacgtgacttgaaacattttagtgccatgaacttggtgcttccaaactcttgtaacaatctctgaaaaccgtggatgagaggaccacattcgaaagtacttaaaaggcatttttcccctaagtatttcgggataaaaagaaacaatcgctggagtatgatcgaacaaaccttccaccgaaaaaactgcttcagcattaggaaattgatccatccacttcttatttgtaagaactctatctatcttagaccatattctttcatttccttgccttttgttgttccatgtaaaataacttcctctgtacttgatatcctctaactggcagccattaacacaattaatgaagtcagcagcttcattgtatttcacctttcttccaattcgctcatccttactcaatatttcattaaaatttcctaaaatcacccatgcttcatttgttgcaatcctttaaatcagtccacagctcctttctcccttccacttcattgaaagcatagaaaacgacacttagcatctagagttgtaacaagtagatgtataagttggctagtacatatgaggatacttacaatgaaacaagaagggttccaggccaccattattcttcctccatcatgccatgcattattcgatgtaaaacaccatcctcggaacatatttacatataaggccccaagcttgtgggccttaaccctcgtctcgagaagaccaactagtccagctttgtgaacatgaatcatgcttttaacttgattttgcttatcttgactattgatccctcggacgttccaactcactattttatccatttcccgaaggaggcactccccctccacttatcttttctatgttgccttcatcatgtactcctcatgtgtgagtttgcttacttgaacatgagatgattctgctatatccaaaccaacaaggttgtctgaaagagcatcaaaggaattatccacttttgtcccctctgctactgctatacctttgcctttactccctttactaatcttctgaaaaccatcttcatcctggaatttctcctttcctgctgcatcttgtttactctctttgactacccattgttgctttttctcatctttcttgcggcaatcaatagtctcatgtccgagccctttataatggttgcattgtatcggtttccactcataagaaacagaggatgtcacattgaaaccatgctcatcttcaaattgaacttgagcaggaaactcttgtttgatcgacacttctataagcactctagggtagtttaacttgtttctctccttggtcactagatcgacttgtagaggagttcccaattgtctcacgatcttgtttaatgacctctcaccccagtactataaatcaagatcatggagttaaatgcatatcagcactgttcttatgtcttctttcttgaaatttatatc

SEQ ID NO: 220064 - DNA, 3664 bp, Cannabis indica
gcagaagagacacaagacatgattaagccaatccatctatgagtaaaccccattttcagtacatagcttccaaaaaaggccattcgatccgatcgtaagccttactcatatccagtttaagtgccatgaaacccgtcttaccctttctttttcgcttcaagtaatggaggacttcaaatgaaaccattacgttatccgagatcaatcttcctggtatgaatgcactttgggagtctgaaattattgcatccatgtacggtttcatccgatttgccatgacttttgttacaactttgtataagacgttacaaagagcaataggccgcaagtccttcatcgtatctggattcttttttttcggaatcaacaccacattagccatactacactctgaaaccagccgcccattctcaaagaaccgttgaacaaaactaaccacatcgtatttgatcacattccaacatttttgataaaaggctggagtcataccatctggtcccggacttttgtctgggtgcatttgaaacaccgctttgcgcacctcctcttccgacactactaaattaaactcttcattggctatctcaggaaccaacctatcgacactatcaataacctcctgacaaaacacaccagatgccgaaaacaaagaggaaaaatactcaaccataacctccttcaagccgtggtcccagtcaacccaaacaccttggtcatttttgagttttgtgatgttattattcctctttcttttactagccataagatgaaaatatttgctattgtggtcaccttccttaagccaaaactgtttggctctttgtttccaaaacgtctctctttgatcaagaatagctgaaagtttatttttgacttcatcatatcgagaaaccgaagaggcatccctcaaatttttcaaccgattaagatcctccttacaacttcttattcttttcttgaaacacccagtaatttccttcccccaactagcaaggttagtggcacataagttcaacttatcaataatccccatgttaccatctctaccccaacaatcttcaataatttgatagcacataggttctttgagccacgcattttcaaaacgaaaacgatgataaggaagaaacttactttgcacagtcggctccaacagcaagggacaatggtcagacgttgagtgctccagattgattagcgaggcagcaggaaatagatgaaaccaggcgtctgtaacaagggctcgatccagacgagcttcgatccaggaacttgtcccccggcttttctcccatgtaaaacgatagcctgtgagttccatatcattgagtccacactcattaagacaattttgaaagccttcgatcaaccaccttgggtacgggtgtcctccttgcttatcctcctgagttaaaacgttgttgagatcacctatgacacaccaagggagtgaagagtcgttggtgatcgtgcgaagaagatcccaggtcttgtgtctgttattcctattcgggtccccataaatcccagtgagtctccatgtttccataccctctcctttgacacacatatcaatatggtttgtagaaaagcccaacaaagttccatcttctttttctttccataaaaaagctaacccaccactaaaaccttgggcctccacaacaaaaatcccttcaaagcccaattgccttccaatccattccattctcaacttattacatttagtttcacagagaaaaacaaatttgggtttcttttgagaaatagtctctttaaggaattgaaaagcccgttggttcccaagcccacggcaattccagctcaaaacattcataatgcccggcgggcctgggaaccagaacccgccccaatgaagtttttttgattaaccccatcattaaagcccatgtttacatcttcatactcagccccactaacgtcctggaccattttaacatatggcccaaccaactcatcaacatcttccccattataatcactttccattattgtttttcttctttttaaatcaatcacctgaatactaggcacggcatcattatcttttgatcctgcaatcaattcaatggcttttgacttgccatatacgtctccattacttccagcagcttgattagtgggattctttccataatctataatcatattcggattgttggctggcaaagtccccatccccggatttctctctgtagcattattgtgttgtcccctctcacctccatgggagcttgacgcaccagttttagccacgacggccgatcggagccattgagcccccatagtgtagtgtcgtctcctcggggctgccttcaactccaagccatacgacttatcaatcaaatgaagaggagtctcaaacaacctatcacagaaccgttccgaatggccaagaacaccgcaaatgaagcaaaatgtaggaagatcctcatatttgaatagaatcttgcaggaagcaccgctcttcttttccagtttcatcttttgttcgagaggtttgtccacccgaattgtgactctaactctgagatagtccctccacacacccgcaaaattattaggatcggacttaacgaatttgcctatataattgccaacatcccgaactactctctcagacttgaatcccgatgttatatcatgcagttgaatccaaaagtccagttggtttaacgggatcgatctcggattagcacccggtgtcaccctttcaaaaatcaaaggtgcccgatcaaaagtccaaggacttccttcgataactctttcgatatccacttcatggtaaaattggaaaagaaaatgatttggaccgagttctttgacgtacatacctctacccggctgccaaagagtggccattttatgttgcatagcttgaaagtctacgccccgtttggttaggaatcgccccacaagacaccaacgatcgtcaaactccaatagatcttcatcatcatcatcatacactaatctgcccatctcttcttcctccatagcatcattcataaactcctccgccataccgtaaaagctttgataaaagtacgtagactcaatgacagaacaaaacaaaacaatacttttcagaacccaaccatgtcaatagacaagacatatgtgtgagataccttttagtttattgaagttaaatttaaacatcatattttgtaaacttttcaaacaatgtggcaaaagagaggtccatttgttgggccaagattttatattttagcccaaattgtactattgataccttagcccaaaagcagtactgtgaaagtcccacgtgatttgattacttcatgttctttccttcgtataaataatggaaaaattatggtagtttcaaaatgtgcaacactaataatgatatttttgaattttcgatcatttcaatgaaatttgcttaacttgaatggacgaatgacatattcattagtttatttatacacattgcaaattttcatgaaccattatggctatccactgtgttatatggctcctaatgtggttaagtaggcatttacctatcaccgatttgggcaacttgctatatcgttcattcctatgaatctcttttgtaatgatcgtgaggcttaagcttaattaattaaacgtctattttcaaaaaaaaaaaaaa

SEQ ID NO: 220065 - DNA, 2065 bp, Cannabis indica
tttattagaataaattgaacatgcccattaaaataaagacacagaaaatagagataacttgaccataattcactcaccttgctccactggaaaacttcaccatcatcaaattctactgtcagaagtccaacagggtccagctgaattgaccttccccaaaattttgtgcggaggttactgtcaccccagaatttccaacctctaccttcacagtgacaggcaatcagtgttgggtggtgactcacctgttatatagtaatgcaggaatgttacttacatacattaaaaggaagattgacaccacttctatcatattgtaagtcaaaagtaattggtaaaaataggttcaatcaaaccgctacaaaaagaagatcagtttatataatgacattacgaattaatatctatattttactaaacgccccttaattcaataaatcgttgttcttggtcaagaaaaattctgcaaagagattattctatcccaatactcctgtatttcatgattgattagcagtaattaacaaattagatttgtatatataccttctcagagaagaagcgaattcctttatcaggaaagtcagcttcataagtttcccctaacaaaggattgaaaggcttgcaatgccgaccttcagacgaagcatatgcagacactgcgaatgcagcaacattcagagccctttggatgctgtccccctaacaacaatcacaaactcacggtccagtaagattgaagttccatcataaaatgaattaatgctaattaatgaagtaactctttcctactatctataataaattgttacaatgtgtggacctatttctaatacttacagctcttccatgttcgtatgcccggtccaaaagataagagtattccatatcttcacaacatttctggagcgatgaaattggttcattgaagtaaacagggagacaaactcttgtaagatcctttccaacattgtctttgatcatagaccatagactgactcctttctccttctccaccggatcaggaagcttttttcgcctttcaacataagtgtatttagaatccacaacttctttctgactctgcatcttcccatgtttatccatgttattcgaagctccctttatagtccctataccagtggttggttctgtaaagtactcttttgaatcatagaaggataattcatcctcttcagacacctcttcaagctcttgtttctcaatatcatcagactcagtcgtgctgcattctaagagcccaaaaaaaaaaaaaaacatatacatttataagatatagccatgaaaaatttcttcaaccctatacagattacaatcagtgagtttaccactatattttccacgtcctaaactggaaaagtcatgttttgtcaattggtactcgccatcattaattccagatgtttcagtaatattagcagcctgcagatcagacagtactaaaagtcataaatttctgtataacaaaacaattaagcataggtgacttaataatgagtttctctcagtaagcctaggtccatatgagttgtctccaaaacaatcaaaaagggcaagtttgggactcttgctatttggggtgtttatgattgattagcagttaatgatttataatattatttattaaattaaaatatatacaacaataatataaattaagacataaaacccactactgaattacgcaacaactaaaagtattgagtgttggacaccccttggcaaatcttgcaagttgttttttctttttctttactttttttttttttgctgaatgcaattcttgcaagttagggcagtcatttccacctacagattacctgggtcaatttggtcaaatttcacatcaactaattgaaagtcaatatgattcattcccaaccactcattcaaatcaacatttctttttaacatggaatcaaactatggaatagaaattagaggacatttactaattaataaaccaagtaggttacctctaactgcctcaaggtgtccagtaaattggatcgttcttcacaaacaacgctgagatgagattgta

SEQ ID NO: 220066 - DNA, 2355 bp, Cannabis indica
acatccatgaaatggatgtaatacttatatccatttgtggatggtgtaaaagatggcccccacaagtcagacaccaccagctgcaggggtgctgaatattcagtgtagagtacttgggaaaaggaagtttgtggattttccctaagcaacatgcagaacataaggaaggcgtatttttattgaagtcaatgtgtttgtcttgacaaccctttcagagggatgcccaagtctgttatgccacaaactaaattcagaaaataatagggcattacatttgacacatgacaaacactgaatagaagcagtgggagaaacaccagaatgaggttgagtgatgaggtatgcactggcttgagttgaggaagaagcactttgattcaaatcaggagagtgcagctggatttgagaagagtcaaaagaatacaggccattcacaaggtgtcccttcagcaaggtaagatgagtcttctcctccttgaaaaaacacatatcagcaagaaattggaaatagacatcattgtctttggcaaactgagaaacacttagcaaatttttggttatggcaggcacatgtaatagattgttaagtaaaagaggatgagtagtgttttcagtgcgtgtcatgatgctttgggagtcaggggtgcaatggttggtggcaccagagtcagggtaccaattcgagtcccaaccagagtttgaactggccaaatgtgcctgcatctgagcttggtatccagagttgctttgtgatggtgagttgttggtataggccttgtcaaatctgtagaaacaatcaagagcagtgtgaccagccttaaagaaaatctggcactgaagtcgattgttattgctattgggaattccttctcctcgattcccagagaagcctcctctcagattgttgaatctaggcggtggtgattgagaattgaggcttgagttgccaaatcgagattgagtagctctggattggcttgagttgtatgaaggaaaataggatccagatttatatccattgtaagaaggctgagatccactggatctaggatagggactcctaaaatttcgattcgaattggtgtagtttgcctcaggaaattcaggatccgtataatccatattgacattaagatctatttctttgtcacttttctcaattctagattcagaagcaagaagtaaagcctctatctcagctacagaataactttcaagttgtgtgttggtggagatcacaaaggtatcatactcactgggaagtcctttgaagatcgcagcaacatgatcacgagtgctgagaacttctccaactgaagcaagtaaatcaacaatttgtttgactcgaagcagatagtcattcaaactgagagatcctttcttcagattttgaagcttagttcgaaactccagtatcttagcagagacttgaagagtgaaatatctctgcaaagtactccagatctgactcgaggtgttgcatccaaccattcaagtcaagagacgttcagacatggatgacaacaaccaggagaccagtagagaatcttgatcttcccaagtagagtaagcaagattgatgttttcagcttcacgatcggcatcagtcaagaattgaggtggagttgaattttcttgaatgtaaggcattagacgattcccacgtatggcaggaagaacttgttgacgccatagaagatagttgtgaccgtttaacttgatagacagagtatgattgaagaacacaggactttgatcatcatcacgattccttggattcatctggtttgtattccacgggtttgatccgttgacagcctgagtgcttgattcatttccaggttgagcttggaagtcgttgccggagttggtgacgacattagccattaatgaaggaaagctgtgttgtgctaccatattagatcttctagacattattgagcttgaacagaacaaaccagaaaagaagaaagaaaagagagaggaaagacagagagaaaagatgaagaaaagaatgaacaaagagaatgaattgcttcattgattacaaagtcattatccatgacttatatacaagcttacactcagatcaagaataacagaaacagttacaagttagttgataagagacagctggaaaataacaaccaactaactaataacaggtttctaactaactttatatgtgtttatttacattattttagagattcatatttagggtgttaaataacatacatggtagtaaatctagatcctggtaaaacatatttcaacagtagtcccaaacctacacagcctcagaatcatcacaccttccccaggcagtgtgggattgcacagcttacccggtgt

SEQ ID NO: 220067 - DNA, 1320 bp, Cannabis indica
cacgagcctagctcgcctataccctaagttggcctagtaatcatggtggtgccctcagtctagatgagctgacctcaaaagatttcattcatgatttcatgttgacaaatagatagcttttcttatgtgaaaaatagaatggagtcaaattaccttgttaaacaattagaaatattaatgagcatgaagatgaaaatccttaaatatcaataatagtcttatcctatcatctcatctaaaaagataattaatgaatggtttgatgcagaacataacaaaacattctgcaccaaatcaaagaatgaattggtcacatatttgaaaggcaaacccctcataaaatagatatcaatgttcaaagcatttggctaataatactaacaatattattctatcatcttcaatctcaattcactcaaccccaaaccatattgagctgctaatgagatgagtagagtacttatagtactatgtaaatgtatacacatacaatagaaagtgaagaaaatcagatcaaagtacacaaaaatacataatataacaaggtaggtacactatcaaaactccaccgtattctattctgtaatgacatatataagctaagtccagttgttactagcgcaaactatgtaatattcggaagagtttcaacaagaaggatattatagcccttgattacaagggaaagttttaggccaagaagttgtacaatagtacaattgggcataaaaaggtagtctttacgaaggcaatttggtatcgtcttatcttgcccaaatataaatttatcttgtggcaagcaaccattcctatcttcttactaaagacaatcttattatataaaaattgacaaaggtatgttcggtgtgtggcgggcatgatgaaagtcatcaacacattttctttaactgtcttttattaaaaagagtagttcgacatctttttagttggttgggttttgatgcttggccaatagaattttcgaattagctagtgtggatagagaacaaaaagacaggtctattagctaatataatctatgttcttttagcgggctacaatctactacttagaatataatcgagtgttcattggtaaatcccttttaggtgtgcattattgtagaatttttcaaaaagttattagtttagtaaaataaaataaaaaaaaaaaggtgcatctacaatgcaccttaataaaacaacgggtgcattagtgcatttttaactgtttccacatttaaaagaattttttagtcccttttttcgtcgcgtatgttataattatttaagacatttaataaaattttaaaaaatttaa

SEQ ID NO: 220068 - DNA, 1982 bp, Cannabis indica
tattatttagcttatatgtgaaatatacacattgggaagaaaaggaatcatacttcctgataatacaacagttagcatgatgaaggaatgaatagtgcctcgggtaaattagcaacaaataatacgtcaccaaaaattatatgacgtgaacatgctatgaacaaggagataaaggtcaagctagttgcgagattgaatgacctgcattcataaagcacaagagatacaatttgagtaagattgtaaaaaattatacaaaacctcgttataaggatttttgatagttcatttcccagaccaagccatcctttgaaggaagtcacagatagaatagtttaacccgaggattaaaatttcatcactaaaaaaaaacacgggtcgaacgtagcacattctggataagatcaaatgtaattgccacaatcctataattcaaatatgggtagttatgcatatactttcccacctataagacatgataaacaaaacgtggggattgtccacgttttactaaccggttgtaaggatagaatttaataactaccatttgttgagcctataaatagagacaataagggacgacaaaaattccttactgaaaaagaagattgtcaatcttgtatcttgattgaagaattttctcaatattctataaaatagactcgtggagtatatagaattaactataaaatcacgttaagaaattccttatcttttatttattttttgtgattgaatatattatttatattaatttgatattcgaaatattaattgtcaaagtctcatttaatgttaatgaaattctaagttattaatttggtagttttattgagagtctttggtaattagactttgaagaaacacctaatcaaatattctacatattaaaaggtctctctccatggtgaatactacccctaatgttcatactgaacaaacagacacgaggcatcaccctggaaaggagccctaacaaacttatccaaataaggatcataacacaggaataggtctgagtgtatgggattttgagagaaatagaaatgaagagggtattccaaaaagaaagaaccaagaggcatatgatcccaataggtacgttccaattgtataaatggaaaattatcaactttggcaaagacttactgagtcaaaccgagaagaaatgcagagttggaacgtgaggctgctgcatcacgagtgacctagaatgatacaccataaacacaggctaaacctcccatgaggcgtctatgaggaaggcctcgcgggtcaagaacacggagggcacataatgtccctatcgaagagaacaatatagataaattgtcacgttcctaggaacaacaactagcgaggactagggaagtacatattgacaggaaaaatccacaaaatccaaacggttctgatgcaaggtagacacgacctgatgccccggagccttctcttagaaatatgagacctccacaaggacaacccactactaaatctctgaggcactctcgaccaccacgagacccacaaagggttggaagaagttatatgtcatatctatttgagcgacatcaactaacaaagggagctacttctcggaggatagagtcaaatactatgatgagtgggtcgaggagaagccaagacactacaaaaaaacccatttccccgactagttttttggtcattaaaactcattaattagtcacccaaaattttttgtgactaattatttttagtcaccatttagtcgctgaatgtcggtcgtagaagagatttagtgactaatatatttagtcacaaataatgttattttctatgactaaaatttagttacaaaatatattaaagttagtcacagtaagattgatgtattggtcacataaataccaatatgcactttcaacaaccaaaaaagtaaactttaacaactaaaatttagtcacgaaaaagctaatattttgtgactaaatagtttagtt

SEQ ID NO: 220069 - DNA, 4803 bp, Cannabis indica
atacattggcagcgacagacccataaattttataagagttgcacaccctgcctttgacaaagtttttgccttccaaccttggagctttgccgtgaggttgtctaaaataaagttgaaatcagcgtccttttgcctagatctgaacagaggcagacccaaatattttatgcatccctctggataatcaatgcccaaagcttccttgatatcacgccgcatttccattggggtgtttttactgaagaaaatggtagtcttaagcttatttacctgttgacccgaccaagagcagaattgttctaggctactccagaaaccatttgcctcaattaaattcgctctacccaccaaaattaaatcatcagcaaagaaaatgtgggatagcaccgggcctcccctgctcagttttatccccttgatgagatcccggtcaagggaatcggtgatcagtcttgaaagaacttcaacagcccagatgaaaagataaggggagagggggtctccttgacggagtccgcaagaggggttgatgttcccaacctgacccccatttagacagacgttgagggttgtggttgaaatacactgcgaaatccaatgacggaacctcggaggaatgccagagcaatctaggacatgatcaataaacttccagctcagcctgtcgtaagctttaacaagatcgattttgatggcaaagaaaccctccttacctttctttctattaaaggaatggataatttcttggataatcacattattgtcatgaatattccgccctggcacaaaagcagcttgcgtagggcaaataattgaaggaagaataggtttcaacctattagctatgatcttagctataaccttgtacaccacattacataaagaaatcggcctgaagtggtttgtgcgtttaggattttggaccttcgggatgagcacaatattcgtggcattaatccatctatgcattcggccactcacaaagaaatcttgaatcgcatcacagaagtcagcaccaatagactcccaataatgtttatagaacaagactgacatcccatccggacccggagctttatgactattcatggcgaacagtgtttttttgatctcatcagaactaggagagcaaacaagagcctccaactcatcctgagggatttgctcatgaaacaactgggagcagttgtaatctgggcaagtcacagactccgtaaaaatacccttaaagtaatctaagaatttcctccctacggcttcccggcctgagatccaggcattatctttgtttataatactctcaatggcatttcgacgtcccttaatggtcgccgaaaggaagaaaaactttgagcatttatccccatctttgagccaagaaattctggccctttgtttccagtagatcgcctttctttctagcgactcattcaactcgcggcgaataacacgttcttgatcccagtcacgggaccccgccggcaggctctgcagagagttaagcttattctcaagctcctttatagcaacatccagctttccgaattgggttctgctccagtttaaaagggccaccctagtagccccaacccttttgaaaattctagcagatgcccaattgtgactaacagaattccaggcattgttcactaccagattgcttctatcatcacgggtccacccttcctcaaatttgaagcttcttttaaacttggcgacctggccatccgtcattaagcataaaggcctatgatctgagttgcaggtctgggaagaaccgaggacggccctcggaaataaattgagccaagcgccattcactaaacctttatccaacgtagatttcacatgatgcctcccagacctatggttatcccaagttaggttgtccccttggataggcaaattaaatagacctctggcattcaacaggttagatatgatcgggatgaatggatcccgacccgaggaaccttcccttttagaggcactaagaacaaagttagtatcacccaagatcagccagggccccccaaatctatctcccaggttcagaaattcagaccagaactttttcttcgcatgcaggtaggggggaccataaacacacgataatagccacggatgggaggaggggtcagaatacactatccccgatatatgattgcacgagctagagatatactcaaaactaaacccctctttccaagccaaaataatacctcccgcatttccaatagatggaacacaaatattaaaataaaagtgaagggacttaagagtacgtaccagaggattggcgttcactttaagctcggtcagaaagacaaaatcaagtgagcgcaaccagagcagggacttcagttcccgaactgtagaggtgtgccctaaccctctacagttccatgctaagcctctcatggctcctgtggaggagattcagcattctcctccacaggggtatgagagtaagcagacccactcgacacagcatcatcaatcataaacgaaccaaccagggggttcttcaagatccctgaccggctcggggaattagaactatcctcagaaggatcatcaactacaatttcagcatcattctctgacgtctcgggtcccaggggaaatcacgcacaacaccgggatacttgcggtgaattttatgaggcctagagcaaagagaagcagaggattcaaacttccttttttttgaacggagtcgtcctttcattcacttctgaggaagccggaactccaatatcacctcctatctttcgaatctcatataagtctagcttcccaaaatgtttaagatcatgcattaagtcctcttgagctttgaaaaattgagccaaagctaagtcttcattagggtgcaccaaaggctctcggtcaacattgggtttatgagacaaaggaccaacttggccatgtcccacttggtcttcaatagccggcccacaagaatgagaagagatattagtcaccctcggcccatttgcttccacattattatttgtaatagtattagaataagcatccccctccttcggcccaaactgggaaatattattgttgaccatggacggcccacaagacttgccatcctttaaaggcagcccactcccaacatatttcggcccattcccaacagacttcagcccaacagtcttcggcccactcccaatatcaccctccaactccccacacaagacactcagcccactgacaacatctttcggcccaatagcaggcccaccatccactaaagccaaattaacggctttatcaattaaattaacttccctccccatggaccggtccacctcatcctcacgtaaaacaggaagagatgcaggtcctttctcattgtccaggaaaccagtatcggcttcaatactcaaaatggaagttccattctccaagcctgcagagctacgttttgggaaccacacgcctcgttgagccttcccagaggcagtcgctgcaagtgcagtgacactcagaggacgtctcagacgtcgatgcacgcgagcaggcctgcccttcaaagcatccccaccgtcggccgagaacgtctccaacggagtaatcgcaccaccactattggccacgcccgagaattctatctgacgagcagtaccaaacgaaggtccagaaaacacatcatgatatgttgaggacgtagagagccacgggccatacatgggaaacgggacgccatcattcttcgccaccgtaaccggcgacgacaacttacaacccctgcgttgatgacccagacaaccacaaaagtaacaaaaaataccaatctttacatatttcacttgcaaccattgtttcacacccgaagtcaagtcgaaaaaatagcctgaaactagaggtttgtgaacatctatatccaccaaaatcttcatgaaaggtgtccaggtgaatggtttatcctcctccaattcaatctttatcactttaccaaccattccccctagaaggctgccattatcacgagagaaatactcatgggggaggttatggatttgaatccacacccgcaacaggttgaaagttttaggcccatctacactcggagaccaagcttgcatcaccaacgtatacccgcgaacacaccaggggccattgtcaagagcccagtccctgtcggctgtagactcaaagccaaacttgaacgtattagtcatcttcttatcctccgccatgggcaccacagagaccggtttcttccaggtttttgccacaaaatcccacactgaggatacatccacagacatgggagcaataactttcccatacaaacagcatgcagacaatgcctttaccgaagaagcacacggggcaagaatcacaaatgtttcgttgcatgaaaaacatttgcctttctgaggagaagagatagcaataactgtctccataaatactaaacaccagaggacaaaagaaatggaccccaaagaaataactcccacacctaaccaaatcttacctaccaccgaaacaaagacaagcaataatacacagaactgaactaaagcaaacacaccaactcacacaaagacaacaggaatagcagaacagcaccaaccacgaaatagagaacacaggaaaacggctaaaaaacctaagacaccttcactcaaaaccactcagtaaccaaaaaggagacaaacacaatagactataaaaaggtctcagagcaaaccatgactttggtttcattgacctttgcctccgaaataccaattacatctcaaaatatcaaaacaaactgaatcctccatgataaac

SEQ ID NO: 220070 - DNA, 2062 bp, Cannabis indica
atgttagtgaaactgctattggagacttgcaggtttgtgaaactaacactaaacaataattatataattttttattattattattttttatgatttttgtttgtttttctttgttgcaggctttctataaggcttccaaacagagatttgatgatgatgctgatttcaaagtgaaggcacaacaagctgttgtaaagcttcaggtaagttactatcctttcattatttttatttcgggtttttctttttttgttttgctcattgaatttctactgcttctacacagggtggtgaatctgagtaccgacaagcatggtcgaaaatatgtgacataagccggagagagtttgataaagtctaccaacgtcttggagtgaacttagaagaaaaggtagttagtttaaaggctcaactttccactacttgaagatgaagtttttagattttctcatcattggttttgtttttattacagggagaaagcttttacaatccatatattccaagagttataaaggaattgagcgaactaggattagttgaggaaagtgacggtgctcgtgtgatctttattaaaggggttaagattcccctcattgtggtgaagagtgatggtggtttcaactatgcttcaactgatctcgcagctctttggttagttgtttaagattcccctcattcactttctttcacttaatccaagtatctattgtgcactctcttttacattcttatttgattgcttgacatgtgaaatttctataggtgattgcccaagtaaatagagtactttgtgttttcgtagtcttttttgttattgcatgttttttttaatcttgttcttagtggatcatagtcgggattagttatacggattcttttgtaagggtagcttggaattagagaagagtagactcttgcgaagagatcaatccaatcctctcgaaagattggaaataggagagatagagcctcttgatagctcgatttgttatactttgtgtcatgatttggtgtgcttgacattgatttgagtacttagtgtttttgtagtctttttgttatttcatgtttttgaatcttgttcttagtggacatagttgggattagttatacgaattctttttgtatgggtagcttggaattagaaaagagtagactcttgcggagagaccagttcaatcctctcgaaagattggaatagtagagagacagagcctctcgaaagaattcttcgagggatttcactatttgtgtcttgattttgtgtgtttgacatcgatttcttgcaatggataggtatcgactcaatgaagaggaagcagagtgggtaatatatgtcactgatgttggtcagcagcagcactttgatatgttattcaaggtatgtgttgtatcaaaatttttaccattttgtatcaaaatcaagattgacagtcttaaatgaagttgtttttttttctttttcgttccaggctgccaaacgtgcaggttggcttgctgctgatgatagcaaatatccgaaaaccagtcatgttggtttcggtttggtacttggacaagatgggaaaagattcagaactcggagctcagaggttgttcggttagttgatttgcttgatgaagccaaaagccgcagtaaaacagctcttatcgagcgtggcaaggccaaagagtggagtgaagaggagcttgaaaaaacagctgaggcagttggttatggtgcagtcaagtaagtgtgatcaatcaagtacttgaattgaatgaacatgttgtttatggtgatgtgattaatctaaattaatctctttcatttaataattatgtgtggcaggtatgctgatctgaagaataacagactaaccaattatacatttgattttgatcagatgttaagtgataaggtttgtgttgcttgtgatctcttctatgttgtagttgaagaaagaaaagaattactctttagtatatgcggcgaaaccccctttaacatttgtaattattgcataaaaaatgacattaaaagtactttattttacgattttgttgcagtcgtaccttt

SEQ ID NO: 220071 - DNA, 3459 bp, Cannabis indica
gatagaatttaaccaaataacaactctttttttttcttctcaggaggagacatttggcgtggcttgaatggaggaggggctgacggagacttgcatggcaggcatttgtggagagctactgacgaggggacacgctgctcgtgtggcatgctggagggaaagctagcgggacccacgcagaaggttggagcaggcggtgtgtaggagctcactgtcgactgtctggggtgaagcacactcacgcccttgggcctttggatcagagcatggacgactcggattgggtcaaatatttgaccgagagtgggcttgactttgagctgatctgaatatttgttgtaaattatacttttgtccccattcttcaatattttcttccatttaatcccaatcttctacctaaaaatacataaaattaattagaaatttacaataaaattacaaataaataacacataacatattataataaaataattataaatacacataaaaacttatacaattaatataaagctaataaattcaaaaataattaaaaactcactaaattaattaaaaattcaagaactaaaccaattttagttttaaaaaatgtgaaaataactctaatttctagatttatcacaaccctaaacttaaaattttgctagtcctcaagcaaaaaaataaataaataaaaacacacacattttttttttattttggtgatatcaaaaattgcacattgaaaatagcttatatgaataaaaattaagcttatgtaattaattcaatagtcaatcttgctttgaaattatattttaaattctaaatctaaaatctatgcatcaaattattatgtgaattttgaaaaaattattgtaacaatatttatttcacataacaagattaataattttgttcaaaatttaattttgtagaaattacacatagggaaaatttgaggagtttacttttttatggcatatttttttttttttaatatatttgagttatgggcttttacatatgtttacatttttatggtttaaaaaataccatatttttgtaatatgtttttatattcccatatttttatcttttttgctccagttatatttctaccactcaatgtccgtatgagaagattttgaaatcatttatggcacgtttactatacagtaatcagaatcggaataaattaatggagaaatgtaacggaataaatgaaaaataatcggaatcaatatttgtaatatgttgtttactaaaattttttagaaatggaatagttgtgatttatcttgtttactttattaggaaacgtaatcggaatgcttaaattgactaaattgcccttttgagttaaactatattatatggtagttattttgcaagacatattttaaaggacaaaattgtcattatatatttaatattaaaaaataaaataaaaataataaaaatccattacccttaatggcattccttacaaaattggtgggggaagttctccctttcttttctcccttatttaatcaacttctccctttcctaattttaataatgcaagtaaacaaatgtaagggaatgattaccttactattgattcccattacttattagtaaacatgccattaaggttttgttcgagtctcctgcgtgaagctccaagccgtgaacggcgatccatcattggtgttctggatgtagttgggtcatctcgtcatcaacagtcaacggctttctccctgtcgatgcttcgatttggtggtcgcctaagcctttttttcgagattgtggggtctccgagtgcttgcctccgcctggcttctctggatcctcgacgtcgcctggctcatcgccgcccaacttccccgatcacccaggtcactcatcaaggattacagatccaattttgtactcttccttgtatcaatactctgtagagtaaggtcatgtttggtgttctttgccgtagagtaattattaacttttcagtcttgttttatattgaatggattgtaaatgacaaataaggcaagaaatttgaatgaaatttgagatggagatttcaattttctatatatgattgatttgtgaccactttgattcattattcactatgaagtttacgttggcatcttctcgaaagaactgtgcaatattttttttattgactactttgattatgattattcattatttttcattgtggagattgtgttataattagagtgactgagaattatttgattttttttcgtgtactgtagatgtgaacttggttaaatttgagttcttaattgttgaagagatagtacggactacaaagcgaatggtcccctttctctttgttagatgagatggtgttattcttgtgtctcctcctttgaggacatcttgattaattgtgtactcttcacgtggaaaacctgtaatgatcgatctagtgaaactgctactatgttaatataatttcttcttcttcttttttattagaaagaacgggttttgtgatattttgtgatactccctattaaggttgagaagttcagttgtacttttaacatggctgaaatgaatgaaattgcttaaattttagaatttgtgagtgacatcttaaatcaagttttcaatggtattatgatgttgggagtaatgtttgggttgatgcatcagtgggcgatgaatacctcttcaaagtctacctatcatgcttcttgtcatgtttgagtaaaatattactctttattggcatgtttatttgttgatttcagtgggttataattctgtgtcagtttgaccaatataatatatattattttttttttacttataaccgatttctgagttattatttattacttacttttactcattttgttgtcgaaccatttttgttttaacttatgtatcaatatttttaggactaatttactctttttttttcaaaattagaaccagtttctgaattattgtgtgttatttatttttattcattatattatagaaccagttctattttaattataatcggtttgagtgattttgtgttaataactcaacctagttataattaaaatagaacctcttctataacaacgttataatgaatagaaacaaataacacgaaataattcaaactgattataactaaactagaaccgattatttaacatgatgaatatgttttttagggtagatatgatatgtgtgtaattatttagtgggttggagcatgttgaatgagtggttttgtttaagttattttatttaactggtttttgtgtgtgagtttttatcttagttgatttacgaaaccagtttttttgtctcaaatttttaactagttgataaatataaccgatttctttatattatctttgagctattgtgtgttattatttgtgtttatttattttgttatgaaattgattcttctcatatttatgcctcaatattttttagaattga

SEQ ID NO: 220072 - DNA, 3127 bp, Cannabis indica
tgctgacatctaactgttgcacaagccaattatttgagacagctattgatagaacaacccgaactgttgcaggcttgacaaccgggctaaacgtttcttcaaaatcgatacctggtgtttggagatatcccttggcaaccaacctcgatttatatctgtccagcgagccatctacattgagtttaacacggtgtacccacttatttccaatcacatgcataccctctcgaaatggaaccaagtgccaagtaccagcttttttgagagaaccaatttcagagttcatggaggctaaccattttggatctcttagggctgctttgagagatttaggctcacttggaagtagggattcgggtaaagggtgcttggtggcaagatatgatttgggtttgacaataccattttgagatcttgtagtcataggatgtgtgcgtgtaggggcaggaatagtagcaacagatgatgtgttatggttggtctcagtgtgaccgacagaatgatcatcagtgtcatttggtgtaggacagatggatggagagatgtgaggatttagaacattttgttgggtagcatgtgattcgtttgcactaggaatgggtacactggaaacaacatgttgttggtgtgaatgggcatctgctgcagaaacatcagtaatgggagctggtgcctcttgaatatggctgctggagatattttgttcagtaggcagtggggcagcgtttggcacagctgctgtgtgtggtgcggcagacggctcagcagtagttgcagaagcaggcatagcaggtataaaattttgattagtaattggaaatgaaaacactgctgtaggaggtatagtagagtgagatgttgatacctgagtgtgagtggctgaagagtgagcagggaagcaagcttcatcaaacaccacatgtctagctataaagagtcgcccatctctattttcacataagtatcccttatgattgttggagtagcccaagaagatgcattgttgagatttatactccattttgcgatgattgtagggtcgtaagtatggaaaacaggcacaaccaaacggtttcaatatagtgtaatcaggaacattgccaaacaaacattcaataggagatttatgaccaagaacaggtgtaggcaacctgttgatagtataaacagcacactgaaatgcaaaccaccaataagtgaagtctaaacccgattgtgcaagaatggttaaacctgtttcagtaatatgcctgtgctttctctcagcacggccattctgttcatgagtatgaggacatgaatgagtgaaaggaatcccttgatcacttaaaaaccgagcaaacgtcctatactcccccccccaatctgcctgaacattcttgatgggcaaattaaattgcttctcaaccatgcttttgaacttaataaaggtgtcaaaagcatggtttttctgtaccaaaggaaaaatccatgtgtacctgctatagtcatcaagaaaatggacataatatctataaccatcctttgctgtaatatgagagggcccccagagatcagtatgaatgatctctagtggctgagaggcacggctaagggataaaggaaagggttgtttgtggttctttcctaattgacatgctgtgcaaaattgcagctggtttagagttcctgtgtgaggaaccaaaggcaagattttagacaaaacagtaggattaggatgaccaagttttaagtgccaagaatttatgtcattttgtttaaaagtatgaaagacagagggataggaatcaaatgagtagttatccattttattaatctcaagttcattacaagagaaagatggcaaagtattacattgacatgaattcaaaagacaacaatcagactcaacagaggtaagatgacagtgagatggttcttgggagctgaggcttggagttgtgtctcctaactggtacaacttgtttttaagtttccctttgagaaggaccttccccgtttgcttgtccttgacaaaacaacaagttttatgaaattcaaggaaaacattattatcattggttagttgagacacactaactaagtttttggtgatagcaggtacttgaagaacagaatgtaattttataggagaattagaagaagaaggtagagaagtggtaccaatgtgagagatgaccatcttcttaccatctccaacagctacagactcagaaccatgataactggtggaggtttcaagatgctgaggattgttggtgatgtgatgcgtggcccctgtgtccacaaaccagccatcatcatctccaaaatctgggacaaacgaagtcgagaaaacttgaggatcatagtcccattcttgttcagcaacaaaggcacaggggggaacggtgtctggtttgggagtaacccatgttttatcgaatcgataatgacatgttggtgctgtatggccgaaccgaagacacacttgacattgaggccgtgtagctggattgccaggtttgggatatccacgacccacggttctgttgccttgaggtgggcgataggcattagatcttgggtttccatatgtcaaattggcttgcattttcatggcaatttcagaaacaacactgtgattttccaacctgctttcatgagagagtaggagagcatgaacctcttcgatagagagaagatcacttctcgcagtgatgccggacaccacggaatcatattccggtcccaatccattcaagatttgcaaaatgatgtcttgatcatttacggtagaaccagcaacagctaaagaatctgcaagattctgaactttgtcagcataattcgaaatcgagagattacctttgcggatcgtagagaattgattctttagttggagaagcctggcacgagattggctgttgaagcgttgctcgagagcctgccacaccttgtaagaagaggagaaatttgcaacagaggcaagcacaccttcggacatagatgagcgaagccaagagagcagtaattgatctttctttcgccattgagcaaacaatggattaggatttccattaaccagggtggagggagggggaactccagagaacaaaatttcatctagatcatggcctatcacagt

SEQ ID NO: 220073 - DNA, 2143 bp, Cannabis indica
gtctaattctaagcaatattgaagaagttgtggataaaatactcatctgagcatgcgatagtgaaaacatataggaaggagctcctacgattggaaaaaaaattaaattttaagtttaaattaggtttatttttagggtacaatatataagacatttagtttatttttagcaagttttgattgcattttggagagaacttaataaaagaggagaatctacatctaaatctagtttttcttcttaaactctctttcaattttcattgataattatgtttattatcactacaagaatgtgtacttttgtcggcgcaagttcttacttgcgtcggcgcaagtcaacaaagtcgccggcaatagtggtcaactatttttgcccacatcttccttttgtcgacgattatattcgccggcaataaacacttttgccagcactatacactaattgcgccagcaaaagttggagccaaaccgccaaaaggtgggaattgttggctgtacggttcccacttttgtcggcgcagttacttgcgccggcaaaaccattaaatgaatttttttaatattatttacttttgccggcgcattgtagcgccagcaaaagtagtggaaaacttggcggttaattttccctcccagttaaaaaacgtgcgcgcaaaagtaggtaggaggttttgctagcgcatcacagtgcgccggcaaaagtgggaaccgtttcaccattggacacgttgcatcgagggtaggcttttgccggcgcattaatgcgccggcaaaagccctgaaaattttggcggtcaacttcccgcccaaatgaaaacgtgtgtggaaattttgtggtaaacttttgccagcgcaattagatgcgtcggcaaaaggtaaaacttaaatgaaacgctgcgttttgtgcgttttaattcagcatcgacttttgccggcgcacctaattatgccggcaaaagtcgatgctgaataaagccaagacgaacccttctcccccatttttctctttctctttctctctcttctctttctctctctctgcaaccttcgcacctcactgccggcagccccattcctcccccctccaaacaccattttcaccatcccaaaaccccatttccactacccaacctcttttttctctcttattgtttcatttttttttcattttgttttacaaaaaaaccacatttataccgggactccgtcgagaaccgccgctgcccgagccgccaccatcttgccgccgcacatcaccgcaggtacccttttttcctctattttagttttatttaatttttttttatttgtgtatatataataattttaatttattgtgtataaaattgtgtttaatttattttttaagtttaaatatgtgtgtaaatttttatagtttcatgtgtatttttagaaatttttgtgtatatgtgtatataaatgtgtataatagtttatatatgtgtatttgtatatatgtgtaaatgtatatgtatatgtatatgtataaatatatatgtgtataagtatatatgtgtgtatttgtataaatgtatataaatgtatatatgtatatataaagatatataggtaaatgtatatattatgtgtatatatgtatatatatatgtaaaagtatatatttgtgtgtatatatatgtatatatatatatgtgtatatgtaaatgcatatattacgtatagtttatattttaatttatttagtagttaatatttattttttagtgaatagattttgtggtattcattttttcggtgtttggcaaaactcacttctcgacatattggaaggttagtatgcctatgttatattaattataatattaaaaaaaaagtttatttgaaaatgcatattagtagagtttgaatatcttatatattcatccatagtgaagtaggttctgtgaaaaatatactgacggtccgatgggtggcataaattaatatgtatgtaaattgttctggtattgtatttgtgattttgtgtagctggtaaaaatttgagaatggtcaattgtaaagtgttatgctgtcgaattttcggtagcataacattttaatttgattgtaagttatatttaaaaaataattagaacatacattaatattatagatatag

SEQ ID NO: 220074 - DNA, 2739 bp, Cannabis indica
atttttctgttattgtgagttatctgaatcttattgtaactaactacctactttaactaacttctcttctcctagctttgtatataaaagttgtcatgtataatcagtgtcacttattcatcttcatcaataagatcactctagtttatttacttctggtttttagcttctctctactcttgttctcaacaacctgagatcaatacaagcataaaatatctaaaataagttgggcagaaaacttggccaccaaactcaagaagtttctaatgaaagagaaaatttagctagacaatgggcaagagcattactagctcggttacaatgagaaatagagacatgagaaaaagacttccaaacgtgaaggatattagtaagaacaataccttactcattgcaatcattcctcttgtttgaaagagagttcactaggcgcaaacatttagaaaatatattgacatgagtatatcccaattgcacacaaaggagaagcccatggagaagggaaaaagcctttgccacatgaggttcgagcaaacccgagataggggtagcaaccgaacataaaacgtcactatcttgccgaaacaccatcgcccctaattcccaaggactaagcaaaagtgttcaaagtcctaattcatttaggaattcttgaagaacagatgcaagtgcctaagaatgtcaaaattgatgcctatctggtagtttcaagcgaaacgggctcagttcacatgattaagtcaactccacataagtgtaaagttaacttgggggcaaatgttaacctgcaaactttctttggtgatgtggacatcaaagtttgacacatggcatgaaggatgatgtcatggagttgagtagacccgagtcatagcaatcgacccaggaggggtcctagccttgcgcccagattgactttgggatctcagggatggaagttcggacttcaataacttgaattcaactcaataaattttagtattctgtaccatgaagacatgaaaaaacttaatccaaggcctggaagctgaaattacacgtacctgtaacccgaaagccaacttgagccctagggttttacccagtgcccaggttgacattctcaattagggtttcagttttcgagaccgtcttggtgcaaaagggtcaaaacttacattaggacatcaactagacataccaagaatatatttgaggtatcataattaaaatcagagcaagttcatttttgaacactcagggccctaagcacctagcaccaaggttgacaatctgtcaatctaggtgcctttcaagtatcagatcagagatccaacttttcatcttctttgtcttcatcaaatattggaaaataagtcctttcagagtaaaaacaacactttttaagtacaaaaaaggacccagcgctcaagttgacacttagggctggcccttcacccaggttgcatgttgtcaacctgagccattttaaatggagtttttcaagaattatttcaagcatcttctctattttttgaaaatattgagattcaactattttcgagaaccaaacagaattttaagagggcgaaaactgagacccagtgcctaggctaaaatattgtcaactttggttgtttctaatcaagttcaaaaaaaaagtgttctggacatctttttatcattagaaataatgaatattcaagaaaactcagggagaaaactgtaaacctgagcccttggaaagggggcctagcgcctaggttgacttggtgctaggcccagaacccaggttgacaatcacctgctattcctctaactcttatagcttactctgatatagactaggcaaggtacattgaagatcgaaggtctataggggatatctagttttccttggtgataacctagttagttggtctgctaagaacaacatgttgtagccaaatcaagtattgaaagtgaattcggggctcttacaaatgctactgctaagcttaagtagctcaaatctttactttcatagttacagattgctttgtctacttgtcctgtcatttgggtggataaccaggatgctgttacattaacagctaatccagtttctcatgcgcgctcaaaacacattgaaattgaccttcattttacaagggaccagatcatggagaagtaattttcagctagatatgtcctgcttcagtgaatgattttgacaaaggctttaacaacagacatatttctttatttgaagttcaaattgaaaatgagaaaagcccatttcgtttgaggggggtgttcttattagtaactaactttctgttatagattagttagttagttattttctgttaattataattagttcttcttgattaattttgtactttgcttttgtctataaataaaagaagtatcttctgatattgaataagctttcattcaatattatcaaaagataatttattgaaactctctgtttctcttttctttaatctttacaatatctataacaataatacataaataaaagtcaacacaacatttaaccggcaaagtattaagaatagacaaacaatcagactcaatcatcaaatttggatacctcatttttttttacaaagatacaatctttggagaatagcaaaaacttccgccacatcaagagaataagtggccgaaaagggccacacagctgaaaagggttgcccgtccttcatggtcgcgcaacacagccctagtgcccttgtgataactaat

SEQ ID NO: 220075 - DNA, 6951 bp, Cannabis indica
tttttcgtatcatgtcatatcttgtcaatttataatatcatgtcatgcatgcttaaatttatatttttttttcgtaccttccagtctcatgccggtttcgtttggtgtcaaaaaacccgacccatatacaagcatacaatatgaataattaagtagagacgcgttttagtatttaggtaaatggtgtatttagtgtgtattaaatttatcaaagaagataattaaatgcacacttacattcacataaacaactcagctgtttgactaataataagtttgtttttattttctcaattaaataaaatcttcactctctctctctctctcgatcgatccagctctctctcatctcatctcaatttcacactcatttctctctgcctactcactcactctcctctcttccacgattccctctcaccctcactcgatctctctcgctcatcatcaccttcgccatttccacaaaatccgagattcagaataccaaaatttcatttttcaatccaatttccaacaacaaaaggatctgtttctgtttctgcaaccccataaactatggggctgcgttttctgattccgacatttattctgatccttgcattccctcttcttatccacgccaaaaccctcaaacgggacggtgagcttcctccgatctctattttggtgtcggtttgctctatcttttttgggtctgattttgttttgttttgttttttgggcagtgaaagctttgaatgagattaaagcttcactcggatggagagtggtgtatgcttggattggagacgatccttgtggcgatggcgatcttccaccttggtctggggtcacatgctctactcagggggattaccgagttgttactgagttgtaaggattttttttttttatgaagctttgaaaatcttgatagacccatttcgttaatttctcaatttctcttttgtttttgtctgtatttggaaatgaagtgatgggttttgaatttgagacggttctttcaattgggttttgcttgcagggaagtgtatgcagtttcgatcgtgggaccttttcctactgctgtgactaatctactcgacctcactaggctgtaagatccaccataaacctttttctggttttctttcttttgattgctttcaagttaaagttgaatttatgttttatgagtgatattgatcaaatctagcttctcagaagtcttgtttaattaatacaaagtttgcccttttcatacttttgctgctgaagttctatgatttagtaacagcagagttgaattaatagttttggctttgataaaattgaatgcagctaattactaaaagttatgtctcatatttttattacgttattgattcaaaatgttcataatttgtgtgatcatggtactctatgacagggatctccataacaacaagttgacagggcctattcctcctcaaatcggacggttgaagcgtctcaagatactgtatgccctgtactctttattttagcctcttgagttttgcaatttcttgtagttttatctagatggttggtgccttatgttaattaatcactaataattgatgctgacacactgactttttattctgttctagactttgctaacttgtatgtttcttccagtaatttgcgatggaataaactacaggatgttattccccctgaaatcggtgagctgaagagcctaacgcatttgtgagtagtctagctttctcatgataaatttagagatttatgtatctgtttctatcagagctacttgcttatagttgatttttatttgatgattttacttttcagatatctgagcttcaacaacttcaaaggggaaattcctaaagaactcgctaaccttccagagctccgctatctctatctgcatgaaaatcgtcttattgggcggattccagcagaactagggaccctacaaaagcttcaacacttgtaaacttccatctttgagcacattttgtagatcaagcatttgtacctgaatcctaatgccttgcactataattgctatttctttatagggatgttggtaacaatcacttggtgggcactataagagaacttattcggattgaaggttgttttccagctcttcgcaacatgtgagtttatccaattcgtttactcattatttattctgtgaaagtttatccacaaaggatatgaatgaaactttatttgtacttatgatgtgcagctacttgaataacaattattttactggagggattccatcacagcttgcaaacttgaccaacttggaaattttgtaagttgcctattgccttcgatggttctcctttctcggaggggaaaaaacatcttcattgatcagaaatgtttaccaaagtccatctgtttagtttattaaattgaatgtttcatggctacaggtacctgtcctacaacaagatgtctggggtaataccatccgagcttgctcgcattcctagattaactcatctgtaagttttgttttttgcttggcaacatttcatatggatggtctacaaattcaactggttcaatcagttgggagctaaagcatatagtgaaaaacttaatatttctttatttggtttaaggtatttggatcacaaccagttctccggaaggattcccgatgccttctataaacacccattcttgaaagaaatgtgagttcttaacaatcaaatcttcaaatgatactgcaattcattaaattttgcagggaactgaaaatttactctgctaattgtttcttataggtacattgaaggaaactcatttcgatcgggtgtaaaccctgttggtctccacaaagttcttgaactttctgatgcagactttcttgtttagttgagatatatctacctaatttttgttttcttgaaaagtgagtttagtgatttatcttttaccaaagaatgtaaaatacaactttgtcaagcgcaagtcataaagtaatgaaatcaagccattgctaaaatattgtatatcttttttatagggaattcctgaaaaaattgattaggaatgtattaatgaaatttgttatcttgcaagattgaaatttttttcatattactgtttggcaactttctatgaggagcttattgggggctgcaattttgctttgtgtgagtaatgatatctaatatattacatgagcagctttgagtgaaacaagataattttgtgtacattgtatatattatatttttgacagtaacttgaatatcaaatgaatttatttattagacgtggataaaaagaataaaagaattataatattgatataatttactaagtgcaatcattttctttattatgtcatcttttgtttaggccaagttgcattctagatggaaatctgtaagaatcagagtagtaattgtagatcaagtaattcttctgaacccaattgagctattgctcaccagtagagttcaactcttggttgagccatggatttgaattagtttgagagtttgatgaaattgaagcacaagaagatgaggcagagatcataatacaagcattgaagtttctgtatgaggttgtgaagggtgccttgctcgaattaatcttcaccaaaccaccctttgtggcccaatcatccacattccaaaggctcgagtggattctcattggctggttctttgggtatgggacaccctttttggggtaccctttgattccaccctcaggcaaatttctatgatgagcttattgggggttgtttgcaacatgcactgtatctaatcttatatgttgatttttcactcctaagttattacactcaaccaaataaacatagagaaagatgcttgtgatcattatgcaaaattgtgaaccagccaatggagatctactcaaacgaaaacaagagccacattatacaatagtatgttagataattaaatgcttatttaagctccaaaaccaagtgaatttcttccattcatggatccatcttccctcctgcaacaaactcatgaactccaccttcgatctcaatcaagctacaccccggtaacttttcaactcctctatgtttcatcagcttcctcactcttctagcatcactatcttttccaacagaagcgtacaagttcgagagtagaacataaaatccacttccactctctaactccaagagcttcccaaaggctagctcagcaagttgagtctgcccatgagtacagcaagcactaagaaatgccctccaagctactttctcttcagaggggttagttgaaatgatcactctttgaattatttgttttgcttcttcaaagtgccctgctctactaagaagatctaccatacatccatagtgctcagttttgggttcaattctgtacacaccacgcattttctcaaacatcctcaagccttcacatgccatacctgaatagctacaagcagtaaaaatggctataaaggtgatgtcgtctggttgaacgcctgtcttctccatatctcgaaatagttcgagtgcagcttctccatctccattgattgccattgccgaaatcatggcattccagcaaacagtgtctttttgtggcatctcatgaaaaatcctcttagctaaatccaaattcccacacttagcatacatgtctataagacctgtactcaaccgaatacttaagggcaaaccaagacgatccaaatacctgtggatccatatcccaaaatcgaaagctcccaaatgagcacaaccagaaagaatgctcacaaagatggcctcatcaggctctatgtcagtgagttgcatcaaacgaaacaagtgaagaccttccttaaaacaagcattctgaacataccccgaaatcattgccccccatatccccttatctctcacaggagccacatcaaagaacagtcttgcattgtcaacttcccctacctttgcatacccagaaatcatgaccgtccatgaaaccacactaaggctagacatttcatcaaacacgtatcgtgcaccttccatgttacgaaactcacagtacatgacaatcaaagagtttcccacaaataaaatcaaatactagacccaatttcatgccatgcccatgaactgactctccaagatgaacacttttcagcctagaacaagcctttaacacataagggagagtataattgtctgggactatcccactctgtaacaagtttctatacacaagtatagtttgaatgaggtcattgtggagtaagaaagctttcaagatggtattccaaatacaaatggtggggttgtgaatgtgttggaagattttccaagcatgaaaagggttgccatgatgtgggtttgagcaaaagtccaagactctgctcagagcaaagttattactgcctagaccgattgtgatgattgatgcatgagcttgcttcaagtctttcatgttcttgcatttctctaaaagtaggagacatctcctagttgtggcactatataatgacattctctatacataacttcttcattcactgcctacgttttttcaccaacattaggacttgggaatcatctcatacataaagaggagctaccaaacttcagttacagaaaaacgaaaacctttccagaaaacaaggcgaaaacaaaatcagcaagaagagtaggggctcaaacttcatactttaagagcatagttaagtttttgtgatctgccataggagagagttgagttgcttcaatagtgtaacttcaatcaaatctctattttgtaaaacatcaataactctttcaagaattgtttcaatatttctcaagacacagatgtatcagtcagtcatatctaattcactaaatttttggattttaatgtatacacaaatagtcacagaactttctgtgagttatttcaacaaacacttaaaaagcattatactttcatagaatcatcccaacaaatacacacaaacttgtacatttgtacatagtttagacgattgaaggagagagaaactaaaactaatttagaagacgaaagagaagcaagatctaaagataaaaactaataatataaattcagaaaggaaaaagagaaaagtcacgtacaaatgtgtagcgatggaggaggagctaggttgctatggcggaaatttttgagatgtggaggatatattgggcaattcaattattttgcagatatttttggtaattgtgtatatgaaaacttgtatttgtcaaacttatccactgtactggcagctgtaagtcttcttcttttctttattgatttattttctgattacttttcatctgttttttctcttaaatcaattgagctagtgaggaggagaatcatccatggctgtagaattggtggttggacctgttatctctgcttcagttgagtttctcctgaagaagatcacttcttctgaagtgacaagcttcttaaggggaaaaaaagactctggttttgatagtcttcttgagaagctcaagacaatgtttctctctcttgctgaggtacttggtgatgcagatcagaaacagatgagaaaccctagagtggaggagtggctggaaaagcttcaagatgctgtggaagatgctgaggatctctttgatgaaattgaatatgatgctctcaaactcaaggtggatgaacagtataaaaccaaggtaagaaagttcttatctaatttcaacttaattgatagagataggaagattggtatggagaagattcttgagaggttggagaattttgagaaacaaaagtacatccttaatttgcaaaagagtgttgagaaaatccaatcaaagagaccaccttcagtatcatccatagatgattatgaattttatggtagagatgatgaaaagaaaaatttgaaagaaattttgatgtttgatgaggtgggtagtgaaaagatttgtgtgattccaatagtgggtttaggtgggat

SEQ ID NO: 220076 - DNA, 1023 bp, Cannabis indica
ttttgtggatacataaaataataaattttagaaaaataccaatttacatataacattaattttgcttcttaaagtgtgttggttagaacaaataatttccaacaatactagcctccggttgaatgtactccatgatgatatccttaatctgatcataaatattctccggttgaccgtgaaccggaaccctagttattccgggaaggtcaaccatggtcaaatccggaacacctttctttttcacaatgagagtcaaaggggtcttagatattcccttaccatctccggcaatgacctgagtcgccgtgtttatagcttcggagacattttcttcggtggtcggaactttaatctggttgtactctagaaaaagctccggctgagaattcgagctgttttggagtctcattatgagtgggactcttgtacagatgccttgtccacgtggcaggttgattcttgctagggattctcgaacggaggacttgccggaagactgttctccgacgacgacgatggtgggaagctggattccttcctccatgacggcgaggtttctgagcttgtcaacggcatcgagcacgggacgaatcttgtcgttgaaggaagaaactattggtgagtgacttccaatgccatcaagatctgattttacaacaacgtttgtagtagaaattagggtttgctttttcttgttactccccattttttgttttggtgataataatgagaattattatggaagaaaatgagtgagtatggagtgattagggttcgaactttattatgtatatatatatatatagaagctaagctagggtttcatgatcggacttttgaagctccgattggtcaaatcaataatcttgagagagttgaagaaaatctttgtgataagagaaaagtgattattgataagaaattacaatatgaattaaaatcttatgattagattttagtagctaggcacgtgatcaagaaaggtctatataaagctgacaaaaaacaaaaaaaaaaaaaaat

SEQ ID NO: 220077 - DNA, 2051 bp, Cannabis indica
ttaaaaatgtaaacgaaacagaattggaggattttcctaccaaaatatgaaattgaataatttataagaaaaatctcatatttttaccaacgtttaaaattaagaaataatacttaacatcactaataattcttgggacacggtcttaattgtaacaaagttgaagaaggaaaataacaatattcttctgaaacttttaaaacagtaattttgtgaagttagtaaaacaaatccacaggttaatagtaagtttatgtaattgataagttacaattactagcactgctactttacataaccgtaccttaggaaaaaaaatatatatttatatatataaatagattgcatttattcaaaaatccttttttttttatatggagtggtgactggtgagtgataatattcgttgtagcttagaatagaagaacatttgggtgatgaactgcctaaggaaggaccatattgctgctgctccataattggaaatggtgattagtctgaaaagaattcttgttaatgaaattgaaactcccaagcccaacttatatgagatcttctcttgaggacacaatagaagacttgttacactttaaatggtgattggtgtaccttgactactgcaactgcaaggcttcttttcctgatttttgctttgaactaaaaaatcagaaaactcaccccctttttccacatgaatttgtgtatacagctgaaggcaaattctccaatcccacatgcttggtgtcatggtgaaatttgacatatgtataagaatactgcttcgggacagaaaacccaccaactaaataaatcttggcatggaacaagataaggcctttctgtgttgtctgacttgtctcaaaggaaattcctctcaaatgatgtcgaagaaaacctggaagttaaaccttcacctatgtttcctgggtctaactttacatcttgtcgcccagctaccaagtccttctcacgatcccaaggcttccatggatgttgccccacccactcatccttctcccgttgttgctttgaggatggttgttgctttgtagatttattcttcgttcgaccaaatgctttttcttggtgcttttgcaccaacgattttgatcgtttttctttgttgtatttatccaccaaatctgcttctgcactcttctccacttcgtttgatgccagtgctgcagccttgttatatgcttctaggaaactgccatgggacacaaaatgtggagcaaaatcatgtgttaattcaaaggcaactagcaatgatttactgcaaaaacaatctaattttaaatagtattactactcacttcgtctttgccttttgggctctgtccgtaggggtgtctgtccacgcactagtatcaccacgtccttcctttgcatttctgctaaagctggttgactgcattggcatccccccaggctggaaaaaaacagcatttcattatgaccttggcaaaaatttataattatattaaaaaaatggctgaatataattatatgaagcttcagtttcactcaagcgtttgtttaaatggaaacaagttaaaagcactcatcctttctaacaacagaaatagggagcaaaataaatcataatgataagttttgataattgattttatcagactcatgtataattactggatgtgcgggaaaggactatccgatgacaatgagatctccaaaattatgaactgtggagggagaaatgtgatgcctatatcatgaaaagaaatataggatccgagaccttaccttcctctctggaggtaaatttgtcatccactcgtctcgctgaggagcaactttaacttccatctctgcgaggagctcctcatccccctccatggatatacctgccaaaacatttggtgtcttagtaagatcagctagcaagtacaaaatcatgaattatcaacacattaaaagaaaataacattacaaaatgccatctattcaattggttctaaaacctgaagtttaattcactcgatagtattatgaaaaaactgtaccaacacttttgaggctcatatcaa

SEQ ID NO: 220078 - DNA, 2043 bp, Cannabis indica
ttgagatggagaaatattaccaggactagagctcttcacaggttgttttcccttgtcagcagcagaggctttggctgcaagagcagaacgaggaggagctgctgaagatttgggcattggaggttcaggctccaggtcagtttcctcactgtcagaggacactccaagatcttttggaagatcttttacagagagaagggactcagatttggtctcggagtcatcagaggacacttccattggttcttctttttcaacagaactcgaggaagctgagggaggattcatctttagtttctttgcagcaggaagtggtctgtcatggcttcttttggtgcgaagttccttctcgagtgaagcttgttgggcacgagtgtgagaagatgggcctgttggagtggatgtagcaacacccttacttgttgcagcaggaggcaatgcagtagcacgaggaggagaacccttcgacgatgaagacgatgaagtgcaaaatttcatgggggtctcacagatttcctagccacttgtttgggaatctgtttaggcttgggcttcacagtctgagttcacgctgaggaagtgatgaatctctttggagaggagtagttgctggagcaaagggcaagattggagcagcaggaggaacatttgagggggcaggtttggattccatcaccctttttggttgccctaggttctttgtcttagccatggagatctgaaagtgaaaaagaaaaacagagaagcaaagaaaaaagaagaggaatcgggtagatggtgcaattaaagacaaaggaagttggtttaaaaaatcatgtgagagtggtgcaaaaaaggaaaccaacttcaaatttgaaaaactaccagcccacgaacacaatgaaaccgccccactctttttccaatttttttttttaaaaaaaagaaacacgaaaaaaccatgatactttccaaaaataagcaatttaagaaaatccttcaagatcaatgacaaaatacaataaatatgatatcaaaatttaaaagttaacttatcaaaataaatcaatttagattaaatgttgatacttactaaacaaatcaaagattttcttagcccacaagtcacaaatacctcttttctttattatttttattattttttttctcgaaaatccgaataaataaaaaataaagaaagtatgtacaataaatataaggtgttctagagcaagtaactaattaaatttcattacaagtgacaaatatacatgttatacttttaaaagagaataactaattagtatctcagaaaccaaccatacttaacagatgttgaaaaaaaatagacatgttacaaataatgtaaaccaagataatttttattagagtagaggagacttacacagttgaattcacttgtcagacataagtgtgtgcagtgaaaatatgatcattgtccttggcaagatttttatttttcgcctttttcaaatagatcccacgactggatgctatcacaccatactgaaggtagcccttttctatggtagtgcatcctcatcataactcttaattacaacgttccagcttactcaaaatatggctttcacacctcagtatgggtaactctatcccagtaaggggcctgacaagaaactgaaacaagaacgctcaactctgtataagaacattgtataatcccaatcacacataaaaagtaacatgaatcttttagctcaacctcaaaagtatgataagtacaagatactgaactaaatattatctaaaagcataaaccggatttgtcaaataagaatgaaacaagatcagatgcaagcaaagaacaactcatcaatattgtacaaaaacaagagcaagatttttctgagggagtcaaagcgacttgagtctagagccttggtgaaaatattagctgattgtttctcagtatcaacatattcaactgcaaagatttattttcaacaaaatccctgataaagtgatgccttatatcaatgtgttttgttctagaatgttgaacaggatttttggaaatattta

SEQ ID NO: 220079 - DNA, 1796 bp, Cannabis indica
tagacaaaataggctttcgatactcaaatatgtaatatacaaataataataattgtgacgattgttgttttaattgttgttctcaaaccgatattattctatcaagtttttcaaatgagacagcactatttagatggataagtcctatttgaataaggcaatatatagccatatgtaatatatcttataattatatatgtatttggtcataatcatagagtcgctttctatgcgtatgtatttatatgtatacactttaattatcttaaaaaataaaaaagagaagaaattgaactaacgagctttatcggtccttccatggattaataaaagaatgagagcggcacaattattgatataattttaaaaggattaagtaactagcttttatcaccaagagttttctttctaagtaaatttcttcataattaggccctttcaaacaaaaaatttattggcatatttgggccaactagtctcgaaatctccgagagagagttataatcacaataaccaagtagtagctaagctacttaataaaatcaagtaattctccactagtcatgattttttcttttgtcattttttgtggattgttatgatattacacaaataaatcgcatagcactatcagtctgtcatctcctataaatatatttatattaatatatatatattaaatggtcaataaatttgtcaaattatttatttatttctctcatcacaacacaacgtaagatgcgattttttgataaacgacatatgtggcgtgaggtatgcgttgttgacaatgacaaatcatatttgttactttcttgtgggaagccaactgaaaatgaaaccttaattataaacagaaaaatgatgccaaccatataacttaaataataattaaaaacttaaaagtaataatagtgataataataaaaataatgttcattatattataatttaggaatatttatgtttaattaaattttgtttggtgggtaagttccaatgaactgagtcagcaaaaatagagacagtttagagtcgttatcttaaacacgtcacttaaggcccaaattcatttcaaagtctcaattacgtaatgccacgtggcacatgcggcgacccgtttgcgttgcgtgttccacccagataaataagcagcgacgcgaggctgcattaactgccacgtattattattattattattattattattaatgagaaaataaatataaattattttttatattatttaaaacgatttaaagaaattcttgaattttcggtagtggatgtggagtacctgctttaaaatttcaacagatccaattggttatacgtcttcttagtttggagatcccattcaatttaattaaaaattaatatttgactcaatttaattaaatttaaaatttaattcactctgttaaattagatctcactgtaatatttattattactgtgtcacaagatgaagtgaaaaatacagataaagtacaaacagaatacaacagaatttagatcctatgtggctttgcctctagtggatcaagaactagctgttagttacaaccgaagttgtaactaactcctagttctgtgatcaactctaaactaaaactataaaagagcactagagtaatacaagaaaaaaaaagagttcagatataccaaaaacgagagccctaggttaccagatctgagaagttccagttcatgcaaaagaaacacaagaaagttagtgagagaaatcaaaagcaagagagaaataaacacagaaaaacaaaagagagaaaccatta

SEQ ID NO: 220080 - DNA, 1111 bp, Cannabis indica
tgtataatataatgtatatgtatttatattattgatgttaacctatcgtgaggtttatatataagtcccaaaactacaagaattaatagaagtgaaacttcatcaaaagtgatttgatcatatatactatgattaaaatagttgttacagtagaacctctatccgagaaagccaccataaaaattgataagttgcaaatagattttcaggcacaaaaaaaatttacgaggtgaacaaatcagatacaaggcaagatcagttttcaagagtttgaaccaaagagaaggtacaattttacaggcattttctcaccagttatgaaacaaacatccattcgagtgataatagaaaatcttgcattgaaggcttaaggagaaaatctttattgttgaacgataggggttcaaaagcagcaatcccaatcaagtatgcctcctacgaaagtctttgtatattgtcaaatcattttgtgaaaatctattttgctaaatgattttatgaatgtgatttaactaattagttgttattgtgtaatattggtttgattctaattatttttgtagcttaaatttgagttcgaaagtttaagtaatttaattttgtagatagttcaattatgaattggcagtatgaataattttctataatatttattcttgcaatctagtttaaggaaaaaaaaatgatttctttataagaaaacttgaaaggaaaataaatcattctttggtttaattttgattaagtgtctcagtataattaaaaaactaattaaatatatttttcagttttttaattttaaaatataattttttaataattactatttatttaaatactaatttaattgtttttcaaaattaatataaaatggattaatgaaaatatgacatgtgacattttaataaatacaattaatattttaacagaacagtagttatggaatttgatagaaattaacatttagtatttaatctatcgaaaaaaaaaatgtaatatttaagtgtatgaaataaaaaatataaggtatatatatagtaaataactcaaaaaaattagggatttttacaccatataatgaaatttttaacttttttcttttttattgtgg

SEQ ID NO: 220081 - DNA, 2360 bp, Cannabis indica
gatcagaatgttcactgaccttcaattatccaccaaaactctaaaaactcttttgttggcagtttgagcttcaatgaacaaggggtaattatggggaaagttcacatgtttggcgccctcctctgtgaatgtaatcggcaggttcattatttgaggacgctgagctggtgattgcacaatgacacacccgtctaaccccctaaaatgtctcttatgggagcttctggtgcttcttgcaaggtgtggtcccccaaagatcgtggccacatgtccatcaataggtggcagagctaggcctaaaggatatgggaatcctgatcccaaagccaatgcggctattacagtcagagatggtgaagtagggagcgctggaagttgcactctgaagggtgacctaccccttgtggaggatttatggtaccctaccatatgggaatgattactttccgtgagcgatcccctgtccaagatatatgatgggaatgacccattattccaaatgtcttgctcttaaaaacatctcaatctcatcttttaggtggttacattcattggtggagtgtcctacttctttgtggtactcgcacatattacttggatctcttttgaacttgcctcttgaggcgtccatgggggctttctgcagtggaccatgttgcaggtttctctatacacattctctcaagtatccactagactggagtactcggtgtacttgggttcattttctttctttgatctcttcgaagtttcactccagttttggccctttcctcctttcttgttctgggaattactcatgtttcattccaaaactttcgcttttgattgtctaggagtgaccctacatctggtttgtgtcaccccatacccagaaaaattagtttgtgtaggcacgggcacagatgcaaattgtctgtagtctgttaggttatattgtgttccaggaataaaggtaaatttgtcagtaaaagcaataggagctaatgttggagggactctgaattgctgataagcatcttccaaactgataaagccttataccttttccatgaattttgacaacgtcttggccctccttccttgcatctctccccataagagagagccaactgcaattccaaaatgtagtgccacacgtttcatgtcatcggtcaccttaatcttagttgccacatctgttattagatgaacgaaactcttcatgcattctcctgcctgttttttgatattggtgatggagcctatttccatgtcaaagttgtaagcagcaatgaactttttttggaaggtagactgcaactacttccaggaatggattgatatgggagccaatctcttccaccaatcatatgtagatttggtaagggccagggagaaatacaaacacttggcatcttcactcaccctgacctcttgcattatgttgttgtatttggctagatgggtctttggattggtgcgcccatcatacaacttgattagggcatcttgaagttcaccgggagtggagcttttgtgatccttctaatgcatggctttgggtcctcatcctcaaagtcgatgagggccccactttgtttttgaacctatttcgttagtgtagcaatttgttgttccaatattttggtgtcactgtttaggagatctcttccacgaaccttatcgctaagatgattcctgaggtcattactacatggcctcgccttttcactttttgctttttcatacttggcgtccaagcgccttctgagatctattgtggacaaactgtcatcaaaatattatcttttggtcccaccatctaggttgacaaaatcactagggcagtatttccatcccttgggctttggtacttttgtaccagccctttttggcgtaacagggcctttccaagcacagaggcatcgatggtcttctgcgcatgagaaggcctgttggtcggattcatgcatctccaaggaggtataggagcagttgggttttgggtgtcacctagttttacctttcttttattttgagcaggagtaaaggttctagcattagtagggttttccttatttttttcgccgacacattccaccagggatcatcgtctgaatctcccttgtctagatctccgaacttactacaaaggtggaccatcatcctctccatcttttgagagaaattttcttgatgggctagttttcactaagtctcaaacaactccttggacactcgaaccactttggggtcttgctcatagtagtagccatctttgtagtacccatctttaacatactctccatcgtcatcctgctcttcatcctcaacatctcggtctttatcaacaccgtcatgttatttgtcgaggttgg

SEQ ID NO: 220082 - DNA, 2649 bp, Cannabis indica
tcttctttgcactctttttttttgtacttcttttctaaaaaattcgtactcctcctccattcaaagtgcagccactatctatatatctgtattttcttacctgccctccatttaggttactaaagtttaccctaattggaaatctaagtcattgtcttcttgtcccttttttttcacacattggctgactcattaaacacattttcaccacataagcatcagttattcctcattaacgctcactggaatttctgcatgattctcttactggcttgtcaattgctatgcgataattgctatagcaatgactgtcagcaacaagcattttccggctctttttcctcttgtcccaaacactcccgaacacctattttagcattttttctgcataatatacacaaaattagtaacataagtctctttaacacttaatacacacacacacatttccatttactacaatgacacaacaaactaaagacaattacataaaatagacactaactactctactatttagtttaaaattcaagtttaaagatataaaaacaactctaaatcttagagttatcagtactcgtccacaaaattccctatcctgctcacatcgaagtccacagtgctcgtcagccacttctcctcgatctgagaaaaatagaaatacccagacctgctctgcttggggattgatttcagatcaaagaacaagttggtgttgggcgaagatggctcaccccatcactgtgaggcatagagaatgaacaaggcagataaatacttgattcccttcaaagtgaattgggtcggacaaagatggtaataatccgtaattcttctaaagtatggaagcaagggcagcatagcaccttgcttagtgtgagtgcttgaccaagcgcagtacccctctcttggactggttgcccagtggtttggagagggaaggaagcattggacatcccccaagtaatcgtgcatctacaaatttttcatttttgcatgggtcactatggatggaggagaaacccaccgtgctcctgctgcactttgtcttttctaaggaacgacctcggtgtattcctcagtaacatagtcttcactggcctctatgatttcactggcctcgcacataggttgtccattatcattgaagccaccaaagggtaacctcctagcaacaccttcctccttagcttcagatggagtatcaagacagacctcgccctgatccttcatttcatggactttagcgtccccctcaatgtcttcctcctcaacaataggtcgggcctgctccgcacttggtatcgtggtaagccaagctacgtgtaggtcagttagagaagactttcccacttttggtttagtgtgtgcaatcatcctattcctagacggagcttgattggtatgtcgggcaatagttacaatgaatgcagcgatgggcgtacctgtagcagcaggatttggacgacctaagggtaaagtgtcaactgtatctggtcggacaatatctgtctagttggactgtaaatattgcctccaccctttcatgagccccagatgaaacgtccgtagccttcaccttcgatctggcaagggtaaaaatactgttgcacttcgggttctggagaaggtgtgtgttcgctagttatttcccaatcttcgaagcttgaattggaaagatcgtccccggatgaggacagactagcactaagacgaggatgaccctcgtacagaagttgaagaagatcctgaacgatacgatgttcgcttaccaaaaactcaccagggttaatttacaaaaggtaggacacaaggtgagtatttggtcaggaaaatgaacacaaacagattggtttaaccgaccttgtctaatcgaaggatcaacaaaagtaatttacaatcaagaatttcaaaattttgaattaagggttgattttcactaagccctgaatggttcagtgaaacggaatatcatggaatcaaatcaaaacacagttataatcaagcaatgtggttaagcacagtcaggatttcacattcctaaacctaaattttctacggttttccaagaacaaattcaagaactatcaagttgttacagtggaaacccaaaaaatcaaatattcaagcataaaagaggagaaagatgaagaacttactcactgtttgaagccttagagtttctcggatgacactgatcggtgtttcttggcgattctttgaaggattagagaggaaaatatttcttgttctgattcttcaaaaacaaaaatggctaaaagtggttaattagggatttcaaccctatttataagctaagtagtacggcaaagtaatcatttcaaaatttgaatacctcagtttccccctaaaaagtatccattgagcattcaattaccaaaatggtaaccgtcaaacgtgctaattctaaggcgtggctcgaggtacatgtctatcagcattaatgacccgaaaatagaagagacctttggtcagagtcacatcaagtcaccaaccgtctcttcgaacacgtgccacccgttcagataaagatccataccgagtgaggtccacgtgcgaccataaaggtcccgcgcagacttggggggcaaatgttatcccattttttacactatgacatggcagcac

SEQ ID NO: 220083 - DNA, 2227 bp, Cannabis indica
tgagttctcagatccaaagacttggacttcaattgtttgttttcctaaaaattttccatttctcaattttttagaagcttaaatttcttttatcaacctgagctagctattgggttttttgatctatcgtggtgagaagtaacttactcccagatccttgaggctccgattccaaaggttaaaccttgagcttcattttgtgcttttactccagatcataacaagtaaatttttagaggtacataaatgtacataataacccccaagtgagctgaggacacgggtccttgatcatttgtagaaacatatacaaaatttaaaaagacttcacatattttccttttaatttcctctttttcataacattgtgtttgccctaacgcgtgccctaagtctttcattttttgggaatgaaaaagaaagttaaaatatgcagaattaaaagagatctagccacccccacttattgatagtaccgatgcaggtggtccgcattttaagcttgtagaatttctcacccatcaagtcttttcaatcaatatgttccatcacaccttgtgctagatttcatatggtacctccaagttaggtcctagaaaccacactcccagttcttgagatgcaaaaaataccattctcaagatgagatcgccaacttcaaacttctggcttttggcttttgagttgactcataaatgctcttgaagcttttcaattaaatccaaagattcttaaagtaaagcatggtttcaggtaggatcataggtctctcgtctgtaagatggtacaatgatttccacatgatgatagtttcacaaacatacaccataaaaaattggggtacgcctcattgaagttctttctattgtttagaatgcccagagaactctaggaagttcttctggccaatgcgctttgtaagcttccaacttcttcttcaacattgtttttaagatcttgttgacgtcttccgcttgtatgttggcctatagttttggatgattccatgttttgcacaaaatttggtgaagtgatcactattgaattactttccattgtcagacacgatcttgtgtggaagtccataacagcatactatgttcttgatcatgaaatccaaggcctttttggaggtgactgtgttcattggttccacctctacccacttatgaagtattcaatgacaactatggcatatttaactcctcctttcccagtagaaagataccctactaagtcaattccccatactacaaaagcccatgagttgctcatgaagcttatttctgtgggcggagctcgagggcctttagcataacgttggcattgttcacacttctagacgtagtcgatacaatcattttttatagtgggctagaaatatccttgttagatgatctttttgataaacttggtccagatgtgtggtctctgcaaaaatcttcgtccactttatggataacaacacttacctaagtctcggctatgcatcttaagtatagcatggatagccctcttaaatacagtttttcatccatgatgacatatctgaaagcttggtactagattttcctagtggttgttctgtctgcgggtagctcttcaaaacttaagaatttgttgatcggacctatccatgaggcggagtggtctatgaaatttacccctagtgcttgagtacttggcatagagagttgagccacgagaaccacttcacattcctctatttttgcatatgttgctaacttggccagcatatccacaaaggcattttggtccctagggacctgccgaatggtgtcttttgaagtgctgatgtagttcaacagctttggagacataagcagccatcttttctctttttatttgatattctctagatatttggcttacaactagctgagagtcactataaacttcaatatttttagctccgacttccttggataggtgtaaaccagcaatcattgcttcatcctctgccttattattggaggtaacaaatttgaaccaagagaactctatagttggagcccttgaagggagattagcattatcccagcttcaatacctttctcattcaaggatccatgatcaacgtaaacttctagacctcttattctggaattggttctttcgaattgtcatttattttgatgcattccacaatgaaaattggccagggcttgacctgtgattagattctcggatgacaatgtatatcaaa

SEQ ID NO: 220084 - DNA, 2929 bp, Cannabis indica
caaaatcaaacttgaaatcgagatcgagatcaagtacttgctaccccatacaatgtactgtggtcgataaccctagttctacgattactaataatagtgatcgaagatcagccaactatggacctcccatttggtcttttgattttgttcaatctcttccaatccaatataaggtgaattttatttctttttgtatataatttattatttctttatcttatcactaaaaatttgtagttaaaagtattacactaaatattattttttaataagaaataattttttttataactaaaaattagtcacagttttttattttttatagcggtgatatatatatatatatgctacaatttttcccatatgatgataatctttaactattattatacatggtacaaaattaaaacaacttttcctagagcaaaaagcatcgggaaaaagttaggtgaaaaattcatgtttagggttttgatcaaataactcgattaaaaaacataagaaagaaggtttttcctaaaaaaatacgaattttgaaagttttcgcattatattcacatgtaatatgagaaagactaaagggtatcagtggtacttagcaccctcctacgtgtcaatatattactattggttcaactaaatatcgagtcccatatagtttaatgtaataacgtttaggtgagtatcgctagccaatcgcaaggtaacacgtctagaaagtacttagcattactgatacctaatagtaatgatctatgtaatactttcgtgtacatatatatgacatattagtttgcttaataacacgtgctcccaataatattaatatatattattttgttttaagaaacaatatcatcactatgtataatatttttgagcattgctattaggcaccagtggtgcctagcaccttctcgacatgttacgttgcgattggctagcgatactccctaaaaattattatattaaactatgtgggacccgatacttagttagaccaacagcaatactgacacataagagagtgctaagcaccactgataccctttaacatttttcaatatttttgtatttattgtaaagtttattgtttattagacttttttctaacacgtgtcatttggcacgtgcccccatatatatgtacatgcagggtgaatcttatacaagtcgattaaataagttggagaaagatgtgaaaaggatgctaattggagtggaaaactctttagcccaacttgaactaattgatacaatacaaagacttggaatatcttatcgttttgaaaatgaaatcatttctattttgaaagaaaaattcaccaataataataacaaccctaatcctattaattatgatttatatgctactgctctccaatttaggcttctacgccaatatggatttgaagtacctcaaggtatgtatattatagatacatataaacaattaattattattattaattaaaatatctattttatataaaatgtggttatgcaacgaaatttttgatttaactgtattttttaattttctatattaactttaacagatcgagaatatgccaattatctagaatatctctaaattacttaatataatattctttattaattttctaatattattatatgtatttaaaaataaaattatataaatattttataaaaattatgtagatattatatctaaaaaaaattaattttattgtatatttttacattatacaagataaaaaaaactttgggttgttccaccaactgaaaaaaattagaaaaaattgttcggtaaaataaagataatttttttaattagtttgacttaaataatttttatataaatatatttttgatataatgtaaaaaattaaatattttgtgatattttatttaattaaatagataaactaagtataaaaatttaaatttctcttttattattcgtaattgaattcaaatttaatggtttaatattgagaagtgttccatatatatatatatgttaaatatataatttgtattatgttattattgcagaaattttcaataattttaaaaatcacaagacaggagagttcaaggcaaatataagtaatgatattatgggagcattgggcttatatgaagcttcattccatgggaaaaagggtgaaagtattttggaagaagcaagaattttcacaacaaaatgtctcaaaaaatacaaattaatgtcaagtagtaataataataatatgacattaatatcattattagtgaatcatgctttggagatgccacttcaatggagaatcacaagatcagaagctaaatggtttattgaagaaatatatgaaagaaaacaagacatgaatccaactttacttgagtttgccaaattggatttcaatatgctgcaatcaacatatcaagaggagctcaaagtactctctaggtaaactatacattataaagataatgttttacgaatgatcatcattgctatttggtaccagtactgcaggtatgcttggcaccaccttgaggtggcgctttgcgattagtttagtaataatattccataaaagttattgcattaaattatatgacactttatacactggtgccttttagcatttctccttacgaatgattatcactagtatgacatcatagcggtgttctgagcaccactactgattattttaagtggttttgatcatatatttgtgtagatcatagaaattcaggagacagccacaaacacgttttcacaaatattcctaaaataatctctaatttgtagtaacaagattgaaaactatagtggtagattgggctgaattaggaaacttttcaaatcgattcaagatcacaatttaaacttttcaaataaaaggtctattttttttcttatttatttattttacatttaaatccaatt

SEQ ID NO: 220085 - DNA, 3651 bp, Cannabis indica
tccaactctatggcatcaacattgtcatccttcgtttcattatcgaacccattttcttcaacgtccttgggtaccatgataaaaataagacaaaacaatcctttaaaacaaaagccctctatcctagcttatgtgtccttctattatatccacaatgtatatgataggatctcccaatcaaattgacgctaattgcagaaaagaaagaacaaaatataacagagaggaatttggatgaaaattggcagtgcctttgtattaaatttccaggacttcgagagcctggttctctcccaaatggttacaattactcaaaaatatcataattccccccaaaggctaacttcctaacttttattcaaacaaaacacgcacaaagcaaaaaccacctcaccaatacttacttgccacatcagcactaattctctccagcatgactcacagcccctttcctagaccttcgggagtacacaaaggtaataggtggcctatcaatataaaaggcttatcaatggcattacgaggaactcacagtgtccttcatgggtacgaaaaaagcaatcttctctacatcttgtgtcgccattctgatctagtggtatcccgacttgagatccagtttcgaaaagaccttagccctatgtagcgcatcaaggagctcatcaatcatgggaatggggaatttgcagccaatgtctccctatttagtgcacggtagtcaacacaaaattgccaacttccatccttcttcttgaccaacaataccgggcttgagaaaggacttgtgctaggcacacatatccctatttttaacatttctcgcaccatcctcttgatctcatcttacttaatttggtcatagcgataggggcgaaccgagattggaccaactccttccttcaaattgatttgatgctcctttgctcgttccggtggtaaccctggaggcatgttaaacacttccttgtattgatccaactacttaggcactggtttgggcactctctgctctagcttgttgctatgcgtgtgcatagccccaaaatgaacccaaaaccctaaccattctgctccactatatgaatcatagctttcaagattattggagacatacaaagactagggtcgccctgcaaagtcacccaaataccatctcactcaaatttcactagcatagtccgccaattcacttgcatataacccaaagtttccaactctttgacccccaaaatcacatcagctcccccaactcaagaggaagaaaatatgttaccatccaaagcgtgcctaattccaacgacaccagagcacacacttcttccaccttgaccctatctccaatacccaaaaggatcttgtaaacggtagtttgagtgatggggaggcctgcggcttcgaccactttgagggcaatgaaattatgggtaggggtgttcataaaaaccaataaactgaaactgaccatcaaaccgaccagaccgtaaccgatttttcagttccacgtcatcaccgaatttggcggtcggtttcggtttttttgacatggcgatcggtttcagtttttgaaataaaaaaatggttaaaccaaaaaaccgccaaaaccgccaaaaaccgtacggtcggttttatacggttataatttctaaacacgattttcgtaaaataaaaaccgtaaccgactggttggttataaaattgtaaaaaccgaccataaccgaccaattttcacccctaattatgggttgctccacggttgataaggaccgttacgagttgctaaccaatccttcccgctaatttcatagtatgagctgaagaaattccaactaaaaaatttaaagaaagagtggccaaagtctcttctaccttagcttgttctcccaatgtcggagatggtggtgtcgactccacagccggtagtggctcatcctcatcggcgaacaacaaaacttataaaaacctttgctcacactcatgactcatatgatatttttcatcacatttgaaacacacacccttagctctttcttcttggtatttagcctccgacatttgtcttacaaacgaagctctatctgtggtggttcccggcaaaacttgaggcgtggacaatattggggcggctgagatcgctcgactttgaaacaagctggtgccctcacaatatgatgttatcgggctcactatgggtttgttggacttcacaggttgacccgtagggaacaactaatgcccatctttgatccgttgggccgttttcacaatctaggctaagcccatgggctgaagtatgtggagagacccgttgatgttgtctttaaggccctcaacgaagttgccttccaaaatgtgttccgacacccttgtaactctcgacgccaacacctcccatctcaggcagtagtcccgaaaggtagtagtctaaatgacagaaaggaactcttccgacagtgacacgaccagagccgctcgaaacctgtgcagcaatctaattgttttagcatggcccaagatgtgattggcctcctttggttctcccattaaaaccaagtgaggacatctccttcaagcccaacaaaggtagtctataacatcagtggttcggtgaggcaggagatgagaaagtaacgctccgctagatagatccatccttcgggattgtttccagagaacagaggcgaactccattcaagggggggcgataatcatgccttggaaattgagcctagtgataggggttcggatgtggcagaggaagcagtggaaatgtcgcctgaggaggtggcaatggaggaaatcgaatttctagttcaatcagagttgaggaagatgacccatccttgttcaccgattgaggctggaactcgttgttggcagtggccatctcggtcgttgtcttccctgctacaaggaatttggtcagctgagccatcatcaactttggcaatcgctgtatttctactcgggtctctaaaacctcctaaccaaataagatctcaccttcgccatctctctttgaacttcggatcggagagcttccaatcgctcatcaactggctttgtgacggtgtctttccgaagtcccataatcttgctctgattccaatttgataggaatcacctgtcgaaattagctcaaatgcaggaaataaagaagaccagtgagaatttaaagaagaaatggcagaattgccttctattgatacctaggaattcgagagcctagttctctcacagtggttgcaagataataaaactcttcacacccaaaaagacttacccaaaacactttattcttactacccgagtgtacccaaagaaaaccacactctaacatagctctcttaacaaccttttgccagctcaccaattaatccactgtggtattgaccacattccctttcctatccctgcgagaatacacataagtaagaggtggcctatcaatctcttcaaccaagctttcacctgataggaaagttaagaaggacaagaataggtaaaggtaacagcaagccacaatcattatgtaatgtaggctccagatcttaaaagagagggcaaagtcatatcgagaaacataatgacagactgctaggaccaatgggaggtctctcggtcgaacttcaaaaaaacagaaaaaaaaataaa

SEQ ID NO: 220086 - DNA, 1532 bp, Cannabis indica
taccactcacagtcaaaattacctcgtaggaaacatcactatgaatactttcatagtaatcgacaccaagtctcattggaaggtcaacacctaacgacctttgagccatctcaactatctaccacttgtttattaagttctcaacatcaatttatatagatcgtctctttggcaaccaaagagtagcatgtgaatgttacaacacaacattaaagttcgccacgaagacctcctctgctgtgatagccgaggggatgaggaagacctcctctattgtgctagcatcaaggaaaagtagaagacttctttcactgtcgagatagccaaggggacaaagaaggtctcttccgttgtgtagaaaggacaatgaagacctttaaagttaataccaaggataaaatggagatagcacctacaatcactttaaagtgcacccgagacgggtaaaacatcaccctcatcttaggaatattaattcaagagttggtcacatcctcagttaatcaaagaatagccaacgaaacttgtgtatagacatataatgattaaactaatatacagagtaagtaaattaatgtactcatttaactcgtgtcattttaaaaaatatgactagaaatttcctccatgataattttcttacgattttaactcacctttagcaatggactctttgaactcttcaaagtttgttaggacgtagaagtgtatggttgagaaagtagaataggatcagttatttttggattctacttcgatcggtttttttttgggattggataaggtgcatacgattccatctcaaaactaattgacaatgaagggagtaatctattcatctctctaacaaatttcacactcatgtcttaattttatagtttaacacaatattacaagactaaattatcagtcggcatgggggagcttcgacattgttttttatgacttttttttttcaaaataaatcatttaataatacaagactacaaagttattctatcttttttgtctaatttttctatttgtcatgttaagcgatctgctaacaaggccgcccactatttggctcgcggctcttgttattggtctgatcgtagtttttcggagagtactcttcccagtactctcaaatctcttataattgcggatttggtttgctaataaattatccattctcattcaaaaaaaataaaaaatacagtcttaaactagcaaatagaaaactcactacaataagaaactcttgctaagaaatgagaaataagaaataaaaaataaataaaaaaagctcaaaacaaaaactactcttttctttgtagccgtccaatattagttttttaataagtaaaaaagtcgaaataaagagagaaaaaagaaaagtgaaaacactccctccggtttcagcaaaataaaaaagagtacaagacaggaaaacaaaataaaaatcccattcagtggggccttccgaacaagtacatgtttttatttttaaaatatcaataaacctcatgattcaataaaaccattatata

SEQ ID NO: 220087 - DNA, 3697 bp, Cannabis indica
atacattatatatataatcatgaaataaatcatgtgaaccatgctacataaaatgttatttctgatcttttttaataagtaaatatgattatattgaaatgtgttttatttagggcataaaacccaacacattgaggatacacatatcatttgaaaagatctctatgataagtttcattaaagtaatggacctatgattttttagattaaattattgctcagtggattgtctcaaggctttaatgatgttagtagctatttcactaagatgaaaattgtgaaaaagaactcaaggattttcgtcctctatctgtgtgcatttgtggagctatgaaagctttcctagatttttaagggtaggagtatgttttgtaatttctaattagtcttatgtaatcatacaatggtgttcgtgcttagatcttgatgtaagatcctttgccttctattgacaaggcattttccctaattgtgcaagaaaatacatcaatgatgccttcaacctttggctcgtgttgatatggaagtaggatctactactattgatccttttgttgctactgctcgatttaatcgtccccatggtgatcgctcaatttgtattcaatgtggcataactggatctcctcattgttataaaattattgtgcataagaaaaacaacgaatgacttacaatttagtatactagaccaacaaatacggaacacatcaagagagctacgaacataaataatgaattaatcagtaaaacagaaaataaaaatactaagtttaacaagtttgagccatgtgcaatactctacatctcggttggaacaacaacaatgatatctttattgatactagtgtttacaaggttacaaaaatcttcacaaactcttaaagattatgacaagaagtttctctctctagtttagactctctctcttacacaaccttactctttcataattttcactcaagtaataattattattctctatagattataaagatcgatggctatttatagattttcattgttgcctaaattagctctaagaacatagttgcagatttacactgccttaaatgatctagctcatcaccaacaataataatccacatcatcttgaagacgtgctttcagtacgaactatttgggagctaaattactcacaagccttttagactcgtacaattgctcctttcaaatgaacaatcaacactgatagtaggatatctagatgtacatctccggataaatgacaagctatccagagagatagttcatatgcagtacatgtttatatggaaacaactttcgaatcctacaaattcatctacacatgactttctggatccataccaagcttctcgtatctactctttggattcacagcttccctttcggatgaaaaatcttgtaaccataatcaacaaatctcaaccttggtttcaagttgaattcgcttgacaaatccttattataaatagtgttgttcccctcagctctccaagttttgctgactccaatcagcttcaagcaatgctcaaatttattactcaaaactacattggttatcatgtccgaaggattgtctttagttggaacattggcaatcttcacaacttctttctccataacttctcgtatgaaatgatgcttgatatcaatgttcttagtatgttcatggtgcacacaattcttggttaattgaattgcactatgattatcacaatgaacagtaataatcttctaattgagtttcaactcttccatcaacccagttaaccacagtgcttccttgattgcttcaatcaaagccatagtaaacatagtaaacacatatctgatcaaagactttcaggtatcaatacacactgcataatcagagtccacataaccattcatcacatccaagtcctcattctgattattcatgccatgtaccagtcccatcttaacagttctgttaaaaaaaatacagaatccatttcagggcttcccaatgctcctttccaggatttcccatgaatctactcaccatgctcagtgcatatgctatgtctagtctagtacaaaccataacatatactccgggatccaacatcactagcatagggaactctttacatctctaacttctcaattttatcttctggcatctgagtaatactcagtttgaagtgttgtgcaagcaaagtactcattgccttagagttactcatttcaaaggtatctagaacctttttgatatacctcaactgattcaagtatagtaatctcttttgcctttcccttcttatgtccatgcctaagattttactagcgggacccaaatcctttatttcagtctccgtctttagctggagtttcaagtgcttgatctcttgtacacttttgttggcgatcagaatatcatctatcatctacgtacagcaacagatacaatgtatctccatttctctctgagaaatatatacaaggatcaaacttatgcttttccttagaccaatcttagtcacataatcatcaaatctcctgttctactgtctcaaagattgtttcaaatcgtacatagactatcttaacaaacatacccagtgttcctttccagcctcaatccttccggttgttttattagaattctttcatatagatgtccatacaggaaggtcttcttgacatctaattgttccagtttgaggacttgacatgcaataagtaccaacaaagttctaattgatatatacttaataactagagaaaatacctcattataattgaatccttctgtttgagagaatccctttgcaaccaaccttgctttataccatgcctcttgtgcacttgaaatgccttctttccatctgtagacccattttcatctgataacttgactgtcttctgaaataggtattacatcccaattccacttcttcttcagagagtgcatctcttttgacatagctccattccatttctttcagtctttacttttcattgcttgtgcatacctggtaggatcttcatgcacaatctgattagcaatatgaaatgaaaatgtgattaaatcagtatgtccatatgtatctagagcctttacttctctctatgtctctagccagtttataacttttcagattatcacttctagaatcatcttctaaatcatcactttcgtgatctacaagtgttttagtctgtactctgattggtggctccacctcaagctcatttctcggagcttcaatttaattttagtcagtattggcttgacttccaccaggtttgtcaataaatcccataacagattcattaaaagtcacatccctactaattatacattttctcattctaggtttcaaacaccatagtctatatcctttgactccttctatataccccaagaaaatacactttaaggccctcacctcatgtttgtcttacttgatgtgtgtatagcaaacacatctgattaccttcaagtgttcataacttgttggcatccctgaccacacttcatctagagtcttgaaatccaatgacaaacatttatttatcaaataaactacagtggacacaacttccacctagaacactttgggcaatccaacacttaatagcatgcacctgactctttccataatggtttttgttgaacctcttcatgagtccattttgctgaagagtcttcctcatggtcttgtgc

SEQ ID NO: 220088 - DNA, 2452 bp, Cannabis indica
caccagatgcgggcatcctcacataacatgtagatagcacatctcgatcattactctcaacccacatgaaatcaaaaatggaggttatcatactaatccattgcgtcaccttaagtcgatcaacaccaccctcgaacactggcaaattctacttcctgaattgctcgtacaacgatcccagacaatgttccacatcctggggcactaccaaatgtgccagagggttaggagcagactgaacttgctactctcttaattctctaatttgttcaccttgctgctggacgatcccttacattacagcatacatttgttcccagtcttgtggtggtggaggattcacacccttaccaccaaccccgagcctaaaaagctcacaattaccactattagatcacctcgggtgcatgatctatacactggcgaccgtaactttccattgtttagtatctcctaaaccataatcaatgctaataagcatttccatgtttacacctacacatcagccattactatgcttttctagtaactagcacatttcaatcaagcatgtaattaggtaattaataaataatctaacaattaacacttattgaaccatgagtcgaacgagtagtcgcaactaatgtacatatcaaaccactctttaggatctttaaaccttggtcgcgctgataccatgttgtaacgtcctgtctcacagggacgccacgtgtgtgcttttacaaactaattcctagttaatctattagtttaggaaaagtgtggtttacttaaaaactttcaaattatactaaaacttaacttttattgaaaagattgctaagtatggggatcccctattcacaaaaacttttacactttagctcaaaaccagatttacacaatagggttacatttccataaaatagtcaaaaggatggatcctatccattggcagccgaaataccgcggttgatatgtacattgatgggagacctttgagtcatggccgaccacagtttcttcctccttacctacaccacgaagcaccgtgagtcacaatgacacagcaagaaaagctattaaatcaaggaaattataaacacaagtaatcacattatgatataatatgcgtactcataattcattacttattcagcatgcataaataatttaatatctataccaacacacatattacgcattataagtaaatcatagtaacttataatcaacaacttcatcactaaacatacattcattcaatacataatcacataattgtagtgctttataaagcacccttaccactcgctatccacgagctatgtatgtcactatcgttccccgataaagtgaacgataagtaagaaacctattcaacgagtaattactcataacggtaatgaccatatctttattcattcacaataacggtaatgaccgtgtctttccctcgatcataatcgagtcacaaacgataataatcgtttctcatcattaccttgatcacaatcgagtcataacaaatacatattattaatctcaatcttagtcgaggcactaacgattataatcacttcttatttaacaacttagcggtgcaaaaaacttttcttacctcaaaccaatatcgagggtgcgggctgacctgggtggaaccatgctcaacgatcccgggtcctatgtcacgataacgaaacttgataaacaacttatccaaacttcgaaaaaaaaccctaattacgtaaccgaacaaatctgaccccactgattcgaaataactcaaacatcactaaaataccctaatctaagctctgaagaacaccccgattaaaactagtttcgaagccaaaaactagggttttccctactggcaaactggttgaccggtttcactatacctgtgaaaccggttaacccgttttccctgctacagaaatgggaaactcaggttatttgcaccaaaatccaaccaaatctcctccaaacctattgaaactctccagaacagtttaatatcattaaaacagtttacacaaatcatcaatacacatcaattcatcaaattaaataaaacaccatagttaagtgaaattgagttcttaaactcaatttaatccaagtcaaacctaacagccctaaaattcacccaatccaagcttaaactaacatcaattcaaacctaagaacatatataaactccagcaataacacagacccgaaaccaaagaaacattccacaaacctaactcaaaacaaaagaataaatagaagaagaaacctacctcaaggcttgaacaacatctagggttagctaactcagtcaaaatttacttgatttgtgaagaaatttccccctggtttagctgagtccttaagcttcgaagagcagagagagaaaggtaagggaaatggaaattgttatcccaatttttgcactctaacgtggcatcacatgaatggtgac

SEQ ID NO: 220089 - DNA, 1951 bp, Cannabis indica
ggaaataggggccccgagcccctattggtgggtgacaagattgtggtcacagatgagaggcgggggagggtgacggagtcggcccctgctcggttggtagtctcgggtggagagacggagtctctaatgtctgatgctcgaattatcgtaaaggagatgagtaccaacgttgggatcggcccgcttgtgcgggatttttctttggccgaggaggcgggccttatcatgccccccaaatccccatgaaaatgttatcatggaactgccggggcttggggcaagctcgggcagtatcttcccttaggggattggttgtgagtgaagatccggatgttctgttcctgatggaaactaaggtaaacctgtctagaatgaattgggtttggcgtcatttgggatttgttaatgcgatcatagtggaagctacgggtgcggccggtggtctttgtttgtgttggaaacagggagtggaaattgagaatctcggtgctaacaaggatggaatcctggtgcgtttcgagaatactcttaattgcccggcttggattgggtggtttgtctatggcccgccttttagaggagatagggaagcgttttgggaggatattactctccaagtcttgtctttcaatgaaccctggatgttagtgggggatctaaatgttttgctcaatcggaatgagaaatttggggggtcccaagtgggtgaggctgattgccgattgttctctgagttcttgttgcattctggtggagtggatatagggtgtgtgggaaatttctttacgtggtcaaataagagacaacttccgaatcttgttaaagagaggcttgaccgtgtggtgggttctactgattggttgattcggttccccaaggccggagtcagagctttgccgatccgctcttcggatcatgcgcctttggtcttggatctgctctttgatcaagacagttttcagaaaccttttagattcctggatgcttggactagggacccgacttgtaaagaggttatccgggaggcttggaatttggttgtccacggggttaagagctttcaattagtggctcggattgcaaatactcggaggcgtcttgcgaagtggaatcgtgatcattttggcttttgtaaagacaaactgaaggtgcttgagaaggctctcttggaagttcaacaacgagttccctcgtccgaaaattctaagctggaagcggatatcctcctagagattgaggaagttaatgcacgccaaagtgaaatctggttccaaaaatctagagagctgtggaaccgggagggagatcgtaactctcgtttctttcacgcctccacggtggttagaaggaaacggaattggattggagcgatatcggatgatggggttcattggatcaacaatcggcctgatattggtaattacttcgtggaaaatttcaagactatttattcttctagtaatcccgtctatgaccaggaaattttcgatcttttgcctactaccattacggatgctttgaatgatgatctagttggtattccgtcgggtgaggaaattcgtaaagtggtttggtctatggctccgcttaaggctccggggccggatggaatgccggggcggttctatcgtgctcattggaatattgttgggcaggatgtgatagaaactgtggttgagttcttccgcactggtgaatttgttaaagccttgaaccggacgtttattgtccttattcccaagaaacaagatgcatgcaaatttgatgattaccggcccatctcactatgcaactttgcttataaggtgattgcgaagatcctggccaatcgtctccgtacggtgctgcctttgatcatttctccttatcaatcggcctttctcccgggtcgttggattgcggaaaacggtattatggctcatgagatccttgattcgtttaagaaaaagca

SEQ ID NO: 220090 - DNA, 1550 bp, Cannabis indica
ttatttgttttgtttgttgtttgtataagatgagtgagttattaaagctagatgttaaaaaagaattaaagagttccaattttggatatgaaagtggggtcactagtttatgaatgattaggggttttgtggaaagaagacaaatctgaatgactcagaagaattgattaaataataataagagcaaaagtaactgaagaaagaaagggcttgagttttttggcccattgtttttagttaaaacttaattctgtatagaaatttgtaccaaattattcaaaagctttaaatggtccatagattttcattaaccagctttggttttcttaacaaaaacaaaacaagatcatgctaagcttcacattcttttagctttgttttaacagaaatgccttaaggatattaatggtgcttagtacattgttattgggcactagtagtatccaacactttttataggtagcggcttacaattggttagcgatatttcttaaaatttatttgtttaagttatataggactcaatacttaattacaacaataacaatatgacactgataaaagtattacacaccaatattaccttttaacgtttcttattaataattattataagagacaactgactactcaataagacatcatatcatgttatgggggtgttggtaattctatagtatacattctaaaatggtagtttcgatagttttttagtctattttttttttcttcataatttttttggttgtagttacctagaacttttcataatttttttataaaagtattactagtttataatgctgaaaaataagatttaaaatattttgttgcacgtgtgactgttttttctataagcgtgataagtaactatttaaacttttatttcggcactgtagactacttagaatattttgaaattttacgtacacatggtcttaaaatattataatatatgcaatccagaaaaaaaaattgactaaaaaaattttagatttggaaattgatagaaaaaatatttttagatttttcataaactattattttactcaatgattgatcctttgttgggcatcatcatcacttaaaccctaacttaactagtccaagtgtttgtgttgtatttgttttgtggattatgttacatcataattattttgactaattgatagttttgtggctcaaaattctaaaatgaattttttttttttttagtttgaggtcaaaaagagatgacttgcctaactttgcaaaatattataatgtcattcatatgatttcttattatcttgtgttttttttttttttttattttaagggtaattgacggtgaaatttcttaatgttttaattactatatatttaattttttttatatattttttgaaaaaacttatttaagtttatttttctttttaaatttaaggtgtcagttacatattaagttgacgttaaatactaattagatgactactatgtaaatctgtgtataaatgacattaaaacttcgaatctaatacattggtcattcaattaatatttaacgataa

SEQ ID NO: 220091 - DNA, 1633 bp, Cannabis indica
aggagaagaagaaggcaaagcctggcaaggtcggggtggccgagtaggagagactgagcaagaaggggaaaaaggctcttccaagcgacccagcgccaattgagcgttcaatcaggattaaggagcctgatagacatgtccaatcatccgtcccaatgaaggggaaaggaaaggccatattgacagagcaagaggaagactctttggatgatgaagctccatccctacttgttcgggagaatgcttctgcccacgtgcagggtatttccacttgcagttattgacttcatcaatctttatattatttctgtctttaactttattgtcttgtttatgtgcagtcgtgtcctagaatgtacttcaggctttgtagaagagggttggttacagctcgggcaaaactcctcgaggcaaatgatccatgggcgaagatattctgtctaaggataatgggccaaccaaaacagtgattgacctttgtaaggacatggtgcctgttgtggaccctcaagtccagaaggtgtcaaagtctaagagttccaagggggggggggctcggatgggtctggaccgaccaagaccacctcaacaccatggtgctaagcacagaagccaaaaaggacaaggacatgctccactattatttggatcaatcatttcctaaagtgagtgaccaactttctggggcagacaatgagttgtacctagaattggtgaggggaggagtccttaaggaggctactcgggtaagtatttcctcttttactttaattatatttttactagttttggttttaacattttctcccatgcatgtcaatcttaaggtggcttacgcctattcctgagctaagtccacagcagccaagaaccttgctactaccaacactttgcagagggaggtagatgtaggtaaaaaggttgttcaggacgtgtcgaacaagctcggagaggtgaaaaagaagctccttgctgctaacaaatgggttgaagagctgaccaaggagattcaggtgatgccatcaactgcccagctggagggagacaatgacatctggtctagggaggtcaatgaactaaaagatgagagggagagtctcgacactcttctctcaaagttggaaggggacgtccaagctatgcagaccagggaggaagagctcgccaaggaggtggaaaacttggaaacggctgcccttaaggtcttctacgaatttaggaaggccaaccccgcaggcaactttaattacctcggtgatttcaaagaggtatatcttgattactttgcgggtcagatggccaaagaaaatcctgtggcacccacttctacagttccaaccgaccagagcactaaaatccttacagcccagaatattgagccttcaacccccacaaacctaactaatccgtacaaggagcctgggacccctgccgtgtgaaacattttttctcttttatattattattttctttatttgttcggcccatgggcgtttattagagacaaaaatgaacagccaagcggttttttaacttgggttatatttttcattttaagacaactagctaactgggtagcctttaatcccgcgtttaccgtgctttgttatctttttcaatgaatacttccctt

SEQ ID NO: 220092 - DNA, 2491 bp, Cannabis indica
aaaatggtagagctgaaagaaaacataggcactgaaatgggcctcactctcttagctcaagctcaaatgcctttgaagtattagtgggaagcttttcaaacttctgtgtacttaatcaacaggtttccaacacccattcttgaaaacaaatcaccctttgaaagactatacctcaaaaaacctgattatgcctttcttaaagtgtttggtgtggcttgttttccatgtataagaccataccaaacacacaagttccaattccattccttgaagtgtgttaatttaggttatagcgagtctcacaagggttatagatgccttactcccactggaaaaatctatatatctaggaatgtcatttttaatgagctcgagtttccctttaaacttggttttctgaataattattaacaggtaaaactagtcatcatccaaagctcttcttggtctatcctaccctctttcactcttcctacagggactccttcatccacaacatcctcatccttgagcacacctgaagaagcaccttcctctccagcacatagtcaggtaaattctcacaactctactggttttgatctgtcacctgctactgtttctagttcctcggtttgagaggggaatgattattgacactaatgagtcaaattctggacaatctcattctggagaaactgatgttgcacctgatattcccacaccagcagctgctggacatgacatgataactcaagcaaaggcaggaatttttaaacctcgagttttcatggggcagacagcatggaaaccagcaacaacacttccttgtgatttcaaagaagctcttgcacatcctggctggaacaaggctatgcagtgtgaaaataatgctctcaaagcaaatcacacttgggttcttgtgcctcctaaagctggacagaatttaattggaaacaaatgggtgtttcgtgaaaagttgaattcagatggatctcttcagaggctcaaggctcgacttgttgctaaaggctttcatcaaaggccaggcattgattttggagagacctttagtccagtaatcaagccctctacaataagaataattcttactattgctgtgactcgaggattggaaatcaaacagctggatattaacaatgcattcctaaatggaacacttgaggaggaagtttatatgttgcaacctcaaggttttgaggaaccaaggaaagaggactatgtgtgcaaattaaataagtcattatatggcttaaaacaagctccaagagcttggttcgacaagctgaaatcaaccttggttagttggaagttcaaaaacacaaagttagattcatcactcttcttctacaagcatggaagtgatgttatcattgcattgatatatgtagatgatattatagtcacgggaaacaacagcaacaaattaaagagtttcattgatgaattaaacaagaaatttacacttaaagatcttggccctttacactacttccttggaatagaagtctacagagatgaaacagggctttacttaactcaaactaagtacattgaagacctacttcgaagaactaaattcaccaacataaagccttgtccaactccggccacggctgggaaactaatgtcactaacagacggggagttgctgcctaatcctactgagtacagaagtataatagggggcccgcagtacttatcacacaccagactagatatttcgtatggtgtaaacaaactcagtcagttcttgaaggctcccactactgtccattggagtggtgttaaacgggttttgagatacttgaaacgaacattacacaaaggcctccatatcagtcgagatgagccacttcacatcactggatattcggatgccgattgggcttgctgtccagacgatagaagatctatagcaggctattgtgtctactttgggaacaccttggtgtcttggtcatccaaaaagcaacttgtcgttgtaaggtcaagcacagaatctgaataccgtgctttagctcatgttgcagcaaagatttcttggattgaatcactgctcaaagaattgaattttccaacacccacggctatcacctgatgtaacaatatgggagcaaatgccttggcttccaaccctgttttccatgctagaactaagcacattgaagttgacattcacttcattcgtgacaaagtgctaaacaagcaactcgacataagatacataccctcatcagaccaagttgccgactgtctaacaaagggatttttaagctcaaggtttcatttcttgattgacaaacttggagtgatgaactcacccctgcatttgagaggggatgtgaagaaatgagcctcatttcccttattttccatgtgctggtttgtttggccttttgccttgataggtggcttttttctattcagcagccaacattgaagatcccaaggaagattttctctaccgttgcaatgatttgttaatcat

SEQ ID NO: 220093 - DNA, 9739 bp, Cannabis indica
gtcgaaaatgcattcgctgaagtcttgactcaaatctaccacattgtgagcaagaaggcggtcgagggaggagaaaatggaacagacgccgctgttcccgggaaaggagagaaaatcaatataaaagatgatgtttctgctttgaagagagttgggtgttgttcaagctaggcttttgtggagagaaagagaacaaacaacaacaacaacaactcttcaaagactttgaatttaatcagttcttcttagttactactttattattgtgttcagtacaatatttcagagaggagaatattatttagttttaagagatgaaaaaccataaaggcaaagtttctagagatattgatccattatacaggattgtatcattaagaagaaaaagcataatatttacattaaatcccatctgtgatttttattgattttgttttttttgccatgtttgtaattttgagaattgtctttcttctatcatcatattcatttacactatgtttggtaagagtgagaagtggagggatgggagaggagaggtgggcggagataatcaatccctttgttcggccaaagggattgaaggaaagaaatgagaggagagaggatagtaaatccactcaaattcccacttttggaatcccttcaataatgaaaggattgaaattctccctcttcaattgttataaattacataaataccttcaacaaatattattaaaaaataattataaaaataaaatagtaattatctatcttttaattactctattcttcttactcagtattatattctccaaaccacttgaggctagctcaagtggccataggaaggtgcgtgcgtattggaagtcctgagttcgagtcacaggttattcattgtaatatataaacgcttaattcaaaaaaaaaatatattatattctccattctttatcaactctccatccatcttactctccctcctaccaaacatagccttagttttataataacttgtcacaactcacaagctggtattctaattcacatcaaaaatttacttctataatgcaaataaaagaacaataataattgttataaattaagtgcgtgttttagaaaatctgaaattaaattttaagtgtagtttgaaataattacgcagttttttgtatttacgtaattatatagtttaaggtaattgagaattcttcaattacactttttaattctcattataagaattgtgtgtaattattaaaacctataattttaaatatttattatttttttttatatatttactaactattttaccgaacaataaaaattgagatataattaccaatattaattacacccttagtaataacaacatatttaaaaagtcaagagaatttgctaataaaaatgataaaataatcaaataatttcaaggataatcatggaataaaccttaaaaaatacaaaattgtagattacaaaagcctatgatgtttacattttcttcattttcttctagtgaatgaaatttttagctctagcttcattatagccataagtggtgtgttaagatgaaatttaactattgggagatttccaatcccgctcgaattcaacaacttggaatcgctcgtggcagccggccgccctccttgtggcaacaattagtcccgaaagtggtcacaacttcgctgttacaaagagccaacaacgttggtaaaccattcaatcgattattcattaatgattaggcttgaaaggccttagattcctagctagcaactgcagccacaaccacatttcatagtaaaaccggtatagaatctacaattccagttatatctcaaatttgcaataaactcaaagccagaaactacaaataccaaagcatgattatctagattagtagtagatttattccttgtacatcaaataacatgttgaatatgattactagttttcttcagcaaagttaagaagctgaaaatcagcccgtgcagctgaagcatttcgattgttttcattgtccaatcctctgcatgatcgaaaaaaccacattaacaaatgctttgaggattagggttgttaagctctagaaataaagtttgaagtttgacacatcaaacaagtttcaaacaagtgtgaaaagacggctatgaactcactaaccctcttgttcattctttttcgtgcttctaaatggctcgccggatgttaatgttgttctcttcccttggctattggagggttctcattttgcttctcgggaacctttactgatgaattaaccggtgatggatttgtttcacaaagtcccttctctttatgtccttgttgagattgatgatcttctgttttatccaacgattgttcttctacgttttctacttgttgtaccatctcatcattgtttgtttctttaggcatttcggctgcagcatcgccattgttactccttcgattatctggcatgctgtcatctacagaattcgattgaatatctcttacaccaattttaatcggttggtcaaaaaacaacaccatttcgcctccattttcttttgcagtgttgttgtcatcattattaccattgttgcctccttcttcttcttctactacttcatgaactcctttatccttattcgatatcggggttttcctgcttttgtgatgaatttcaaacctactttcaccactttttaactcagattcgatatcatacaaggcattaacaacattcgtgagcttttttcccatctcaacccgatcaacatcaaggctagtaagtttgtaatttatctcaccaatttcttccttgagggaaatcataacttctctcatttcatctctgaaagacgaaaattcctgctttatgtcctagataaacaaagcagcaagtcataatctgatcatcacttttcttatcaattattcagtaattcagtcactcaaaatacttacaaattgatcagccgaacttcctcgttgagggcgatactctatacggttctcatactcagaacgaggaactacagctttaacatgagaagctgttgttaggtaacctttatctggtgttcttatcgtaactgctttaccgattttcatgtaatcagcctttttttcaagctttgtgggattcaaaacaacaacttctacctgaaaacaaatcatttttatgaaagaataatgttagatattgaaattttgtgcctagtaaagatggtttaacaagagatacagggctatggcaaggcggaccttatctcgagcaaatactgatttctgtatcctcttccaatttggctgataagtgtctccccagtttagaatccgaggcatgttggaaccggttttctcagcatataatttcccgagttgtggtatactttcatatgcccatacttgaaggacataaggaaatccagctaaatgataagtttcacaatggtgatcaggattcctcctttgcctctccctaaacttggaaactctattttccaaagccctttgaagaaacccaagtgtataagagtagcaaactctaccccaagggtagttgttaaagatttcaggatgatcgagtagcctgacatgttcaagatctactaatttctgcttttccttggccaacaacatattctccaatagatgcaattgagctagcttcacacaatcctcatcattacttccatcgtaactatcaaacactctatccacaagttccctactaacttttttgctcggaaaatacttttcaagaaacccgttcccagaggtttcgcctctatttacctttggacattcagaacaattcaaaccagttatcaaagcaaactcttttatagaaaatctaagttgcgctccacagatatcaaaccacatttcttctacgttcggttgttctacttccctcaagagaatgtgatgaacgatttgaccagagaattggaactcactcacatccaagaagtgcccgaaacaggtctttctgaacatctccaattgtttacttgttaacttattctttatcttttgaatcacgtcgtaacttgaatacaaaatgatcttggacttaatccaatcctcttcattaatctttaaatcccccatctgcaatttcaaacaatctacattaaaacaccaacaggtacaacaacactaactttgatgtttctcactttggctttagtactgtgaagcttcctacattacgctatgttttagccgaaagaaaattcatgtcacacttgctacttagcaatcaaaatccaattctcccctagtttgacagtcatatgaaaaggatgattaaaactggaaaaacaatctttctaactaatcctagagttaggagagaaacaagaatgtttgtgaatggttctcaatcaactcgggtagttttatacatggacaacgaattcaccattgctaaccaaatagtggagaagaaactgtgatacactgtctcaaaacacaaccattcacaagaaagcaaactacttgtaatcgaaattaatcagtgatacatcctagacagaagatagattcactaaaatctttaggaaaattttcaggttacaataaattctcaattcattgaatggaatggaaatttttttcatttcattcatttgtttggttacacattaaagtattgaaatgtcatgctaatagaataacctttccatcactagtccattttgaaatggaaagaaagataatttaaatgcatgatgagaaaaaatttaataattttcttatcaattttttaggagttttttcatttttacacttcaaaacagttttttttttgtaattttacaagaaattcacataacaaccaacggaacaacctaaattgcaaccaaaatccacatagcaacccacataaaaactatcgaagcaactaccggagcaacccaaaccgaaaaaaagtcaaaactagtatatggggtaatcccctatttgcattttaaattttattccatcccattcctattcctattctcattcccattcttattcttatattttcattccttcaaaccaaactacctaagttccctaagcaactacctaacaattgttataacactctctcatccccaaatattgtagtcttaagtttttcttttcttcctttctatacaataacatgttcttttagtacaagattgcaagttacacattaccatcatgcatttgatggatccatatccctcaaatgatcttagctacacattttcagcaaataataataataaaagagaaccatgtaagacattaaaactacaaaaaagatataatttttactaaatatatacatagaaagctaaattaacaaaaccccacaacaaaaacacaatcaagtgctaatcttttccccccattttccaaaattaggtttaaattgatcttgatcaaacacttccaataaattcacgtaactctaattccccaaaatgcatcaaaaattcacgacgccaaagatgaaaatgatcacaaaatgcataaaattaagctcaaaataacccatgtttaatcaagaaaaatcgttgaacatgaaatgggatcgaaaaaaagtttactcactttgggtgtgtctggttcttcactacttgtgtagtcaaagacatcaggcctttcctcagccattatcaatggaagagacttcttcttggccgtcctcgggaggatttcccggacgttttctcttcatttctttgatctccgtttgttactttttggtggtcagttgtcagtggctggagattcttggctttggttgggttaatttgggttagtattgatgagaaaataaaatatactaatattttgtttagatgtaaatatttaaatttaattttacgtcatataaatatttaaatttaatttttgatgataataattaataattaatgttaaaagatactataattaagtattaagtaacatataatttaagaaaatagtttttaaagaatattactaactaatcgtaagacgttgcctaacatcactatgagttgacgccctataactaattatcggttctctataatttttattaaagtaaaatatgtgaaatacgatattaaagtatatcaataacaatattatactaatcactatagatgtcttttaatatttttctatttttaaaaatgatgatattttataatgtatatatttaatatatataattttttttggacaaaataatgatatttaggtaaaatattgatatgaataattttttattgttatttatatagtatgaaattattaaaagtaaaaaatggtgttcatcaaactgttcaaaccgtccgcaccgcaaaaaaaatacagtttgatgagaaaataaatatactaatattttttagtatttgtgctgtaaatacttaagtttcattttcggtaactgataaaatatataaatttaattaaaatggtaatatttcttaagttatatttttgggagaagaaatgttaaaagccaccactggtgcttgtcagttgtcactgttcttagtgtcatactactaagtatcaagaaatgtaatatcgctaataaatcgtaaggcgttgcctaacatcattataaggtgatgtcctatcggttctctataaattttattaaagtaaaatatgtgatatccgatctcaaaccacttaaactgccttcattgtaaaaaaatacggtttgaagttttttgcggtacgattgcagtttgaatttttcttaaaaaattcgaagactcctaggtcaattattaataaagtaaagttaaggggtcaaaatgtaatatatataaataaatactaaaaattcagactagcccaaagactgaaaaacctctctcccgctaaattcaacaaaaactctttctctctctaaaacccttttcactttctctctctacagacttctctcatcttcttcgttatccctggttttccattaacagcgatgagagaagaagagatcgaaaagcttcgtggagtagtcagggactgtgtcaccaagcatctctactcttccgccattttcttctcagacaaggtcgctgccttcaccaatgacccagccgatatttacatgcaagctcaagctctcttccttggccgtcgttaccgtcgcgcttatcatctccttaatgcctctcagatcgttctccgtgaccttcgctttcgttatctagcagctaaatgtctcgtgagtttttcattttctggttttttttttatttaaatttattccaatgaaactttgtagaaacaattagtttaagaatttgaaatcgatttctgttccaaccgtatgctactttttgtttttgataaaaatacgaaatagcattgtagtagaagcttgtttttgtttttacattttctgttttttcaaaggagaattttttgaattcgttcgaatggagttgaaaaagggagagagtgacattattctgatacttttttcttgggaaaaagtttaattaaagctttgttaataactttgttgaagcagtgagtttagattttctgctttttgaatggagaatttttcgaattcattcgaatggaggtgaaaaagggaaaaaactttattgtggtttgagaaaaatgtttaataaaagctttgttaagaactttgttgaagcaattggtttagcctctgagcataagatgctgcaaatatacattaaatttaagaaattgaaatggatttcagttgcaaccgtatgctacttgtttttgataaaaatactaattagcattgtagtagaagcttgttttcgatatctatgggaatttttcgaattagttcgaagagaggtgaaaaagggagagagagagactttattctgatatttttgcttgggaagaaggttaattaaagctttgttaataactttgtagaagcaacgagtttaggttttctgtttttcgatggataatttttcaaatttgtttgaatggaggtgaaaaagggaaaagacttttgtctgatttgttgattgcaaaagagtttaatataaaatctttgtttagaatttggtagaagcaatgagtttagcctcttatgctactttttgttttggaaagaatacaagtgaaagaaatagcattgttgtaatagtgatgagttttattggttactatgtatgtataactgaacataagcttactttggtgattttgtatgatatgcttttttgcattaggaggaattgagagaatgggatcaatgtttactaatgcttggagaagctaaagtggatgaacatgggaatgtctatgatacaaaagcttcaaatgcattgtacttggataaatacggggaagatcgcgaaattgatgtaactatttcttcactattattttcttgtgctgtttgtaatttatgttttaacatttattagtcatctaaaatagaaaatagtatatagttgagtgcttaatgaattaaatgtattatatgcacttaaatcagttttcttatcttgctacagatatcttctgcaatatgctttttgagaggcagggcatatgaagctttggaaaatcgtgtccaagctcgacagtggttagtttttttttttttcctagcttgatttcatattgcttttatgtgtgttagatttatgttaatcagatttatattgcttttatctgtgttgtgaaggtataaagctgctatcaaggccgatcctttatgttatgaggtattgcttggatttacacttgtagttttgattggttctcttaaatcttttgttaaacaaagttagtttcctttgcctatttgattagtgaaaatctctaagtgaaagttcatactctgttggcctattaaaaataaccaaagtaaaatccaaatttttattttaattttttttattaagattccctcccccttccatttcttgttgttttagtattttcttatcaactcaatctaagctagaatcaattctttttataggtaatatagtttttgattttatagttggtcttgattgtttgtcaggctctggaatgtcttattgaaaaccacatgctttctaacgaggaaggtatgctgttgagtgttctttttccctctaatcattgtagtagcaagtggggttcaatgccttttctgtttagttggatgtgattcatcatattgtgcaagaggaaatggtgatatttaacaagggaggttattgtataatatataaatttggtattttacttctgagtttcagaaacaagtcttgtttcctcattgcacttcggtcctgaagatggatggctgtcatcattctattcctgtttaataaaaaaggtaaaatagaagaataactccaacacatatggcatatgtcaatatcaagaacctctaataagttttattttttttgaacttattgtgctgccaaattgcacagttttttttttttttcatttgttatcattcatggttttcatttccttattgtgtttattagtatgacaaagaatatgtcgttgaagccaaattcaaagaactcgaaaaagaaagttgtagtagtaattcttctgattcctctttcaagtgctctctcaaaaacaacactgatcttttggcctgcaaagctgaatactaccaccagtgtggtgaatatcaaaaatgctttgaactaacctccaagtaagtaggtaactattttggagctaaaatctcactttgattttagctccttgaaaatacatgaatacattttttttc

SEQ ID NO: 220094 - DNA, 2037 bp, Cannabis indica
aaagtctgtgaaacttggtgaatagcaagtgaccaagagacttgcctacatggttgcttgaggggtgcccataccatacaacccctcgaactggcacaatgaacttatgcaaagaaattttaaggcttaaaatatgctactaaacctacctctaagtcgtacaggcatacttcggcttgacaaagtaaatccagacccttacctatcaaagccataagaagacagccaggatgatcgtatgtccgtcatagatggcttgaaggttatataatagtagtgttcgaaaatagagggcctataggccaaactaagaacatgaaagccttgaggccggatatgagatcgatttgcatgaatgaggccaaggccctgctagaaccatatagctagaaaagacttggacaaagctcctattggggccacgtactgggctacgactagggtagtgttcgttacaggaaccaagccatgttgagtcttaacttgaacattcgactataatagactcaccattaagtttcatacagaatatccaaggaaaccacacatgaaactgaggttgtatatgcctacaaagcaagattcttgtcaaagttaagagaggatagaaaacttgccaactacttggaaccaaggcccacgacggccaaggttcacaagccttgcagctagggtcccatgactcaaacaataacttgccagggtcacaaaacccaggcatgaacaagtaagctttatagggtaaatccctaaagctacccaaatcccatgatcaggtctcaagcatgaccccctcggctggccaaggtatgttttgaatcccgatgtgtgttttcttttcaaactcgattatgtgccttgtattctttatgactcaacgagtcaagaatcacagtgaaggaaaaaattgaatcttttctattaaaaagtcacacattacacattccaaaaccatcatgaggatcaatataccaaagagattacaaactaacatgaatcaaaaagtttccaaaagcttaaaaagcttgccacttgttaatggtaggtatgaagaagatatatctaagaaaagaagatgagatgtatataaagagagaagataaaatatccaaaagcatgctaggaaaaaagccaacactttgctagataaggctactcaacagagactactacagacaagacgatggctagaaaatccctatctgaccagacgttcgaacagggacttgggggcaaattttatcccaaattttgtccacctgacgtggcatgtccatgtaagccaaagatagattacaggtggagttcagccccgccaatagcagaataaagcctccatgcaagatatagcaaaaccatcaagcagcgaccaaagagagtgaagcgagctcacaaagagctataccaacctccttggccagccaagaaaagcctataagccagccaaggtaagcctatacgcctgtcaggatgtgtgcacaagctggtcggccaagaactgactttcgaaccctaaggagactccgttcgaccaagggaacctgacctcttcaagtaaatagtgtacaaagctatcctctacttgcaaaaggctggcctccatactcaaaggttggccacctcttggtggagctatagtgacctaccaagtcttgcaagccttgtcctgcgaggtcctagcaagactatggtaggccaagattgacctggcaggatcatggctggccagacttccctgtaggcctatggatggccaagattgacctgccaagactcgatgtacaactctacacgtggacacaagatatgggatgcgaattgggccttaaaagcccaacatactggctgaagaatatctaaaattaagggcatttttgtcttttgtgaatatctaactaacaattttatttttaagggatttgaattgtaaacctagggtttaaggcttcctatataaaagccttaacctctggctgaaaacctaagttgcctttaagtgacttagccaccaaataactctaagtctctctctctctc

SEQ ID NO: 220095 - DNA, 4607 bp, Cannabis indica
agcagttttgcttcacccggaagccatggagaattcagtacattaatattttcaccatggcccacacgccaacggatcctttcttttactaacgactgagcctcccaaatgcttcttcaaacaaagattgagttagcaccaagttgggcagtaaggtacatgtcattaaggaagtaccttgctttgaattcttacagccaaagaggatggcctttgtgagaaggtgccaaccttgcttgcccagaagagcaagattaaaatctcgcaagcaacggaagcccataccaccaacaccttaataccgacacaatcgatcccaagaaacccaattgatgcccttacctctaaaactagaagacttccaaaagaaattggccatttgttattccatataattattgatctctagaggaagcagaaaaatactcattgcatagcttggtaaagaatgattaattgacttaatcaagacctccttgcctactctagacaataattttccttcccacccttgcatccttttacgaattctctccttaagataaccaaaaattattgtcttattacgtcccaaagttactaggaaggtcgagataaaggctattatcatcagctatcctcatttgaagttgctggcataaactgttacacaaactgccttcagtattaagactgaaaaaatagatgatttcccataattaaccttctgacccgaagccctttcaaacttatgcaaaagttcttggagtttgaaagcttcacctgtcattgctttgcaatacagataactatcattggtaaaaaacatatgagataatttaggtgccccgtttgcaactctaaatctatgaattcaaccttgcctcccatacttatgaatcgacgcagaaagaccctccacacacaagatcaaaaggtaaggtgatagtggatcaccttgtcgaatacctctagtggggattatagggcccatctctcgaccaccatgaataatcttatatcttgcagaagtaacacactgtaacaacaaagaaacccaactaccatggaaaccctttttagaaggatagcctttaaaaagtcccactcgatacggttgtaagccttactcatatcaagcttaaatgccatgtagccctctttacctttctttttacgcttgagatactggagcacctaaaatgagaccatgacattgtaaaaaaattaaccttcttgggatgaattctctttggaagaccgagacaaccgagtccattattgttgtcatccaatttttcataacctttgtgatgattttgtacgttacattacagagagaaataggacgaaggtccgccattctctcaggattccttctcttcggaataagcacaacgtttgcctcaccacacccatcttcaaaaacacccgtattgaagaaaccatggacaaactccatcatatctttcccaataattgaccagcatttttgataaaaagtgggagtcattccatcgggtcccgaactcttatcagggtgcatctgaaaaatagctcgcttaacttcctcttcagtaaccgcttgtgagagctctaaattaatctcatctgagatgctatgttgaatataattaataacttcagtgaaatcaactcccaaagcagtgaataggtcttgaaaataatctaccataacatttgagagtccatgatcccaatcaacccaatcatcctcgtcgtttctcaacttttggattgaattattacttttccttgaacttgttactatatgaaaatacttactatttcgatcctcttccttttgccaaaattgttttgccctttgcttctaaaaaatctcacgttgatcaagaatttcaaaaagtcttcttttaatctccccatatctttcaaccaaaattgcatcccttttatctttcaaaaaatgccactctctttgacattgctggatcctttttttaaatttaccagttatgtcttctccccaaatcgagagcttctcaacacaagaagttaatttatccccgaaggtattcaattcgtgactattccaaccatctttgataatctaaaaacacattggctccttaagccaagcatttttgaatttaaactgacgagaaggaataaaatcttgttgagtcaaaggttgaagaaataaagggcagtgatctgatgtagaagtctccaaattagtaagttttgcattaggaaaaagggaagaccaggaactactttactagagatctgtctaaaaaaatttcaacccaagaatcactgccacgactcttctcccacgtaaacgagtagcctgccatatccaagtcatagaggtcacagtctgaaatgacttttggaaagccttcaatgagatgcagaggataggggttcccccctcttctcttcataggagacaatgttgttgaagtcgcctataatgcaccaaggcagtggggagaatttagccaaccaccgaggagattccacaagttttggtgaagactccgattaggtttcccgtaaaaacctgtgaggtgccaacggggataagctgaactcagaatctcaacatctatgtgattgtttgaaaagcccattaaagttacctcctccccaactttccataaaatgcaagaccaccacttataccttgggcctccacacaaaaaactccctcaaagcccaattgtcagcccacccaattaactttgtcttttaagcatttagtttcacacaaaaaataacactgggtctcttttgagtaacaagctcttttaagaattggacggtccatgggttcccaagcccacgataattctagctcaaaatattcataacgtatgacgagtctgtaaaacagagcccgccccaagaacattttttggaatgtcatctccattgtggcttaaatcattttcaactttctccttataattagcatcactctccctatttttggtaaggcccaaaactccttcctcaccactatccaggcccatgtcattatcaatcaattgatccactccctcttccatatcacatacatcttcaaagcccatattcctaccattaccatgggcctaattaaattatccgtgtacgcattctcttagtctccaaagtaatatgacttttatttgaatataattcatttggagccaaattaaatccatcttttgttggctttccttttaaatcttccatattagcctctgattgtgtctttttaattgcctccaaatttatatctcccaatccctaattggtggccacattaatagccatattttggtcaattcctggatttcgtggtactaccaagttggtcatctttgagctacctaccaccatctgagcctctgtcgcgtcttccactgaagaacccttgacaaccacccttaatcttagccatttcgaaccattcgaatgatttttatgtctcagatccgctttcataccaagaccatatggtttcacgataagatgttttgagatttcaaagttctttccacaaaaacgctcagaatgacctagaatatcacaaataaagcagaaggtaggtaggtcatcatatttgaactgagtagtgcaacaaagtccaccttctttttctagcttcgtcttccttttcaagggcaaatccacctagagataatcatgccagactcctgtgaaattgttgggatcagattcagcaaattcaccaatgtaatttcctatgtctcgaaccacccttgccaacataaaacccgtggtcataccatgcaattgaacccaaaagtacaacctctgtaacaccaccatacacgggttctctctttctttaagtcgttcaaatattagagggactcgatcgaacgtccctctaatatacaacgtcaagttcatgataaaactaaaaaagatatctattaggattaagttccttaacgtacaagtctcttcctggtctccacagtgatgccatcttatgccgcattgcatcaaaatcgagtgagcgattcgtgagaaaatgcccaaccaagcaccaacagtcatcaatctccgataggtcattggacccatgaccatatcttatgactccatcatcatcgtcttctaacgttatgttcatatactggttttctaaactaaattcatttgtccatgttgtagccatggtagcgataacagatcaaaaaacaccaaacaagacttataacactggtaaaaccaaagagattacattaccactttgtcaaaagacaagacaataaatggtacaaattctaaaaaaaaaaaaaactaatttaaatattttaaaaacttaaaaaatattaaaacaatttaatttttcccgcaatttacactaaataattttaaaaagattttttttttagaaacatggattttatgtcacaatttacccttttatatgatttaatgaaggttttttttttgccgatatagtctaagaacaagcgaaagtagggtttgaggaggattatctctatgatcgatcgtctttatattttttgagaacaaagaaaacttaaattttcattgagaaactgatcaacgttttagtcaagttatcttgatcgtcaatggcacctcatcctttc

SEQ ID NO: 220096 - DNA, 2210 bp, Cannabis indica
aacgtataggcaccgttaaaggatgagattctaataaacgtgttgtggtgtgattgcctagtttaatagtcttgtatataaaataataggatattatgtatttggattgggaaggttcctttggcccactgaataaatatagttaattagttatgtacatctttgtttcttagtcaaattatgtgaatggactctccaatgccattaaagagcctagtaagcaaataggcaggccgccgccggcggaggctaggaacttcatattgttaaagattatatattatgtaggccataattacacaagaacagattgagagatttgtatgaaaaatatttagccgcaggactggattaaattagacagctaatttgtccaatctagtgtttgggcatagcagaagtctggataactaatccagctgatcttatctgtgcgattatttattttatcctgctataatcccatgaagataagttttttttatcggttttttaattttgattttattaatatattttaaattttataagaatttaaaagaaagaattatcacatattaatttataattttttttatcaaaaatttattcattaaaattagtgaaaatgtataattttaaattattatacataagttctcaaaatttaaaatattgttaattaaacaacagttacttaaattgattttaagagaaataatatcacaataaaattatatattgtttttaaatgataaaaaattatcaaaatattttcaaaaattaatatttaaattaaattagtaattaaattagtatttaacataaataattttatattattcaattatttttattttattattttaattatttattgaataaaaaaaatatgctaaactattttattatatatttatgatatatatttgattatataggatatattattttatttaattttataatttaattattatttttttggtgaatcatttattttttatttgtttattattatatattttacttttaatttaatattatatatttttattttaatttaagtttttaatctaaaaggaaataaataaaatagtccagtctatttttaaatcaaacacaagattatcttcagcataatccaatctcgtccagtttagtccaatccagtccaatcctacgtaccaaacaggccctaatgcactttagagaagtatagaacatcttactattttacactataaaatttatgttaaatttagctaaaaagtagttaatgttatatttgatctaaagtaaaataaacttttttttttacggtaaaaaattaacaaaacattacatttttattttaaatatatgtaaaccatattaaatttataaataaaaatataaaaagtttcttttgcttaacaaaagtataaaaacttattaattgcaataatgaatgataatagagtaaattaaaagatgatatttattgtggtttaaaatttgaccaattttatattttgtctaaaatttagttagtaagtgtcaaatttagaccatattatactactattaaagttaaattttataacatcggcaaatatacattatatttatagcactttaaatactttatcgtaccttttaaaaaaaaaatactttatcggtgaacaatatgtttatttaaattgtaattcttaatattagataatttataatatcaacttgtcattgaattgatggaatagaatttaatacagatttttgttttgttttgtttttttatttatttatttattttgatagggagttcaatatagattttaattagtaatcaattttggtttagagtccatcacatgagatgtggatctaccttttacattcaatattcgatcacgtgatacaatagattaaattagttcacttgatatagtgtaaaaatatataaatacggatttacagagcaaataaagtcttacgagagaacagtgataattacaactttctattataattatttgattaatttttaaattcaaaattatatactatgatattttttcataacagtatttgttatatttatagtactatttgagtaaatttttgaattttttttgaataatttacaattaaaaatagaattcttgatattctagatagtcatacctgttcaaaaaacttcaaacgtattttcgtcattaattatttgaaattttttaaaactttacaag

SEQ ID NO: 220097 - DNA, 2192 bp, Cannabis indica
attgattctggttgtcttctcaggtgaagtcaccgaaattattagtggttctttttctggttagattttcatttcggttgcgttgggttgtcgcgtggttgtccgaaggttgcccaagaagcatggttcctgggttgaaggtgtgggtaagaggtatttgtgtaatcttttttatttgtgttgaatatttgtttatttagctagctaaaagtatttttgtaacattattactttttttagttaaaattgaagaaaaaaaaaaaccaataatatattgtgtacttataccttaaattaatttaattaattatagtacttactcgtggttataggtatagtcaagtattttcacacttcttcttatataaaggaggcttaagtttaaatttctccacccccaatataaataacatatgtaatttctgtacattatgttttatcatatataaggaaggatttatttcataaatatacaaaagtgacaaaaaatttatatttttttggaaatctaatattttttatataaaaatacataatggtatttttccgttgttttctaaaaaaaaaatattgttttaacattgttgctgcaaaaaaaaaaactatatgagttttttacaactatacatagtgtagtttttttgttgttttagaacaaaattattttgagttgctgttacgaaaaaacaacgtgaaagcagcattttttattaaaaaaaataagtaaaagaagtaaaaaaaaaaatagtaaaagtagtaaaaaaaaaaaaaaaaatactaattttaggtgtatggccatattatatttttttacatgagttttttttaataaatagttttgtaaatagtgtagagttataatttttttttaaaaaaaataaactactattatattaaaacaaaagttataatacaataagcatgagaggagaaggtatttcctccgaccatgaacatttagcattacctatagccaataaacgtttagtttttttttcatctttttaatgataaaaattaaattactaaatatactactaaaaagtgtacgtttgtggctcttgtgttttccttttttttttttaattaaattacaattaaatcgaaacattttgtggatgaaatcaaaacttgagatttaaaattgaaagcgaaactacattaaaagaaataatgtagcagttatggcggtttaaaattggaccatgcgattgtctccagttccttccatggttctcttctcagccacgtggagtttcccgctcctctgacgatgatggccaaattcacatagcaaagaacaacatggtggcattcaattgcctcacaattataggtttttcaattctttttttttcgtatcttaactttttgatttgatcttaccatttaatcaatcgttgaagcattcagttgagtcgtattataatttataaatgttagagataagacattggcttttacacatttcgactgcttattctcagatttttaaagttattgtgcatttttcgatgaagatacataacaattttgtgaaatgatggctccattgttgcggtgtttgatttggctaagcatgtcctttgaatagacactatatatatatatatatatagtgagtctggatctgggaggagatgaagatttcagcacttttgacttctgctggaatcaatataggtgtgtgtttggtacttgtgtcgttatactcgatattgagaaaacaaccaagtaatataagtgtttactttgggcggaggattgctaccggtcgctcaaggcgaaatattgatccttattgctttgagagatttattccttctccgagttgggtattgagagcctgggaaagtactgaacaagagttttttaatattggtgggttggatgctgtggttttcctcaggattgtggtttttagtattagaattttcactatagctgcactcacttgttgttttctggttcttccggtgaattattatggtcaaaagaggcagtaccaacaaattccattggagtcattggaagtatttaccatcttaaatgttaaagaagcctcaaagtggctttgggttcattgtcttgcattatatatcataacatgctcagcttgtgtgcttctttacttggagtataaaagcatttcgaaaatgaggcttgctcatattagtgaatctccaccaaac

SEQ ID NO: 220098 - DNA, 4389 bp, Cannabis indica
tggttatttgttgctgatcttttaaaaggtctttgttttccttccaagtttattaagtggattcagagctgtcttcatgcagcttcgtactctcttatgttaaatggaagaattcaaggctcttttaaaggcgagaagggtcttcgccaaggagatcccatgtctccactcctttttgtgctcattatggagtatctgactagattgcttatccagaagtcaaaggagaaggggtttggttttcaccctctttgtaaatccattggcctagtcaatctgtgttttgcggacgatctaattatcttttgcaggggtaatgagaaatctgtcaagcttgttaatgaggctttccaatggttcagtgaaacaacagggctagtggctaataaatccaaatccacagtgtactttggggggattctagatgatgacaagcaaaatcgtctgaacatccttcaaatggatgagggaagttttcccctcaaatacctcggtgtgcatctcaggcccacaaaatggaggttctcatactgtggtatcatcatcgataaagttcataaacacttgcataactaggctagcaggaatctctcgtttgctggtagagctcagttaatccattctgtccttctgggagttcgaaactactggatgaaccttttcttgcttccgcaaaaagttactacggccattgacaaatactgcagggattttctttggggagtgaatggtaactgtagcaaaatgcacatcccctcttgggagaaagtttgtctccctaagaaatttggaggcattgggtttagggaagggaagaaatggaatattgctctaatagctaagtatctttgggttagcaagcaagataacctttgggtcagatggattgatgccatttatttgaaaggacaaagcatatggattatcaactttcatcaagatgctagttggtatatcaaaaagcttcttcaactccgctcaataatagatgatgaagatgttaaggtggtggtgaggagaggtaaattccactctaaactgttctatgtttcctttgttcaagtaccgattgttgattatgcaaagaacatatggaatagattgatattgccaaaacacaggtttattggttggcaattagtgaatgaacagctgcttattagagataatataagcagatttattgagatctccaatgagagttgtcctgtatgttgtactgagaaggaaacacatagtcatcttttttatagctgctgcttcactcaaaaaatcatccaagagattatgtccaggtttggttacttcagctagccaaacaacatcagaaattggttttctaggccttcgaacaatgtaagggagcaggtgttgaatgctattgttttagcaaccttgtatgtagtgtggacaaatcgtaatagctatgtgtttgaacagaaatgtaagctggctaagattgttagcaaagaggtcaagtctttagttaaactaagatttttatactgtaacagtaggaggaatgagcctcttttcaattatataaacaatgtaatggaaggttggtatgagggtgcggctgttgtacctggtgtctagtttgttttcctttgtttgttttgtattcatttgcttgttttgaataaggaaccatttttcttgttaaaaaaaaacaatattattccagttagtgcgggggactatgggtttgtgtaaccaggctcccaataagtagttctagaatttaccaattaaattctctatcttattaattcctcctaactccactatagattcagaattgcacttctgattacatagaacactctattcaccaaaaattgatacactataaattatccattatttcaatctgaataatcaaagatcctctatgtaacaccctactaggttaggcatgttatcatgatttaaagttatttgtaatatctgttgctaatcaatgggtttgttggaaaacgtgtctaattaaaattttacttaattaacctttaattgaaaataaataatatttacataaaccgagatcctgaatttataaaattacaaccatgttacaaaataataattacaaaagttatcgcctagcaactattcaaaaatacagcctgctgtccggaagatcaaaaactccaggtctaaccgcctcgatatgtacaatcttcatctgctcgcactcactgctgctcaaccatacttttgccctcacctacacatgcaaataataactgtgagtcgacaaactcagtaagaaaagcataatcataacataaacttaaactggattataactaagcgcccatatacccaatcataaccccgcgtcccacacgtattgagtttagagtgttcgtacaacagtactattgaccataatatcagcctatactcgatactctagtcgtaccgatgtgataacatcaattagtacttaagccaaacatacaatcatcggtatccaatataactctatgtatagtgataccactattacaatatgttatctaacaggcatttataaatatgtacgctaaacatgtaatcaaatatgcatatcattatacaaatcttacctcgattccaaattcaggtatgctgatcaaactgagtggaaatgctgctcgacggtttataggcccctaagtcacaacatacgcaaaactaataagtgatacgctaatcacttttcggggacttagacttgaaactaaaagttttcttatcgataaatagcatgactaaaacctaagtatcgagaaaatgttgaaaatgtgatttcgggaaaaagtacccaaaaaaacagtaggcccccaatgtaaaaatggcagaacttttttctaggtttttcttcctggaaaaatggtaggtcgttttcctagaaacggccaagccccaaatcacaaaactcaactaattcgattccaaaccttaccaaaagctccaaagcacctatttgagtcataactagggatgcacacagggtgaggaattggcggagaatgctcccccctattcccatcctcgttaagaattttaatccccatccctgcttattccctatcggggatagggcagggaatcccgtaatgggggcgaggacggggcgggaaattccctaatagaaaaattaagtttataagaaaatttttaatatacagaaaaattaaactacataaaaattaaaatattacacattaattattattcaataaattaattattatccaaaacacaacttaaaattcatgaagaagtaatatactaaaaaatgcaaacataaattataaattataaaatattactagaaatataagataaaatactaaatgggtccccgtcgggggcggagagtgtgatccccgttcctatcccgtttaacattcgagggacaaaaagtaatccccgtccccgctctgtttcccatttagacggggaatctccgtgggagaaatgtccataatccaagtgaaaaatgcatcatcaaccaactatagcagtatttaccattaatgagcaaagctcaactttgtccaaacacaacgacaagcaacaattcatacttaaaagagctcaaataactctaaaccaacaccagaaatcactctctaacatcaacataacatacaacaactgaattctcaaaaataactaaaaatcctagctttatgaatgagaaaatcaaacaaaagagagtgagtgagcttaccttgagatgatttcttaaattactagctgaaatccttgcaaaatcgatgaactaactcagaaagtacttggtttcttctagggatttctatggtcgaaaagagggagagagtttgaagagagaatattttttagtgatgttaatcttgtttttctttaaattatcttaactaatattcagcatataacatatccatatataaaagataaaagtatagattatcactaacaatccaacttactcctcaaattaatactaacactaaaatgaccaaaataacctttacttcactaagaagtaaccttgaaacctaggggtattatggtccaaatccataaccccgactactcccaatatttttaatctctaactaaattaccccgttatttctaaaatactataaaccatatctaagtaactatataggccataagttgcattccactattaccagcataaaatatgaaaatcataatatttcacatataacacaattaagacacctagaattcaaatatatttccataattatgtaaataataattaaaagtctaattctgaattaaactctaattctcaaaataaagctaagcggtcattacaattatcctcccgttaaaaggatttcgtccttaaaatttaacctgaacaactctggatat

SEQ ID NO: 220099 - DNA, 8886 bp, Cannabis indica
ttttttttttaatcattatactcatattcctgcaggtcgcggtcttttattctggtcaatcaactatacaaggatataagccgagctcttgtcagaaagaaattatcggcagggttggtgctcacaatgtcactgagttccgcgagccctgccttacttttatagcgcggtcccgcgatgagttccaggatccgcctagccttttctttagatggctttggggttcccgctggagtcacatgctcctgaatgtaatctactaaattactacgactcttccaataggaattggttgtattaacactgtccccggtgtcatccggatatactggaggatccctttgggaaaagcgatacgtttggggaaggattggaaggtcccgcttcccccgagcaatggcccgtctagggtggaagagctagccggccagcggtcttccttccgctgttcgggaagaggacgcacgcgctgacgtctccttgatagctggaagttctccaaaagtatgaaaagctggaggactttgtaccatccattccagtgtggttgaattctgttcaacagcccaaggacttggagcacaccttttgttatttccactgcttaaagtgattgttacgaccacgaagaaacaacaaatcccaactacggatatataagagccaaaactgctaagggcgttccatccagcgtaagcatctggataatctggaatgcgacgtggcatacccgaaagccctaagaaatgcatgggaaagaaggtcagattaaccccgaaaaaagtgatccaaaaatggatttgacctaaagtttcagggtatgtccgaccaaagattttaccaacccaatagtaaaatcctgcaaataaagcaaaaacggctcccatagaaagtacataatggaaatgtgcaaccacataataagtatcatgtagagcaatgtctagcccagaatttgccaggactattccagtgagtcctcctatggtgaacaaaaagatgaaccctacagcaaataacatgggtgttttgtattgtatcgaacccccccacatggtagcgatccaactaaagatttttattccagtggggacagctatgatcatggtagctgcggtgaagtaggcacgggtatcaacatctaagcccacagtaaacatatgatgagcccaaacaagaaatccaagaacacctatactgatcatggcataaaccatgcctagatacccgaagaccggttttcccgaaaaagtcgaaacaatatgacttatgataccgaatccaggcagaatgagaatatacacctctggatgaccgaagaaccaaaagagatgctggtataatatagggtctccccctccagcgggatcaaaaaaggttgtattaaagtttcgatcggttaataacatggtaattgcccctgccagtaccggaagtgataataaaagtaggaaagctgtcactagaacggaccacacaaataggggtaatctatgcatagtcattccaggtccacgcatgttgaagatagttgttataaaattgatagaacctaaaatggatgaaacaccagatagatgaagactaaaaattgctaaatcaactgctcctccagaatggctggtaataccacttaagggcggatagaccgtccacccagtgccgctacccacttctactaaggctgagcttaataggagcaagagacttggtggcaacaaccagaatgaaatattatttaatcgtggaaatgccatgtcaggtgcacctatcagaatcggaacaaaccaattaccaaatccacctatcatcgccggcataaccataaaaaagatcattaaaaaagcgtgagccgttattaaaacattataaagttgatgattcccaccaagaatttgatcgccgggtcgtgctaattccatacgaatcagtactgagaagcatgtgcccatcactccagcaatagcaccgaagatgaaatatagagtccctatatccttgtggttagtggagaacagccatcgaataagatttgtcataactctttattaaaaatgatttactccagacagcttaactccgtaaagcctgtaggagtagtgaagaattatagtgagttgtggttggttgttgaccaacggaaagcatgggagaaagaaaaatggcattcctttcgatcttgtactcaagtacactgaacatcaacccaatcttaatgaataagggggataaacaatgacacctgtgaactcggatagccttgtagcagaccgaactaggcgactttctttcttatattacgaaattgatcgttttacgatagcacgtaaggtattttcgggcggctcgcccgaaaaggattcgatccagccaaaggtctaaccaaaggaaattcaccatcaacaaaatcacctaaagcctttccttacgttcaatgcccagtccaactttccaagcatggctatcttgcatcttcttgcgcttcgaataccccaaccacctcaacatctacttttcgtaatatggtgccaaccaacaattagaactttgcctttctcatccgtagaaccctagagataatttctattcatcctatccaattcatcacaaaccttttgagggagtcaggcgggtctggttttttttcctaagaggtatgataacttacaccattcaagatcaatgcttgcatccggggcgagagatggacgaaagtggaactgattcttatctggttgttcaaagcctgcctacttttgatgacatgagattcaagacccccttaaagtaaagcggatcccgatttccttgatccttcatctggctggactgtcgatagagtaagctggatgtgctattcgatcttgtaacccacgaaagctcgagaaagagaatgtcctctcaaggtctctcgagcctccttgaaagccgacgcctggatcacctggcattcctctagttaacctgtcgcggggtagggaggtccctctagttgcattcctttgttgagagtagcatgtctagtattcctggtttcattttgacttactttagacgtttgcgagacttcactcctccggtcatctttaggaatacgttattgccatctccggtgcatccatccataatgcctccctcatcggattagcttggctacccggctctagtaagacttgtaagacttcttcccgcgtggagctagcatgggcctcccattcggtatcaagactaagagcccatggggagaatgattgggactaataagactgaatagaccgacccttttctttttccctgtctcccgcggtggctgaaccgcaactgctagtgatgggacggagaaagaactcctccccgtcatctttatctttctttttctctccaattaggagaggctgataagaaatcgtatcagatgctattccccgcccatccatcggagagaggaactgtcctagctgagctttataactcctcgattcaagaagagctcggagataggaggagaataagaggttagcaacgtacgaacgttttccaagcacgccatgggagtctaggttttgcgagctagcccggaaaagaggcgagcccgtataaaggtttaggtccaatcattctccccatgtgctatcgggcataaccgcggggattaggacataactcccgttgtttaaggataataggttggtgaatgaggtggttaagaaaaaaaggttagccgggtttgggattggtaacggactcgtgcggaatgcctaatacctaatagcagcaaaatatctgtcaaaaaagtatatacatgaatcgaaagacagatagatatcgaagtgggccagcgaatgagtccaccagccgtctatttagtatataactcgtctctctagcttggatagaagatccaaccccctgaagcaaggtatgcacgaaccacttgggcgaggtggggttagattagagggaggggaactgcgaacgcccgtcccatgaagcgccagggaaccatgcattcctcccgggctgggctctcgcgtgtccggggtccgatcagatcaaccagcgaccggtttacggaacaaggagtgttgcaagggccaggagattgatagaagaacctggccgaagtcagtgttgtgttcaactccgcgggttgactggttggaagggattgctttctgccgtctgtctttcccttctatctcttctcttagcaaagtaggttcaagtaacacttttggcttgcgggctcagggactgcagtcagccgcttcccctgtagtcgtcagctcgttcttgacagatccgatcgggtgttcataatctggagtaaaaggattcgaacctttgcatgccggtaccaaaaaccgatgccttaccacttggctatactccatacggccttgttttggacggtagaacggggagagggggaagggagaagcagggctcgaagaacgagccgtgcaagacaagaacgcggggatatcgcaagtaagcagcaaggttctcccctttaggaccgactacaacaagcccgcgactctaatagaaagaaacagtaagctctctgctctatttgcttgcaatgctatacctataaaagttggcgaacgcttctgtaaccttagactcgttacgctgttcgactgaactcgttggctccgcgtccaccgaaagtcggtaaccttcgtcaccgtcagcatttggtactctctcgatagcttcaatagttcactgagagcctttggtgtaatgaaccgcaatcccttcagaaagacaaaaaaaaaggcttggttgcgggaaccgacggtgacgaaggttaccgggccgatgcggccggttaccgggaaccgcaaggttgcaaggttcccgggaaacgacgttccctttgtaaagtaggccttttgataactaattagaggtgacatgaaatggatcacacggaagaagacgtatctgatgaatgaatgattcaatcccctcccacccccacgggttcttctattgaaggggttccccttcttctatgtgaggtggggcgtacgtaagagcggaacctagatagaacgcggagcgccggccccggccgccgatacagttaccatgcttaccagctcttaccattgctgcctatagatatagatgggaggtaggcgaaggtagcttgcatctcttctcctaggctactgcacatgttattcgcgaagaaaaggcagcgagcggttcttcgcttagtagagctacctgccgccggtcacttggggggggcgagacatgaccgcgacttaagattcaagtaccgttgaaaagactaaaggaacggggggaatgactacctgtaataaagcacaggctaatatgagccgaccagaagaagcaaggcttagattaccagatcctggacacaatcttcctagagatggagagccccttgcctcgccttttctagcctctccttcttgcttgcttacctagctcttgtcttagcgactcttcctctttatctaggtttttttctgagtgttaaaacggtagatttctcatttgccaatgaatttgatccgccccgattcgatcaataatgggattcttggctagaataaaggttctgtgacatggacgcccaactcggtcggtcggttggcccacctaacagatgatgagattctcgatcgatttgatcgaattttgaaaagtctttctcattattcagaacagtggagctttcgatcaagatgttctcgcctcccccgttcgggctctcgctcgaatcggaacctttatgcgttggtaggctttcgactcaatctaatagcctaccttacctatcgggcgccaataaaagagaaagttttcgcatgggctcatcatctgatgcagaacttatttcataaccaccatccatcaccaatcacattccacatcccacttcaaacttttcgattcctcgggtagcctcctctataaaggcattccagctgcagaggcaggtgagccggggcaggaaggagtttgactgctgggatgggatcggatcctatctgtagggcgggctttcaagacagagatgcactactccatccgctaaagccctcgtggggaaagagaagaaccccttatttaaaggtaaggccagaagggagtcaaaaagaaagaaaaaaaaaatttcccggccgacgggactctacgtctgggtcttattccatctcaaactcggattaggaagagtgcccttgaactacggatcaatcataataaacaatacaagcaaataaattgattctcctgccggtgagaaagaaaggaaaaaaagggggagatagggaagaggagattaaggagcgaagccactccatagatagtgaacacagattcttgtttcattttcaattcctttcgggtcgaaaacgcgggctgctggtggggctgtgcccattctccctcttcttccgctttacaaccggaataaggaaccttagaattcacccgacctgtcgataaaaaaatgggatttgagagggcggatcagaaagatttttatggaatgtcctactcctgcccgagctttccgatcaaccaatcccctatttcagggacatctctttgttaggtagggccagggatcactaattagtcgaatgagcccactcctctggcctatcatttattggtcgatccggctggcggctcctgcatctcctgcgtctccatgggggccccttcaaaccttgtttatgggagtccctctagtcgaatcaataatcaatagaagtttactgacccaatcgacgatctacagctccctcttagttgcggatgcccctgctttgattcgaaagccctagccagtgatgaatccccagtaagatcggagtattgaattcctcctcccttcaggcctgtttgaacccgtcccagcaacgaacaccttcctactgcaaggtgaggctctgcccttcccctagaatccactccgggtcggaggagcagctagtccaacttcttgagctgccgagatattgaacaacgaacatttgattgaattccttgcctcaccctgagatgagagggaaggtcgatttgactcgaatcctggacctgatctttaatcctacaccggttaatgatgcgatgggataagtttttcttttgtcattttttcatcaatgctggctcagtcgaggctcgtccatgcccaatcccaatggacaaaccttcgatccgcccctagctctataatccacccgtcttccccagtccctgagagccccccctcctgggcctagccctctttctcaactcgagtcttaagttcagcggctttcatcgttgacgaacacctgcgctaataagacaaagaagtggggagtctatgccttgaatgaatcagtaacaacgaattagtggaatgagagatcaagagacgaatagggggggaatggcctatcaatcattggtggcccttcccttgaaccggtcacggagctctcaactgagttgtttaggttctggaattccatctctagttgggggttggtttcggttcgaaggttataaaatgtggtgcgggttcatctctctcgaccagttccggttcaagggaagggtgatcgaggggacccagactttagatctcttctctatggcgggaggtttatttcgtatcaagagtgtgttggggaggccggggaagacggattggatcgagaggcgatgcctatgcctcttctttatcgataggattcccatccgcccggcgaaggagacaagggcgaggcaccgaacatgttctatcctcaacctgcatccgtcattagtaatctcaatccgcttttcctattcactagtacactgcgcgctacaactagcagccccttgtatagtaagggaaaacgctagcgcgctagctagctacaactagttatatactacttatttttaataggatatttgaagaagccttctgaaaaacagaagcgcgctagcgcgcaacggccgaaaagccagcaacttgttaggtcttgaagagccttcggaccctttcttattattagtaagataggtttggaaccctatacaaacaaggggctgcttgctgctcgcccctatctctaaaggggcttatgcactccactcgttaccactaaacgacgaagccaggagcggaaggagggacttgaaccctcaacctcagccttggcaaggctatgctctaccattaagctatttccgccagctacggtagtggcgaagcactactgagcaattcacgtatcacttgatacggacgacttctgtttttccgccggaccacactcttgacctccgatcgagctacgagcacgagtaggtaggcgtctagggggggaggggcggctgggctgggaaggtctctcgagcctcttttttcttcgcgccagatgagatgatgattagtgggtcaggtccagtgtgtgctcttgatcacaatcactaaaggggcgggctgccctttcaatcaatctccggccgctgtgcgagttgtaaggagtcttggtctcgagtcgagctggggcgtcatttcattctcgtaacgggagtgagtgcaccgcaagaccagacaagttactccctcgcctcgcagcggcggcatctgtcttttaagttaagtcatttcctaagacggctcctcttattctacgataatccaagcagcagctccgctcggaaccagtcgattcctgagccattcgttctcccctctcggttggcgtttgccagccactagagcaagtaagagaacctacagtgaatgaacttaaagaaccgcagattttgaccagattgtacacctttgtgtctggctatgtatatggatgtgcataaagaagggacgggacatctctc

SEQ ID NO: 220100 - DNA, 4718 bp, Cannabis indica
ttgtgatccctaagtcgctgtaataccattcgaagatgatgctcgtgctcctcttctgactgagagtatacaaggatgtcatcgataaacactataacgcagttatcgaggaaatccttgaataccctattcatgagatccataaaggcggcaggagcattagtcaatccgaatgacattactagaaactcatagtgcccatatctagttcgaaaagcagtctttggtatgtcctcctcccgaattctgagttgatgataaccagatcgtagatcaatcttcgaaaacacagtcttaccctgaagctgatcgaacaaatcatcaattctggtaattgatacttatgcttgatcattagcttattcagttgccaataatcaatacacatttgaagggatccatcgttctttttcacaaacaaaactagagctccctagggtgatacactgggtcggctaaactctaaatccaacatcccctgaagttgtatttttagttccttatgttctgctggagccatccagtatggtgccttagatacaggttatgcccaggtgccagaaaaattataaaatctatctctcattgtggcagtaatctcgataattcctcaagaaatacatcaagaaactctcttacaactctgacatcttgggccaaaatgtttcaggtttattggagtcaatgacaaacactaaaaatccaacacatccactgtgtaataaatccttagattttaaaactgagacaatcaagatctaagaaccttgaatagatctgacataaacaaaatgatatttgccctccggttagaaagttgccatcttctgtttgcagttaatgctggctgaatacattggagagaaaatccatcccaagtataatatcaaactctgttagttccaactttactaagtaaaactccactccctattttaagtcctaactgggatagacctaatcaaccttatggagataactaattctccactaggaagtaaagttccaaaccctatctcaatgaaatcataaggcctatccaattgattaattactctcgatgccatatatgagtgtgtagccccagagtcaaatagtacagtaaaataggagtcataaataaaaagttgacctgttaactcaaaaggtctagcgcagcattagcttgagtaatagcaaacacccgagcagctttgtgctttgcatgttgcttctattcttctctatttgtcagagggaagtccttcttaaaattcccaacaataccgacataatttctccctaaacaaagtcagtaaactctttccgcttggcactactgattgcctcattataatacttaggattaaataattcccgaaactattcccaagtcatttttgtgacgtctcaggtgaggataccaactcccaccacacgagagcgccctcttagaattgaaatgtggcacaggtcaccagatcattcctggtgacacccataaagttcaggatcctctcaatcactgtaagctattgctcaactttcatgacatccggacctcctagaaaaactgaaggggcctatttgcgaaaccaatcatacgaaggctcgatacggttgccagcaacaagttgttgtgctagcacttatggaaccaaaacggccgacacttgttgtggaggaacagtaggaggaacctcctgtctaagcctatgaatttcttcttgttattgattattgtggacttacatttctgcaaacctttgctcccaattctatagagctggtggtggattttcatgaccacccctttggaaccttcaacgacccctgctgtgtccatggggatttgggggattttgaacaccccgaccaccttcgatcttaaccaaattactttgactccttgtattttgctgggtgtccatattataggacttagccttcaaacctataagtcaagttggtgagacaacgatctagattgctctatataccacacttattgattttaagacaacgcattcaaataaataatcataaactattatgcttcctaacatgctttgctaatcacataaattaataaacaagtacatgcttactgaatcgtgggtcaagcttttctccgacgaagattgtacatgtctggacgatcttcgatagacaacctagcatctctgataccaaaattgtaacgctcaagtgattagccatgctacaataactttctaaattcaatgcaaacctttgctaatcaaagggttctctcaaaaactacaaaaaattaaaaattttgatttaactttatactttcataaatatatacatatattcacataaaattacgatcccattttaaacttaacattcaaaataacatttacagacatgtcgcacaacgactacaaaatgaagcccaagttgtcctaagaccgaactctctagttgcaccatctcgacatgtacaattctcccttgagctctgatctcactgttgtttagcttagggttttcctttacctacacatgaaaacaataattgtgcttcaacagactcagtaaaaaaagcatataacatacaatatatatacattatcgacttgtatctaggtgcctatacacctattcacaaggcttatcagatgagtaagaatattctttacttaggtacaaccactgtaccacaggcactgcataccgcaactgtactagtgttggtagggtttgcaccgtacctcaagtaccactaagtgttgtgccacatacactaagtatttatccgtattagtgttggtaacaccatattgtactcattgaacatcatacactatagcaatgcacttgatactgctactgtactagtatgagtagtatacgaattacaaattgcatgcatatattgctcatacacatattcatatataaatacattctatgctagtcttacctcgttccaagttcaagtgtgttggttgacttgttaaatggatgccctatggcacattcacgtaaatgggtaaataactttctaaaaccctttgtggaggcctaaactcaaaatcaaaagttttcccatcgataacaagcatgccaataccctaattattgaggaaataccaaagctagggctctaaaaactccccaaaatgataaactggatttcccaaatggataacttgttttggggttcttcctagtgaaacggctaaccggttctacaatactagcagaaccgattaatcgattcgaagcagaaatccccaaacattttgaaactctctctaattaaatctaaactccaccaaactttctagaatacctataaaagcaccccaacaacagaattcaagaaataacaacaacgtttaataacgaaaacaaaacccaccattattgagccaagtttgagttctttgagctcaaacttgcttaacacaagaatcaagcttcaaaacaaccccaaaccaactctaataaacctaaattatacctaaataacaaaccttaaatactacagatttggacagagccaaaaattaaaaattgcatgctaccacttattacaacataaagaattcaaggaataaaggtttctaaggcttaccttgggttgacctacctcaaatccttgtcaaattctcaaaaaactgataaaaaacaccacagttcccatagttttgcttcagccgaaagagagaaagagaaagttctagagttttggttttctaattgtcttttgtcgtttcattgcatattactcaatataataaaacctaggtttatctaaataaattcagctgaaaaatatagttccaattaatcccaataaaaatcaaacctcactaaaatggcaaaattattattttgcccttgcttcacacttaagcaacttaaaggcttaggggtaaaattgtcaaataccaccactccacctaaactcgactttcaaaatatctattatgtttgtcccactaagaattaagttgtaaacttacccatgtgactgtaatgaccatccatcgcattttccatcgtctctgagcaaaaataataaaaattgtatattttatatttaacaaaaataatactcttaagagtttaataaaatatctaaaattgagaaattataactcaaatgtccatttctaaaaatggggaccacaataaatataaaatcaaatataataataaaatcccaataattattgctaattgccttttctaatcctcaatttagtcatgctattattataattatccctcgttcaaaagattttgtcctcaaaatctaacctaaataactctagatattgagccctcatgccagactctagttcccaggtggcttcctccaccttactgttcttctagagtaacttgacaaaagctgtggtcttgtttcgaagaactttctctctcctatcaaagattcattgaggataaatctggctgtagttctcgggcttcataactcaagatatgagtcaggtctaacacatatttccttagctttgaaatatgaaacacattatgaacaactgataatggtggtggtaaggctaccagatacactacttgctcgaccttcgagagtatctcgaatttccctataaacttagggcttaacttgcctctctttccaaagtgccttatacctttcatcagtgaaatttgtaaaaaaacatgttctcctccttgaaatgaatgtcactgcgctttggatcagcataact

SEQ ID NO: 220101 - DNA, 1352 bp, Cannabis indica
ggtaaacaactttaaatcacagtttatactagtaaacaactttatatctggagacgaccctgagtatgcctagaacttatggtagagttgtagaataggtgtagcaaaaatatgttacgtaggaaagttttggtgttgaataatcaaatttagggacttattttcccatgcattaatgcacggtattgacatatatatatatatattcattcatatagagatcaatagagtcaagtcctgcaatttgttcgaagaaatttcaacattttattaattaaatttgttcaaagagactttaattgactgaaggtgatacaacttgatacttgtttttttttttttttttttttttttttttggctagacaacttgatacttgtttgttatatgtctaactcaaaaattgattacattcacaaaatgtctatttatatggacatgtgaattaggcagacatgcattgatctatatatgaagtaattacgtatatagtatctcactagcttattttgaattaatattaatctctaaatatatatatatatatatgatgacgatgatgatgaaacttgtggtgcttgtgtttgttgttattgccacgtgtgaaggtgtgtgcatagagaaggagagacaagctcttctcaccattaaaggaggccttgttgatacaaacaatcttctttcctcatggacaaccaccaacaaagattgttgtaattggagaggaatcaggtgtgattatcatcataacttaactaataataatcatcatgttattatctctcttgatcttaactttgattgcttagacattaatgatggttttatggagccatgttttatgggaactgaaattgatgatcactctttggttgaattgcaacatttgactcatttagatcttagtaacaacaacttctataaaattcccaagtttcttggttctctaagtcgactcaaatacctcagtcttgcaaataatcccatcattgacactatcagtccttttcagctaagaaatctcaccaaactccactttcttgatcttgatattgaccaatctggtaaattgatcttgagtgatcttgaatggctttcttatcttccttctttgaaaatctttagattgagccacacaaatttagatgacaaagctacaaattggcttcattccataaatccactccttccttatcaagtttacactttgattattgtgtatttccacaagtagatgtcttgtctcttccccatgcaaattcttcaaattctctcaaagatcttcatatttcctctagtaccatattattaaacccttctgtaaagtccttttttggcaagttaggtgacaa

SEQ ID NO: 220102 - DNA, 6275 bp, Cannabis indica
ttttcactgttattaaagattataatcgtttacaacaacagagaaaatgggactgggaacaacacccgtccaacagacatcttcatccaactccaaagctattttgctaaaccatgagcagtctggttagcatttctcttaacatgagaaacaataacgccggagaaagaggataaaagataacgtacatccataattaaatcactaaagcttgataaatcatgagaagaagaatttagagcagtagaaactctaagcgcatcggtttcaatatgtgtaatcggaagttgatgttgcattacccaatttatgctgtgaaagagagctttagcttccatttcatctgaccgaaaacatccttgaatcggttttgacaaagcagcaattacatgcccttgatgattccgcactactgcacctattcccaacactttagtgcttgaatttactgctgcatccacatttaatttcagaccaagagggtctggtggtctccagttcgcactagcaggatgatgtaaagggctggagtcacgatttgtatgctggttatttgaactctgagcattaagttgaagagaggaaagtttgataccatctgtagcttgtcgatatttgtccaggtagttgctggcaaatataaaaataagtaaaccttctcttctttgtccaccatgtataactttatttctctcaccccaaatggcccacattatactgatgagcaattcaaaatctggtttggtatatagattggataagtgaataaggtagtcaccattatacatgtttcgagcattttgaaagtctatggtgaaccttgaatttttccaaaccaatcttgcattcttacacgaaaatagagcatggccaattgattcccaagcatttgtgcacaaagagcaagatgcagaagtgatcactttcctcttgtgcaaagctgcagccacaggtaatgcattttgcataaccttccatgcaaatatcttaattttagatggcaagttaagctgccagaaagtcttccaccaggctgtatgagtgttagaaaccgaggaattccttctgtcctcaatattacctgccagatgaaaacccgagttgacagtgtacattccagtagttgtatgatgccagatcagtctatcatgatttggaaaaaaactcaaaggtatggcaacaattttctcaatatcaattggttggaaatgttggtgtagaagttggagattccactctcttgtttctgtaatgaagtctgaaaccgagagagatggtgggccactgaaagaaataggatgaaaattataatagccagggatccatttatctgttccagcttgtacattgtgaccattaccaattttaaaccgaagcccttcaattagaagctcacgaccccaatgaatagcttgccaagtcatggaaggtgagtgtcctaatctagcatccaaaaaagaattgtttgagaaataacgatgtttcaataacctgctgagtaacgagtttggatactcataaattctccatgcctgcttagcaagtaaggcttgattaaaatggacaaaagaacggaaacccattcctccttcaaacttggatttgcaaagcaatttccaccttttccaatgaattcttgaaccatccttatttgctccccaccaaaaatttgccatcatggactccaactggttacaaaaagtaattggtaaccggaagcaactcattgcaaatgctggaatcgattggacaacagccttcagaagaacttcttttccccctaccgaaaatagttttttattccacgcatgtagtttttgccatattctttcctttacctcactaaacatttctttcttatcacgacccgcatatgcaggaagaccaaggtaacgttcatggcattcagcaataggcattcctaagacatgatggaataggtcctttgcagcttgtgaagtgttaggagaaaatgacataactgatttattattgttcaacaactgaccagaagctctgtggtagatatcaagaattctcctaatagcattggccgaacaagtagtagcttcacagaacaaaaggctgtcatcagcaaataagaggtgtgacactgaaggcgcatgtcttgttaatcgaaggcctttcagattacccaacaattcttgatgctgcaaaagtcttgacaacccctcgaaacaaatcaagaagagataaggggaaagtggatcaccttgtcgaagacctcttgttggttgaacgttaccaacagcttcaccatttagcatgaatgagaaacttgtagagcttagacacctatgaatagtctcaatccaagtgttgtggaagcccattttcctcataacttcacaaatgtagatccattcaactctatcaaaggccttgctcatattaagtttgagggcagaataggctttattaccttgagtcttgtgcttcaagtggtggatgagttcaaatgcaaccaagatgttatcagtgatgagcctattagaaaggaaagtactctgattctctgaaataactgatggtaggacttccttaaatctattggctaagactttggaaatgagtttgtatatgacattacacaaactaattggtctgaagtcgcccatatcagaaggcagtttgatcttaggaatcaaagttatcaaagactgattaattgactccaaactatggccttcattcaatacagtaagcacaaccttggtaacatcatcacccactatatcccaatattgctgataaaacattgcagacatgccgtcactacccgggcttttatcaggacttatagatcgaagagctttaagtatttcagcacttgtataaggctttgttaatgaattgttcatttctgccgtgacagtggttggaattgtattcagagtaaattgcaaagcagtgtcatcaattggtgaagcattgaataaagcagcaaagtaggaagtaataacatcagtgagaccttctttagtagtaacttccataccagtagcatccttaagcattttgattttgttgtgctggtttcgcgatgaagcataagcatggaaaaacttcgtattttggtctccacatttcatccaatccacacgcgaacgttgttgccaataagtttcttcttgtgctaacaattcatccaaaattgattcggactgttgtaattcatgcattgcagatggtgaacgaacttgcaggttgttaagatattccacatgctgttgctgattttttatttttttcttgatgttcccgaatttccccttatgccattcctgtaatgaatttgagcatagttgaagtgaattcttaaaatcagcaagtacattcccagattgagaatgaaaccagttattctatataattgtggctgcttctgcttccttcaaccagagtttctcaaatcgaaaacgatgcagtttttgctgttgaggcattgctgtgagggtcaacacttgaacagataaagctcgatgatctgagttgaagaagtctaagtgttgtgtgacaattggttggaaaaaatcagcccaaggagagttaacaaagcaccaatcaatcctttctttgatagtgtcaactgtgtgcctaccctttatctaagtaaattgatcaccatgaaaaggctgtttaaaaagttggcaggtgtctagagctgaacgaaacctatccatttgtgcctcatttcgcaaagaaccaccagacttattattgtgtgagagaatttcgttaaagtccccagttactaaccaaggtgtttgaggagcaacatctttaagtctttcaagcaaagtccaagttaagggtcgattatgagcagctggagccccataaaatgcagagaaatgccatttcggatcattcccaacagccatgtaacagtcaaataagtttgtattatgatttaaaagagttacagttacatcatctttccacaataacattaaaccaccactacgaccgacacgagggacttcaagtccattattgaaatgtaaaagttgacgaaagcgagaaatagaattaggacctaacttagtttccataataaataaaacacaagaggattgctctttgacaagcaaacggagatgacggacagcactcgggttccccaaaccccgagcgttccaactagtaattttcatggctgattgcggggctggaacccagcctccgctgatatgtcttgatcaccagttgaatccgttaaatcaatggaaacattctgatggcattcctcttcagcagacagatttgaagagaaagatggtgagtttgtacctctgcatctttttaggatttgtctcaaagatgaaccttctgattgcctttttattaaacggttgggacacacattttccttcccaccttctgtgcaatgttctgaagtcatagcagtggatgaagcattaggataagtcgctgggatttgcatcatgatctgtttggtattggtatgcagtagttgcatcggtggctgagttggagggtatgttgcaaaggtgttggaaggcataaccatggcagagagaggggtaaaaacactagataaatcagtatgctcttccttgtttttggtattcattgtcttgtgattgatggcttgttggtcaaaagatgtttggttaagtacagagggagtaaaagtgaccacggggtatgttacagttttttttccacgagcttcaacatgtgtacccactgctttgtcattgtatgacttatgaaccaacgaatcatctcctgaacttgatgtaatatgtgttttgccgttgttgttagcaaccagaaaaggtggatcagaatttgatcttatggaagcccgtttggtagttatatgagtttgatttgcagcctgatgtgaagcagttgtcattttgtggctctgtgatgatttccctggaaataattgccttggtattggttgtgaacgctgagtaatttgaggaattgcagagataatggaattctttgccaatcgagtggtgagtggccagacattccctttggcaaaatccgtacgataacgatcatagcctgaggttggaagagcagaacccttcatagttggtccatattccaattcaggttcttgtccattgtcaagcaattcaaggaacttcaggcatttgttatagggatgacccaatattccacactccatacaatactcgggtaaccgctcatagcggaactccacccagaattcatcacggatctggtttaaagtgatcaatcttccacgcagcaaaggtttggagatatcaatattcacacgaattcgcagaaaaggaccccatccctcatttaacgaatcctcaaagacatcaatgtattcaccaattatgtttcccaaagctttagctaaacctttagttttgctaagaaaaaggagtctgtatatttgaacccaaaaaggtgagtaaatgagtgattcagaggtaacattttgtccaggaattggtgaagataatacaatgtggtgattttggaaatgaaaaggttcacgagacaagaccctcgctttgtcaccttcacatccaaaggttaataaaaacagatcagaggactcagaaattttaactggaaatctcccatcccagtgttcagccatctgattcctcaaagtcgatagccaaactttcttgtttgttaagatgcgagcatacaacacatgactgtcaggattttgaatattgacatcatgatcaacaaaatcaaaaacagagccttcctcctccgtcattgtgattacacctttcattttgttggtaagaggatccatagtaaagataacaccaatcaaaaagagcagcaatggcgaaagatgtatgaaagaacagacagttacaggtaggaagtttacaaagatacccagaaaaagaataagatatggatgataaactgaaaaaaaccataaaggtacattaactgcctcagagcacaaaaaagcggcagacactcttactaatatattatttttaatgattataaaaggacattttaaattatttaaaagtatgtcattattaatatttgcctcagtggaaaaaatatatcttttttaatctattttaagtgtaaaacaaaaaaaaaaaaaaagtgaagatttatttaattactataaataatttgatgcaatgttatattataaattatttttgttaatcctattttttttaatatatattatataattaaaaaaattaaaaatagtatattttaaattctattcataatta

SEQ ID NO: 220103 - DNA, 4805 bp, Cannabis indica
gtgttcgatcttcggggtagcagactttattttggtagtcgctagacgaccacttttggagttatatattttgtaaaatagatgtaaattttaaaagatgggatctcagattatgtaaagtatttaatatattaagtttaaagtttatttaagaaaattttaaattatccacgttttccataatcccgttgattagcaaaagggtattacaatttggtattaaagccgccaggttgtgatctgaagatcatcacaatatgtacaatcataatcagagataagttcgactcacggttcagtaagcctcttatgctttagtagtttgctttgttagtatgtgataagaaaagcatgataggaagcatgttagtagcctgatagttgaataagagcatgttttattttctcaagtaagtggtaattaaaatttaattttgatcgcgatctgactaggctagctcactgtttcgcatactgttctaatagaatggatgctaggcggcacacaagaagccagggtaatttggtcagatccaatagcggtcaggaagtataatttcccccaaatatttgtggccgagacagaggcccaagaggtagggcacgcggtcagggtcatgttaacccaccgcatgctacctaggattgggaatataggtttgctgaaatgcaagccaggattaatgagcaagatgaagagatctgacgtttgagacaatagagtgctcctgtaatgtctgctcctaaggtgcagatggctcatgccccttttatgcaagtggggctggttgtcgtcgttaatcgaatggaaccactttatgaaaggttccgtatgcaagcacttccaatctttctaagaggtccagacgttaggaaagtcaagcaatgactaactattattaccaagattttgaattttatgagagtcattggcaatgacagagtgtcttgtgcaacgttttaattccagattgatgccctggtttggtgggacatggtacccctcactcgcgacgtcaccaaaattacttgggaaaaatttcaagagttgtttaatgtaaaatactacaatgaagcagtccgtagtgcaaagagaaaggagtttacacaattgactcaaaaggaaaatatgtccgttacagagtttacgatacagtttgatagactggctaggttggtcttaggaatagtgccaactgacttaagtaagaaagagaagtatttggatgggttgaatcccaagattacacacgacctgatgattacaacggatgatgccaccacttatgctgatgtgatgggaaaaagcactacgagctgagggcacaattgagtgtattcaggagtctcgagggactcaaattattgttggagctactgatcctcctacctttggttatggtaggggtggtagtgactcaaccactaatcagaagagaaaacttccacacgcgttcggtggattaagtcaaaataaaaagttctgagggaaccaagatcatggtaaccgtcagggtgggtctgagaaccgatacacttacccagaataccctaactgtaagaaacatcatttgggcaagtgtagaggtcgtggatgtttccagtgtggtctaactggacattataaaagagactgcccacagttaaagaaggaagaacagaagtcagaggtgaaactcgctccagcaagggtatttgctcttactcaggctgatgcagaaactagccccttagttgttacaggtcagctctcgctcatcaaatcttattactctattttgttttactctagggccactcattcttatgtggtggccataataattaaaaaaatttggtatgccatatggtaattatgataaaaggtttggaaccctactacctagtggagcattagttatctctaaaaggtgggttaggtctatgccgattaggattgaggatagagagttgagtgctgatctagtggaattgggtttagcggattttgatattatcttgggaatggatttcttgtctaagtatgcaactagtattgattgtaagaggaagatggtgatcttccaactagtgggtgaagaaccgtttgtgtttgtgggatcactacaaggttcctgtattccattaatttctttattgaaagttagggaattattacaagaagggtgcttagggtttctagcagtagtgctagataccactagacctgaatcagttcgccctgaggatattaaagtggttcaagagttcttagatgtgtttcctaaagaacttatgggtttaccaccacagtgagaaatagactttgtaattgctttagtacatggagtggagccagtttctaaagcaccttatagaatggctcctgcagaacttaaagaattaaagattcaactttaggggatgcttgacttaggattttttcaacccagtgtgtcaccttggggagctctagtgttgtttgttaaaaagaaagatggatcactttgtatgtgtattgactaccgagaattaaacaaattgaatatcaagaataaataccctttacctagtatcgacgatttgttcgatcaacttcaaagaaagatagttttctctaaaattgatcttcgatcgggctatcatcagttcaaaatccaagaggaggacattccaaagactgccttttgtactatgtatggccattatgaattcttagttatatcttttggactaaccaatgctctggaagctttcatggacctgatgaataggatattcaaggattttctcgatatatgtgttatagtatttatcgatgatatccttgtatactctcagtcagaaaaggagcatgagcaacatctgcatatggttttacacaggctataggaacataagctctatgctaagtttaagaaatgtgaattctagctatctcaagtgtcattcttagggcacattgtcagtaaggatgggatcatagttaatccaggaaagattgaatccgtcaaggattggccgaggctaaagacagtcactgaagttagaaactttctgggtttagctggttattaccgtcggtttgttgaggggttttccaaaattctaactcccttaacatagttagctaagaagaatcagcggtttatatggacaaacaagtgcaaaataagtttccaagaactaaagcaatgagtgatcacagtcccaatgctaacactaccgttagaccaggaaaagttcgtgatttattgtgatgcatccaggcaaggtctggggtgcgttctaattcaaaccaatagggttattgcttatgcctccctccagttaaagagtatgagcagcgatacccaactcatgacctagagcttactgcagtggtgtttgtcttgaaaatttggtgacactatctctacaaagagaagtgtgagatttataccgatcacaagagcctcatatattttattacccaaaaagatttgaatatgagatagaggtggtggttggagctagttaaagattatgattgtgagattctttatcatcccgagaaggccaatgtagtggcagatgccctaagtaagaaggttcccgagcaggtatccagcatgattttgatttcaccttagttggcagacgacatggtcaaattagatattgagtttgtggttggtaaactcaataatttgatgctacaattagacttgttggaaagaattagagtagctcaattagtggatccaaaattgataaagacccgagaggaagttctagttagtcaagctaaggatttcacagtgtcaagtaatgggatgttgctttacaaagcccgagtttgtgttcccattagtgtggaacttagaagagagattcttgatgaagctcatactacaccctattcattacatcctggtaccaccaaaatgtatcaagatttaaaaccttactactggtggtgcggtattaaaaaggatgtggtggagtacgtatctcagtgtctgacttttcaacagatcaaggttgaacatcaaagacctgcaggattgttgcagcctttgacccttcccgagtggaaatgggaggatgtcaccatagattttgtggttggactacctagaaccacgagtatgtttgattccacatggatagttgtggatcagtttaccaagacaacacattttctacccatgaaaacaacgtatatagtagatcagtatgtagaactctacataaaggaaatagtacgattacatgggactctaaagtccattgtatcagatagggatctaaagtttacttcaaagttttgggaaagtctccagtccagggtacaaagttaaagtttagtacaacattctatccccaaatagatggtcaatccgagagaataatccagatattgaaagatttgttacgagcttgtgtgatggattttgaaggctcctagagtaagtatttgttgttgatagagttttcatacaacaacatctatcaaagtactatagggatgacccctatgagatattgtatggcaggaagtgtagatctcctattgatgaaaatggagaaaggaagtacttaggtctgaaatcagtacaacagaccaatgaggcaataaagaagatcaaggccaggatgctcacctcttagagtagacaaaagagttatgcagatccataatgcagaaatatagagtttcaggtagaaaattacgtattcctatgggtatctccaatgaaggggattaaacattttgggaaaaagggcaagttatgccctagatttacagggccttttgagattctcgagaaggttggattagt

SEQ ID NO: 220104 - DNA, 3727 bp, Cannabis indica
tcagcccaagtttggatttgggaacaggtctcagtctgggtcttggtttgggtccaggtccctagtccaattccagggtcctagttcccttcttgtttcggttcaaatttcatggacaggtctgggtttaggttctagtctcggtcctggtgtgggtacgagtcttggtccttatttaggttcggggcctagtcctagatccaaacactgactatgggttaggtccaagcctcgagtccaaatttggatcctagtctctgattccagtttggttccagtttgggtcccaagtctcggtttgggtcctaattccgagtccggttcaggggtcaggtcctaggtcccaagtgcaaattttagggactgattcgctatcccactttggaggcccgtatcctggtcccagttccaaggcccgacttttaggtcctggtcccctatccagccccgggtcacggtctgggtcgaggttctggttcgcaacctgagtcccgatttgagtctagatccttgtccgagtctaggtcccaatctgagtccaggtccctgtccgagtccaagtccctgtccgagtccaggtcctggtctcgggtcttaggtctaggtctgagtcccaatccagctccaagttttggtctgggtcctagtcagggtcttggtccaggttcaggtaccgggtcctggttcgagtttttttccatgtttgggttcgggtttttttttggtcctaggtttggatcttggtccccattctagtcagggttatggttttgatataaattttgggtctagatttgggtccgagtttatctcttggtcagggtaagagtcctagtcttagttttggtttgagtcctgggttcgggtccaggtcctagtctgtgtcagggtctgggtcccatgttttgatctagctctatgtttgggttcaggtttgggtttaggtcttggttcgagtcttggtacgatctagatctaggtttgggtcttggtctgggtttgggtccgagttggggtcttgggttttggtgtgggtctaagtttggggccaggtttaagttttggttctgttcttggcccaggtttgtgtctagatttggggccgagttcgggtatggttctgggtctgggtcgtagtcatagtcctgttccagggtcctgatctagtttcggttcaggttttgagtccatgtctggggccaggtatgggtcctcgtgcaggttcgagttcgggtccaggtctaggtccagattcaggtcttgttgtgagtcccgaatccagacactgactacaggttagattcaagctccaggtccaaggtcaagggtttagatcaaaatcctagtctagtgtcgcggtctgtttctggttcggtgattaggtccccagtttcagtctgggttggggtcgaggacctagaccatggtcgggtcctgggtctcagtcctggttctagatcttgcgtctggctttgggtctgggttaggggactttatccaagcttgggtcctaggtttgggttcgggtttgagttcaagtctaggtttgggtttaggtcccaagtccctatccgtgtttggatttggattcatgctccggtccaggtctgggtcagggtttgagttcaaattgtggggtacgggtttaggtcggggtttgattttgggtttgggtttgggtttgggtttgggtcttgtccgagtctaggtccaggtgtgggtccaagtccttgtccttgatcaagacactgactacgggccgggtccaagcgccaagtttagattcagatcctagtctcgggtcatggtcctcttccatttcgagtctcaggtctcgatttcggggcatgggtcctgggtttgagtccccccatccaggtctaggtcctagggcccagtttgggatgatgttcggttttgggtttgggtccaggtcctagtctgggtttgggtcttcgtctgggtattgggtcttaggtctgggtcttaggtctcgagtcatagtcctgatctgggtctgggtctaggtctcggttctattactgatcagggttcgggtcccggattctaggtctcggtctgggccaattcctgatctgagttttggtttgagtttggattcgggtttgcgtcttgtttctgtctcatgtccaggccttggtcccagtctgaaatcggttccagtttttattctaggtttgggtctatgtccaagttagtgtctaagtccaggtctgtgtccagatttcagtttgggccgaggtatgggttcgagtcccaagtccaggactggatccaattaattgtctaggccgggtttgggtctgggtccctgcattcgatctcggtctgggtctgggtttgggtttgggtcaaagtgctggtctggattcccatctaagtttgggtttgggtatggctcccaatttcgagtttggatctgggtccaagtcagggtcctaagtctgtgtttgggttcatgtcatgatgcacgtccgggtccgggtctcggtacctattcagatctggggccgagtctgggtttagagttccgatcccaatcttggtttgggtctggggccaggtctgggttcggttctagattttggtatgagtctaattccgagtttaaggtttaggggtttataatttggggtttataatttatggtttgggatctagggtctagggtttagggagtagggtttaggttttagggttaagggtttagcgtttagggtttagggattaaggtttacggtttaggatttaggatttagggtttagcgttcagcgtttagggtttacgatttagggattaaggttcacaatttagggtttaggactagggtttagttaatttaaactataaccctaaaccttaaaccctaaatagtaaaccctcaccggaaaccctaaaccataaaccctaaaccctaaaccctaaactctggcctgaaactagaatagggacgaggacccgaatcgggcacaggacctaaatagggattgggacccgaacccgcccaaggactcaaatagggaatgggaccggggcctagacccgcacccagaatcggacgtagacccagacttgagacccgaacccgaacctggacgtagaccgagaaagggatctttacccagacccagacccaaaccttaactcggaccaagactcagaccccgacccaaacctagacacagaattggaaacgaaagcagaacaaaacaaggaccgggactaggaccttgacctgggactagaattgtacccaaacccagacaagaactcgaatcgagacctagatatgcactgggacctagaacctgggactggacctggacccaaacccaaagtagggcccgagactcgagacccagattcgagactcaggacctagatttggacccaaacccagaccgagtcctggactcagactaggacctgaacccgaacctgaccctagagttggaccgagatctaggacttggacctggattgggaatcaggactgtgattgaggactcgaccctggacctaggcctagacctacgaccaagaccgggaccagagactcgggacccgaattggaaccagattaggacacgagactaagatcagaatcagtaccatgggattggacccaacaagtggttggtgtctaaatcttggatatggacacaaacctaaactcagagtttgacctggacccgaacccaaacc

SEQ ID NO: 220105 - DNA, 1403 bp, Cannabis indica
ttattgaactctttattttgttaaatgataaattggactttaaattttttagaattgtataaaatagtactctgagcttaatttttgttaaaaaaaaacttaatactaacctgagctggatatgttatgattagactggttacatgttttgcgtttgttcatcctagaaagtaacttaaaattgattatattaaagataaattgacgaaaattaaactcatgatattattttgtattattttaaaaagataaatgataagggatatcttaaggtgccaaacatcacaagacgtggcgtactgttattggtgcattttaatatcaagttaaacacattttaatttaacaaatgatatgagaaatcactaaccgattataggacatcacattttaaagtttaaattttaaatcgttttagtatcatttgattaaatttgttagcctatataaccacattatatttagtgtttttagtacgttttttagatttcgaaaacttagaaactctaaattagcaactacttagtattattcatcttcttcttcttcgcattttctaattttgtttatgttcttattttttttttttatgaatgcaataattatgaacatgattttcatgcattaatttttttatttagggattaatggagtcactttaattctattttattttgccatgatgttctattgatttcttcttctttattttaatctacataatttatgtttaatgtttgtgaatactttatcactatttgcatgtttttatatttcaattcgagattcgagagatgagagttgaatatgctatagttgtatagacataagctacatattagacgagagaacccatataacttatgtagcaaatacggtttttattcttaatgccttttatatgtttaaatttatcacggatacataaaaaaaatttatataaattgaggtcttatatcttaaaaaagaatgggatttgttttagttaacccgctattaaaattagaataaaaaatggtagaacgaactaataaaataaataaattgacaagttgatgaaattaacaccctagatcctattattgatattcataatcattgtttgcttactttaattttatagttaaattgttttcctaattttaatagtattctttcaatttttatttgctaaatagaaagtagaaaaataattgttggtacttagtaatagttttcgaaactcatgcttgtgcactattaatacttgaaatgagacatatacttgcgttataaattcccctatcataacaccatgcattaccaattatatagttatcattaaatgttaataccgacataaacactttaattatgttcgccgtcataaaatactttaatagattctgctgctgctaattcag

SEQ ID NO: 220106 - DNA, 1808 bp, Cannabis indica
ttattatttgtttagaaaaaaaattttaactaaatgaaagcataaaaaatcaaattttaaatgctttagtatttataaaccaaaaacaaaaataatccttaatgagaaaaaattagaccacaactcccacccacttctctcccaatttgtatataacatgtatatatattaatagaacatataaattttgtattttttttaattgaaatgtcataaagattagattggaaggtatttatatattaaatttttcaacgaatttaataacaaattacttgattaggtgaacaaaatttattataaaacgaaaaaaaaaaaaattgcactttgtaggggttcaatctttgaaggtaaaaaaagaagttaaatatatataggttggtgaatttataagagtaaatgttttgtatatttatatatatcttatggatatgaattttttagattgatcttggctttgaagtaggactaggtgataacaaaagttggtgaaatggaaaatgagagtttggtgtggttttgatggaaaactgtatagttataggtgagagtgtttaatgataaagcattcattaaggtttcttttatagatacatattttataaataattttatgatgatataataggccgcaagagatatagcccatatttttactttgaaatattggcggcaaattcatctgaactatacgatttgtaatacttaactatagaaaccgattttgtacataatttttataataatttttattattatagttttatttttatattttttaagtaatttttataatatattaataattaatgctatgtggaccactaaaaatacgccatgtgtaaattttatacactgtgtgtggcatgtcctacttggcgcttaatagagccttgtggacagaagtgtaaaatgtgagtttggtaggttttaccgtcaaaaaatcaatttatgtggtgaagtgttccaaatcgtatagttcaagtagttttgccgcatatatctcttatacataaaacctctatctaagaatatacttaaaaccaagtaattaaattatattctaactaggaaactaaatcgtgctttacgcagtgttacccaatttttgtaatctttttatgtatatttttgtgcttattcaatgatataatctaaaatatattgatgtgtgtattataaataaaataatatttttaaaattagaaatataatttgttatttttaaaatatatagaaatatggtaatattatgacaaatatcaaaaattgtggaattaacaaagaaattgcaatgtattttttaaataatataaatgaaaagatatgaatttttcattttaataaactgaatttgtgattgatgatggaattatttttcaaaaactatttaacttatttttcttcaataaaaaaatactttaactagtgtttatgaaagtttttacatttagtatgtggtttcatttgaatgtattctccaccaagataaatgtagtttgatgataattgtaaaatgggttgcaaaatattatctgtttttatcaactaaaaatatgggatttatataaaaatgttagtgacagaattttctatgtgaaatgtttacataaaaagataaattttaataaattatgtagatatgaaatttatattttaaattgtatgagaattgacttacgcctcactcagttttaatattttttaaaattatatatagaaaaattcattgattacgattaaaattttagtatatttttttttaataataatataaattttataacatacttataaatattttttta

SEQ ID NO: 220107 - DNA, 3092 bp, Cannabis indica
tgcggttttttagtatcgcggtgcgggtgcggtttggaaaattagaaaaaccgcatgtgcgggttggtttgaaaaaatggttaaaaaccgcacaacccgcaccgcgaacacccctagtattaacaatccttgcagattgccactagtccacgagatcacactcacagataagatttattagataaatctcacaaatacaaagtaattgacttatacataaatagactccctcttattatatgcctcaagattgttgtattccaccgtctagttgaaacttcaagtgctcgaactcccttcgatcttcttaaagagtgtttgctttctctcgaagcaagacttggaaagttatctatcaaaagcttatagaacctaccattgttgttgttcttcttttgtagacttgattacagactcaaagacaatacaaaacacataaacacaaagaaatgtcttctctacaaaacaaagacactctttcttacatgatatgaataaaatacaaagatgcgaaatagatacaaaatctagctgctataagatatatttataatcaatacacaccttattgataactcatgcacagtctaaacaaaaacataactcataagaaacttccttaaaaaagatattcaatcaacccaatagtttatgtttctatacctacagaattgtgatcagtaagagtgactttccaattaggaaaaggaaagtcccaattcatttttaaatctgatcagaccaattaaaaaactcatataggatcaaattaacacatttagaaaataaaaattgatttattcataaaacttaccatttatgataaaatttttaaatatagaaaatctagtcacttttcatatcttaattcaatcaattaaatacaaatatatggaaataaaaaatacaaatcaactgaaattaaaattaatttatgaaatattttatcaatttaaatatcccaaaatggaattaacaataaaattttatccaggacttaggctccagactcacaattttgaggctcaaaattaaaaattagaatgtatagtatgtaaaaaaaaagtataatatatatacaatagtaatctattattttcattaaaattgagctaacacaagtggtaagcatctagcttatccttgaggaggttattggtttcacattcacttgtgacaatttttttagttcaataaaaaaacttagttttttttttttcagatatagcatataaaaaagatctcattttaattttttcctaagcctttcaccagcttgagacgatcctgattttatcatatttttttaattaaaaataaaggtattgtttgattcagtataatggaatagtaatagtaataattggttatagaaatagtaataggaataatattataatgtttgatttatttttggaatggtaataggaatgagtagtgtattgacaaaaataaaatatatgagttttttaattaagtgtaataaaaaaataatattgggtccacggtgggtataggtctaatccgaacccgatcacatatgaaaaatgcactcgaaccgacccttgcatcatgagcgctgctcggtccaaacggggtttttcacattttcgggttggctggattctagctaaacctgatccaaatgttcaattagtgaatacattgtgtttacccaattttttgaaaaccacataagaaatagattgagcatgaaagaaatgattaaaggtaaagaaaacaaaggtttttatatggttggggtgttagtgagtcttagttaatagtcaaaattattgagctttttggctatggagtatttacacaagtgttcttgccaaatatataatcattgtgtttgaccaaaatttgtaaccatttgcatgaagggtgaaagccttatttataggctgaagtcaggttcacgggtgtacccagactcgctagggtttttactatgaaataagcccactgatggggtaactacattataatattgacattgagtcgagtaggtgaggcccaaattaaagagtttttctgttgttcgtacatattcgtacaacctgatgtagacaagtggccatgcgttgctgatcgtgtatagtgattgttagggttgcggatgttggacaatacgtagtttgctttttgtgttgtgtgcctttcctaggtctggtacaagggacaaacccatgattctgtgggatctaatgttagagggatgccatgtcagatttctcccgaacgttcgatgctctgcaaattcccttcaattattctttcgtgataccctcgaggggtatccatctatgcctcctcggatattcagtgatttggttacgttaaccttccaaattcatttgtccaactttacccgtaacgcagtcttggtcaaatccgaaccccagtctggtttattcttgaacccagttgttcacttatttaggcatgtttaatgggcccgtacgcggatctagaatgttgaaccttacacgtgtcacattcccaaaaatacagattacacattgtaagggattagagcatctccaatcatactctctaaacacactcattggctaagatagggagtgaggtttgaaaaaatgagcttcaaccatacaaaaaatgactctctataatatagaatggatacggagctctctatttgtttgctaaatttttctaatagtattttaatcaaaaatactattattttttattattttattaaattaatttatatttaaaaaattcaatttataaaatattattaaaataatcaaatactaactaaaataagaagcatgattagagcaaaaataataaaaatagctccatattttaatttttcagctattttaattaaaatttggctaaaaaaataaagagtgtggttggagataggggtgggcaagatctaatccaattcaattgaactaaattaatccagtccaatccaattacaaaaaattagatattcaattagattggattggatatgttaaaagttggattccaattgtagaaattacacaaattatggtaatttttgtattgtttacttttttatggcataattaaataatgct

SEQ ID NO: 220108 - DNA, 1177 bp, Cannabis indica
tctagaagtaattagggttaaaaaatagtaacgtaccctgacactcatctagtgtactctgagacccatctaatgtactactaactacattccgtaaaagtaacaaaatcgtatccctaaattagttataattttatgtagttattatcaaaaataaaaataccaacgcctagacaaaagtgaggccccattaaaatttatgtgtatatagatatagtaataaagtagaacataataataataatgcaaaaaaatgagaatatggagggtaggagtggggtggggttgggtgggtttggcatgtaaggaaaaatgtacgtcactttcctattgtaagcctacaccaactggctccaacccattaattagtgtttaagcgggctggggccgccatcactcatacttactcttacacttcacaaaatctattccgtaataaattagataggttttagagtaagttagatgagttttagaatacattataattttttaactttaattatttctagatcaattccaaccctcaaatcaaataaatctcccatctaacaattgccgtatatcacagaatatattccgtaaaaatacaaaatcgtgtccccacatatatatatacactcttattatatatcacctgctttgctttgaacatcaatttcgaggaaccccatatcatcatccaacggttcccattcattataatatataaatatattaatatatataaagatatattaaagtactgctagtctagtagtagtagtctacgtactactacaacatatcatcctccaatgtgttagtatcgctattggtctaattaaatattaggttttacataatttaacataataatttttaagaattatcgctagcaaatcgcaacatgacatatcgagaaagtaggaagcaccactaataattaatagcaatagcaatgctcataacacaactaacacaacacaagacaagacatttttatttattattatatcccacgggtaaaagtaaaccatccttcactactttacatctgcatgcacttttttttttttattttccaatttttttactattataaattaattaattctagtaaagttttttttattaaaaaaaatatatattaattatgttaaagactgtttttgagtttttgacagtgcatgagatc

SEQ ID NO: 220109 - DNA, 1939 bp, Cannabis indica
attttagaacattgtaaaacattctaacatattctagatttgataatgatttttaacaggctttccctgaagactcctcccagatagacatctaggaacgcccttccaaatgacatctaccattccatgatacttattccaaattgacaagttagacttccaaaaactcctttccagaatacatttaacttttcatgatcagaacaacttttgaagatcttttcatttgaatgaactataccaatgtattcacaattgaaaagttaaaattaaaattagtaaggtgatggtctgacaacaactctacagtggttcaagaacctcaaatcacttaagaatctttagttatactattgtcccaatcttacatcataccctgaacgaattcaaacttcaaagcctcaccttttggaactcctgaatattatagattgcccaaatgcaaaagagaagttggtgatgattgggataagatttctcatagacaatatttagttttatgtccggatcccaacatagaagaaaatgaggtagaacatccatgctagttatttgtttttaattcctaattaaactgaagtaaactgtttataatgttctttttgatattgcagaacttgtcgtgacacaaacaaaaagatgaaactttttcaatgtcatgaatacaatacaagtataaaaataaaattattcttacatctcatctaaaaatataaacacaaaagtcaaaggagccaccatagtattaggtattgatatttttcattaatagtacaaaaagttgatattgaaattaaccaaacgctcaaaaatacccttaaaagcaacaaagaatctgattggttgttgaaacatggcacggatagctatcagtgtccaccacatttactcatatctgaccgttcaaactatccatcatcaacggcttaaaatcgttcattcaaaatctcccaattttggcggttccgcattttcaataaatactctctcaaaacccattcaaacaattatctcatctctttcctcaagcttctcaagaacaaaacaaacagacaaacacagcaaagaactaagctttctcaatcaatggctcgtaccaagcagactgctcgcaaatcgaccggaggcaaggccccaaggaagcagctggcaactaaggcagcaaggaagtcggctccagcgacaggaggtgtgaagaagcctcatcggttcaggccaggaactgttgctctgagagagatcagaaagtaccagaagagcactgagcttctcatcaggaagttgcctttccagaggcttgtcagggaaatcgctcaagatttcaagactgatcttcgtttccagagcagcgccgtctccgctcttcaagaggctgccgaggcttacttggtgggtgtttttgaggacactaacctttgtgccattcatgccaagagagtcactatcatgcctaaagatatccagctagctcgaagaatcaggggagagagagcttaagaatgataagacttagaaatgtattgtaaacccttctttttgttttattaggatctaatcttgttctgtttttgtatttattaagaatctaatgaaaatattagttatggctattaagcttcaaatcatttgtttggttaatagctctactcaaacaaacacattttaaacccaattgagcttttctgagactctggcattgattagggtgatgattgagctttcttgtatcagatccaagagtcttacataagtttcttgttttattattgtttagcttcttgaaactttgatctacttggtgtttgagtccaaaaatagtttttgtatgcatcaattcagtcaaatgtagattactcaaactgtttcattgattagtttcattttgttagtaaaacttgttacctaaactgatggggatactcttaccaatattcatttc

SEQ ID NO: 220110 - DNA, 2210 bp, Cannabis indica
atattctgaacttaagcgtgtattttgttaaagtaatgtaatagtattttggtgatattttaaaaagggatccccgaagtcaaaagggttatggcaaaaacatttatgtttcaaattagttagtaagattttaaaaaaaaatcacaatttttacttaaatagctaggttattattataaatataaaagtacatttctaaaaatcaatgttttattctccatatagataagattttttttcttttatttattttttatctattaaaaattcattttataattatcttttagaatgggatttgagattggatccttgaaaaaaaaattaattaattttgtttaattatgggagtaagtaatggacattaaaaaggttggagcatggccatgggtctacattgttaagggaacaacaaaccaactgttcattaagattttgtagtgggaattaacaataatacttataagatatgtatataaattgagttatgttatgtcttctaactaacaaataataaggtctcacaatcacaacttttgtagtacaatgtctattttatctctatgagtgtatgactatgtagtaaatacatgtactttgaccaaatagttgtcttttcaacactgaaattccaaaatctaacatgcaattgttggataaatgtgcccaaaaatgggaaaatatttgcattattctctcttataatattatgcagttgctctatcatttcgtacatgtgtattatatacatggacctactttgttgcatggttttgctttgagagacatgcgtatatatatgtgttacaagtatatacatcacattaatttgatcttaatctatcttttagggcaatttactactcaacccttgtgtttattcaagattgttggttgcttatattaaatgtgaaattaaaattatggaaatctactacaatagggacttttagaatctattttttcaatccaatttataaaaaaagaagttaaagagtgtgataatatttacctaattcgaaattgatatttacacgtaattttttgataaaaaccgtaagtatagaaattgatattacctatgtcgtcggtttggggttgaaaaattttagcatatttatattatatatacttatagcgtcgattgaagggtgttgcctctatcgatttataagtaattaaaaaattataactcaaaattttcttttattaattgtatgattgtgtatatttgtatcctaccagatattacttgtttttagaaaatttagatttaatttattgtgccaaaaacatgaattaaaagttcatttacacacatgttttttttaatataaattatttagaattttactgaaatgggtggaatggaaactatatttatataattttgactagttatatataaagagtattgttatttgatacattaattactgtatctaatattatattaattgattaatagttttttgtattaatgattgaatcaaaatgtgagactcaatattaaaatatactaataatagtatttattctctatagcacttgaaaccttttcttttttagtatagcataatggtattttacaatcagttaatatcttaatagcttcaaggtcctaggttcgaacctatgacctctccctttttcccatccctccactaagctagccttagtggcttatagcacttgaaaccttaagatgctcttttacatttttatataaaaaatttaaattataattatttcttccaataaggaaaatacataaaatgtccaacaaaagtcacacacccctattatagtccatcccataaaattataagacaaaattataaaccccctaaagtattgcagtacttgtttagttttgtctcaatacgttcttttttataattatttacaaagaataataaagaaataataaagaaatacagagaaaatagatagattattgtttacaaagttaaaagtaaataatacaactaataattaaatcttatattaataactaatataaaaattaaaataattaaaaaaaaattaaataaccttaattaattatttaacacttttattacaaacgacccttgataattgtaacctatatatatgctacattttgtaaaaatggttcttttgtttaacaattatgtaataaaaaaaataaattaatacaaagtaaacaagtaatacccagttcagaa

SEQ ID NO: 220111 - DNA, 1085 bp, Cannabis indica
cccatataatttaatataatagcttttagagaatattgctaaccaatcgtaacgcgacatgtcgagaaagtgctaaacaccactgatacctaataggaatgttcttaaaaagatttattaaccgccaaaaactcttaaataataccaaatatggtaataataaagcccataaataaaaccatagtaagcgggctcgggttgacccgacccgttaatagaggaaaaccataatatagggcaacggtttccacagtttcttcctcaactcatagttttcttttgcattatcatcagagctactgaaagccataatctttctgaggaattacagtaatggcaggcagagaagttcgtgaatacaccaatctcagtgacccaaaaggtatttacttttctttttttgctcaattgattcattcattaattgacataatttgattttgtgttttgagaaaattcaatttaatttaatcaattgcagataagaaattggggaaaggtaaagataaggttgatgatgaagatgtaacattccaacgaatggttgccaaggttagcgcattttacctcatctattttcccttttctttcttttcaagttcctatttttattttcaattaatgaaattttgtgtataatttctaatgggcagttgttaaatggtgaaattaattgttgtttatgcatttagaactgttgtggggttgaaaagatagcatttttagatatttcagtaatggaaatttattgaagtattattgttttggtgcatattaagctgtttaagtgggaagctttctcaaaataatgaaattcagtatgtgtttagatgttagatgtggctgttgtttgtgtttaagagttgtgttttttatgattaagaatcattttaacatgttttcagcatcatggtagatcatatggcatctaccataatgctgtttttctaatcagtttttagataagtaatgatgcttagcatcggtttactgagttgttaactcggccacagaagtgacaagagtttataatagcttgttgtgagatcgaattactagtaaatcaagtgcttgttttatcgtat

SEQ ID NO: 220112 - DNA, 2096 bp, Cannabis indica
tttgtgttttcatgttcatctattctcccctgttctcatgctctttcaataattattgtgaaacatcaccctttgcacagattaattccctaattaataatatatcaaatactcaaatgtcaaatatttattaacacttaaatagtatataagtgtggtaataaaacatatactatacatataattagctatgcagtcataaatatcacctaatgatattatgtacatctcttcatcccctaagaaaaaaaaaaaaaaaaactacctgactgactagtgtttgtactcgcatgaaagttacaataaataaagctaaataattaattagagcaacaacacaagtacatgccagccatataaattctgaataattctggcaaaattcaattcatcaagtaatttggttgtcacgaaaaaataaggccacataattactccattaattactatatatgttattttgctaaggctataagtaagtggtccaaacatgttccatttaaacacaaggccataataaataaataataataaaaaaaacagaagatttggaatgaatatattggtattaaattgtttctggaagatttgagtcatttattagaattagtgtcaattcattttcactcttaactgtttctctgtctctcttgctgttgtgatcgttattgtccttccctcctcttttcactccacacaatttctgcctctcctccattaatttcatcaaactgacgtcgtatataatatatatatatatataaagaaaaaagtaataaaagtgacagacaattatagagatatgtcattttctttggctctcttttttcccttaattattttctcctgcttctccttgtctttctatatattttgtccattggcagactggatcagatatctccagaatttagaatttgctgatatattgttcatgtgaaaattattaataaaaaaaattgaagataataaaagtatttgtaaggataaatattgttttttttataacctgtataaatatttaggtttgttgtcaaagtttgaaaaatatatacatatttattgtgaaagtgtacccttgtaatgtagtatatagtagcacttacaaaattgttattagagatcaaacaatatatagactatttgtcactcatataaattaattttagctagtcacaacttattatttatactcacaattaatgagttgtgattttgtgagtaataattttaatttcttagtcacaatttttttatataaattttatagtgactaaaaataatatttattgaactccaactagttaatacatacatatacatacaaaatgcaagatatgatatgaactatgaagtgtttaacgatatgaattgattgaagtttttcgaaaacattgttttttaaaagctagtttttcctaaaagttgttggagatttttacacttagaaatagaagaagtttttggttgtataatattccattaccttcattttcattggtgtcttagagattctaaatcaatttgttcttagtattatcttttagaatattacattcttttttagtaattttataaatttatcagatataacagttaatcacaaagttacgaattataaataaaaggtaggaatactactattccatactaattcattattatctaggcctaacacttttctagcaatttcatgtgctattttattggtattcctttttacataaaaaagaaaatattaggaaaataagataaagaattttagatactaccaataacatttgacaagagagagtagtttgagaaagaagagcaaacttttctctagacttcctgcgaaccaattactcaaaaaaaacatttattttagtgacaaattttaagtcacagtataatttttttgtgattaaatgtgacttttaggcacaacaaaaagctacttatgaccaaaacataatatttagatacaagttgttactataatatatcacaacaagtattgtgactaaaagaatatatagtcacaacaaattgtgatttttgtgactaatacctttaattacggtaccatttacgtcacaacataagaatgttaa

SEQ ID NO: 220113 - DNA, 3815 bp, Cannabis indica
ttttctaggcagaaaattttttttacctcttctttcaatttctttattagaacagccactgtccaacaagttctattccataatacttcatttttgttttgccaaattcaatatactactgctgttgctgcaagagtagcagccaacaccattttctgatttttagaaatttttgctctagccaaccacctaataaaatcctgttatttccttggccttggttctcaatgataaccaagcctttaattcattcaagcacctgtaactatattgacaattaaagaaaaggtactcacaagtttcatcataatcacataccatacatttcgcatctatagagttgttgaatcaccaaaatctagccttcgtcagaagcctctttagaattgccaacctcaaaataaaattatgtttagacacatttaatctgctcttacaacagtatcccaataaacactatcacgttgtgttgctagcattttatattattgaggaatcttgtaaacacatgctgtaagaagctcaaaattggcactagttttaaattgcttcttagttgccgcaattttcctccagtaccaactttcatttgatgggtttttataatttcaccaatctactcttttcaaataaacactatgattccacttaaatcaaagggtatcttattttgtggcaactgcccaaacatatttacgaatggcatatgtgttctatagtgtagttcttctacacccgagcccccttccttttttagtttacacatttcttcccgtgaaacataaccaggacctgcatagtatgctaccctaaccaaaggaaaactctacaaatgcaattaatccatttcaataatttttttccgtaatgacatgatttgagcccagtatgaatgtactgaaatcaggacaaagtaaatcaaaattaacctcccagcgaaagaacgatttcgagagctccatacattaattcttgtagtcatattctcaatcagtatctcactttcaaaacttgtaagtctacgagaagcaatgagaattccaagatacatgaactgtaagtacttttagcaaagccaaaaacatctaaaactctctggatttccctttcttccatcttgcaaaagtagaaggctgacttggcttcacttagttgaaggccacaagttttggagaataagttgagacattgcagcatcaagtatacgggcttgaaatcgtcaagacaaaagagaaacacatcatccgcaaaacaaagatgattacgctctacttcattgtatttaccaagatttttagaaaactaaatatttgaaaactaaaaaaataataaaatgcagaaattaataagatagagatttttacgtggttcaagtgttaattaacgttagtccatgagtaggtctattagcctctaagggcatatttgaagtgtttagattatttttgcaagaaactctaactctgtactctaagtttcttctaaagacaaagagggatattggcagaactttggctatgtaaggtttcgatccccccttcgtatgaaaatagaagggtatatataggctaagtagcaggcatggacatgcccatgacccacctagggattctgctcaaagcccactaacagggtaaatgcatgttgcagctggacaattacggaccatttgtacattgtggacacgtgtcagctaaagggtttaacctttaaaagtaaaggagacgtgtcactcaaaggtgtcacctcaaaaagtaagggtctgatatacctgtctagcaaaaaggtggatgaggtgtgcacactaccatgctcagacataggggataatatctatcctatgtcaaaaaaaaagcataaccgtcactgtgcaactcggtttacaccaaagatagatgcctgcgacacttgtgggcggtcgatatccgcaatagggtcttcgagtacccttctgggtatcaggtaggtaagcttccatgtgtggaccactcgaggtccaggagagacattatgtctttcgtggctgggaagctaggataagccagggtggacttcctcttatccattggtcttaatttattctcggtactgtgaggcttctccacgataggattgtaacaggggattttgattagcgagactatgaggttaatcccttcgttcatatgccatgtgtcacatgctcaaaaatacagatgacatttacccccaagcttttgtgactcttcaaggtttgggagcttaaagttatcattcctctctcggagataaatgcttcacacttggtgattgataggattacgaatgtatcccttgagttgtccccgagtaaaggaccataataagcgtggcacacatgcaacacctttaatgcagttattgacgacacatgtgtgttaggggcacgtttcttggaagatcttgtgatggtgccaagaggattgaaatgacctctcgtttaatatgtatgggactcgaggtgtgtaatgatgaataataaatgccaagagtgagttttaaatgtcatgtttcaacttcccatccatcggataaaagtgtggttttcgaaagaagggatctaggtcgtccaattcaaatcgtgtggatcttggttgaagtataaatggattttccaaatccatttcttcctttttcatcaccttagactttcaaatacccattttcaaaattcagaccagaacttcctttgtaacaacctactatgttaggcgcgttatcgtattttcttaattgttgtgcagtcctttgctacccaaagggtttattgaaaaatgtggatgattaaaattttcatagttaaacaataatcttaaatatatagtaaaattatataatctaggatcgtgtttaaaaagttacataagttagcaatatattaatactacaaaagttgtcatctagtgactatcaaaagtgagcctaaactgtcccaaagaccctgaatgttcctagtctaaatgtcttgatatgtacaatctcacctttagctttaaactcatcatggttcggttctagctcttacttgcacatacacacaataattgtgagtcgacagactcagtaagattagcataataataaacatacacataaactagattataactaggcgcccatacaccaaattacaatcctatcctgcatcccacgcatatactgagtctagaacatttgtacgacaaagcctagcatatatctattgatatctaagtgcaactctatgtacactttaccaatatcctgatatgctaatctaatggctactgatttgcctaacatatatctattggcatctcggtgcaactttatgtacacctcactcataccttgatatattattctaacataaactaacaagcacactaaacatgtatacatatatgcaactattatactaatcttcccttaattctgaatgcaagtgtgctagtaactttgagtgaaaactactgcttgacgatttaaggccttaagtcacaatttacataaaactggtaagtgatccgctaaatcacttttggggacttaaacttgaaactaaaaatttccctatcgagaaatagtgtgacgaaaccctaaatatcgagaaaacactgaaaaatgacatttcgggaaatgtatcctaaaaaacgttaggccatttccataaaaatgggaagctatttttttaaggttttctgcctagaaaaacggtagatcgtttaccaaaaatagtctaccgtattcatagaaaattttcccctaaatctcaaaactaacacaaatcgaaaccaattcaccccaagccttccaga

SEQ ID NO: 220114 - DNA, 2402 bp, Cannabis indica
ccttttatttttgtttttttttatttttgtttttttggatgtttgcacccgatgtttgcctaggaggagctctagataccctatctttggcaggtatccggagggagcctctttccagcagttaggggacccccattctcctttttgtcttaggatttggtttgggggctaactgctggatttctttttcagatgagtgggattcttcacgatcttcatgaccacgattttttcggctttgaccaagagatcttggaacttgacggagtccaggccatgtctgtccccacttcaaccaaagcaaaatcttcagagaaggggcctaagaagctggccactttagaagaattgatgaaaggcctggtggtctatgagaagttcacctgccgatccaatggatgggaggcagatgagctacactcaacccttacatgttcccaccaactggagaagatcgtcactgttgctgggatcaagccttccgctgccagggtttttcattgccttccgagagacgaaggaacccccaaccataactatggcagtttcggggcatggagtcaaacccacttgatgttcggagccatgctaccacttcaagattattttatagactttctagtttttgttggccttgctccttctcgactcattccccatgcctatcgtctgctctgaggcttgtacattttttacgtcgctaggaactaggccctgcccagtccagctgagattttgtatttctatgaactcgtgtccatcccaaaatagggggacaaacttaaggatggtttttacaaactccaggcccaccccgccaatgagagtccggtgccttttgactttcagaagaatataaaagagtatcgtcactgatttttcttctcctcgaatttcaaagttgtcgaacgtccggagttgctcactgaatgggtcaggatttcgcccatgcatcttaccgcccctacccaactcttcctaaaccacgctaaagttttttctagttataataaggatgagttgaaagtgggggatctggtcacgactactaactgcaggagggccaagttgattttgaaaagccagtcggtggatgacttcaacttgtccaaggttctttaccctcacatctgaaaccccgaaatggagaagccgctccgagaggacatcatctcttctgtagaagaaaaatacaaaaagtataaattcaagaaggaataggagctggcctatatcaatgctcaagctacctctgggaggatcctccggaaggaggctggaaaggaacaagtccctactcgccctaagtttcctttcccgatccccaactttggggcttctgatgccagcacttctggtgcttgtaagtctccactgattattcatcacgtccctcttgtacaagattatggtggcctaaggtcagttgaatttgacagtcagttgcataggtttcggatgccccattcacgatggggttataatgctaaaagtttttatttttccaaccttagtcatttcttggtgggtcccggatggattctggtcctctcgtactaatcctcttggaccattgttcttagctgacttcaagttggttcctcccctcggatagctttctaggggatgaggacacgagtcttttaatatatacctttgctagggtagaattaaatcacaagggtaggactagttcattatgttactcttgcatgcatggttttctgacaatgttctgactcctttatttatctttaaatagcgaagccaatggatgacctcctagatgcccttgtctgcacacacagtcctgaagctggcctgatcgagccacgtagtgtggtggtgactccgagaagaccttctgttgaacttgataaccaagttgtcttgatagacgaggaagaagaagaagaagaagaagaagaagaagaaggggaaatcatccctccccttgaccgtaagcgcaaaggcaagataatggagacagagcctgccaagaaactgagcagggtggatactcctgctcccaacgctgactcgggaattccttcagaggtggatgagtatcctgcgcctccaggtattatcttgactcccgttcatcctgacgaggaaagggttcagctctgaatcgccaaatacaaatacgcattgggggaacattccaaggggaatgcagatgcggaggccctcaataaatggctaagggatatcgaggatgggtcttttcgaggtgagtatcccgaagacgtttgagatttgaatttggatcctttgatggactggtttaagcacttcatggggcctaacctagctccttttgcttcggaaatgatgagccattttcccgccgacctgactcaacttcccatgaagagatatgcgacctacacttctac

SEQ ID NO: 220115 - DNA, 2223 bp, Cannabis indica
tttccattgtctgagactattttgtgaggcaagtcttatcgacacacaatgttttttacaacaaagtctaaggccttcttagcgattatggccttcatgggctcagcccatatccactttgtgaagtaatccacagccactatggcatactttaccccctccctttcctattggcaaggatccaatgagatctatcacccacaccacgaaagggccaggggctagtcatcaaggtaatttttttagatggggctctcggtatgtttgcaaacccttgtcatgaatcacattttaggacatagtctacacaatccttcttcattgttggccaaaaataaccttgtctcaatattttctttgagagatttggacctctggtatggtctccacagaacccttcatggacctcctacatgatccgtctagcttcagggtctaacacacaccttaaatatggcatgctgagccttcttcgataaaggaggttgtctatcattatgtatcgatgcgcctgatactgtaacctcctggatagagttctttctttaggcaattctccttgtgttatgtatttgatgatggggtccatccaactcggctcttgctcattactagctaccgtttcttttgttttgatgcttcactccgcgaggtgttcgacaggtactaacccaccctctctatttttctatccaaggttaacttagccaaacagtctgcctgagcattcttttctcgtgggattctttccactttgtattttgtaaactcgtggagcagttgtctgaatattgctacataagcagccattttttcttcacgtgtttggtactctcccgatacctggttgaccactaactgagaatcactaaaaacttataccctcgcggcccctacagcttttggccagccttagtcttggaattagtgctacgtattcggcctcattattggaggctgggaatgcaaagcatagggcatcctagagccaaagcccatctggtgatatcattgttattctggcactggatgcactttcatttgatgccctgtcgacatacactttccacgttggcatcttttcggctggcatactagagctggcttctgcttcatttcattctgttatgaagtctgccagggcatgtccttttatggagacgcgcgggcatagtgtatattgaactggcttaactctatggcccacttaaagagtcttcctgaggcttcaagtttttgtaagacttgccgaagtgggtgatttgtaagtactttaatgggatgggcctggaagtagggtcttagcttccttgaagccatcaggaggcaaaaggctaatttcttgatcaagggatatcgagttttggcccctatcatgcgcttactgacatagtataccaggcgttggactttgtctttttcccagaccaagggcgcactgacaacgttttcagagacggccaagtacagaaacaagtcttctccgtgaactggttttgacagtattggcggcttggccatgtgttcttttaattttttgaatgcctctttacactcttcagtccactcaaatctttgaaactttttcataacattgatgaatgggatgcacttgtcggtcgatcgggacatgaatcgacttagggcggctaccttctcggtaaagctttgtacatccttttgtttctttggagaaggcatattcaacaaggcctggatttttttaggttttatctctattccgcgttgacaaatgataaatcctagaaatttccctaattgacgtcgaagatgcacttcttgggattaagcttcatcccgtatcttcggagcactttgaagcactccgtgaggtcatctagatggcccatgcctgttttggatttaactagcatgtcatctacgtatacctccgtattatttccgaggaggcctttaaacattcggttaaccatttattgataagttgtgctgacgttctttaatccgaacagcatgaccaggtaacagtatacccccttatcggtcctgaagctagtacattcctaattcgcgacatgcatttcaatctgattgtactcggagtaggcatccattaaggatagcagcttaaaaccctaagatggcgtccaccatttgataaattcgaggcaatgggaagcagtctttctggcagggcttattaagatgagtgaagtctacgcagactgttgggttttatgc

SEQ ID NO: 220116 - DNA, 4746 bp, Cannabis indica
acattagttgggttctcgggggagagcgctatcgcccgaagcttcgtccaattgccttttgacgcaaatggagtaaacaagtcagttaaattcttgattgtggactgtccctcggcctataatgccatcctcggccggccgttgatccatgcaatgaaggcggttgcgtcgtcttaccatcaattgatcaagttcccctataaatgcgaagtaagggaaatatgaggggatcagttaggagcctgcaagtgctacacctctttgaggagcaaaaacaagttatagtaattaatttactcctcgacaccagcaaaaaagcagccacccacagttgaggagttacgagaggtacctatacacccgacggacccgaccaagacaacctacattggcatggggcttacggaggactggaggagcaaggttgtaagtttgttgaaggaatacttccaagtgtttccatgtgaacatttagcatgcccgggatagacccaaccataattactcacaaactaaatgtgaacttgaactatattccggttaaacagaagaggaggaagatgggagcagatcgaaacaaagcggtgaacgacgaagtcacgaaaatcctgaaaaacgataccattgaagaggtacaatatcctacttggctcgccaatccagtagtagttctgaaaaagaatggaaagtggagagtgtgtatagatttcaccgacctaaataaagcttgcccaaaagacaattttccattaccccacatcgacatgataatcgacgcaaccgcagggcataagttgatgagatttatggatgctttctcaggctacaacaaataatgatgcatcctcccgagagagataagacatcattcatcattgagaggggaacatactgttataagttaatgcccttcgggctcaaaaatgccggagcaacgtaccaacggatggtgaataaaatgttctctcagtagctaggtctgaccatggaagcctacattgatgacatgttggtaaagtctaaagacgggtctgaccacgttgatcacctccaataatgcttccagatcctccttgctcactcgatgaagctcaacccgactaagtgcgcttttgctgttgggtcaggaaagtttttaggccacttagtgacacggcgaggcgtagaagtaaatccaaatcaaagagaagctttccaagcgacaagacaaccccagactgtgaaggacatacagaagctaactgggaaaatagctgcactaagccgctttatttcaaagctctttgattaaagcctgccattttatgacctactgaggggaaaccgaaagttcaagtgggatgagaaatgccaactggccttggaagcattaaaaaggtacctgacgacgctccccgtcctatcaaagcctgagacaggggaaaccctgctccttcacctctccttgtccaagtatgctgccagctcagtactgatacgagaacaaggaaaggcacaactgccgatttactacaccagcaaaaccttcttcggagcagaaggtagatacccggtaatcgaaaaattagcttgggccctagtcatatcggcaagaaaactccgaccgtacttttagtgctatacgatctcggtaatgacgttgttcccattaaagcgggtcttgcataaacttgagatatctgggaggctaatgaaatgggaagtagagctgagcgaatttgatatacaataccttccacagactacgatcaagggacaagcgctggcggatttcctagtcgagatagctccggaaccaattccttacgagaaaaagcccgtcgaaagggactggttgctgaaggtagacgggtcttcaaacgtcagggggagcggggtaggaatagtactattatcaccagacagagaaatgatggagcaatcaataagattatgattccgagccaccaataacgacgatgaatatgaggccttaattcatggaatgaaattggttaaggagatgagggccgaacagggtattagttcagtcagattcccaattaatagttcagcaggtctaaggggatttcgaggccaaagagccaaaaatgatcagttatctggccgaggtaaagaaattagcgtcaacccttgagtatttccagattaaccagattcctcgagaagcaaacatgcacgctgatgccctggcaggcctaggatcctcttcccccctccacatcacaagaaaaataccgttcgactttgtcccggagcccagcatcacgacggaagaagaggttcaatgcactgaagttctggcggaggcactagaagactggaggcagccgattctagaatacttaagggatgataaattgccgtggaaccctaaacaggcgaggaaagtcgtgatgagagcctcaaggtatgtgttgctacagaatcagctgtataagagatcctaccatgggccatacctaaaatgcgtgaagaggcaagaaggaaagctaattctaacagagcttcatgaaggagaatgcgacagccattccgggggatgagtaacctcccaaagagtccaaaggcaagggtattattggccgaaaatccgggaagattcgacagaccactccaagaaatgtgaaaaatgtcagaaacacgccccctccattctagcccctccaatagagctaaccgccgtccaaagtccatggccatttatgaagtggggaatggatatagtaggccccctatcaacggcgcccgcctaaaagaagttcatgctagccctcacggactacttctcaaagtggatcgaagctgactccttcgcccaagtcagggacagagaagtggaaaggtttgtctggaggaatataatctgcaggtttgggttaccccaggagatcctggcagataatggatctcaattcattagccacaagttcaggaacttctgcgagcagtggaaaattaagcttgtgttctcaatgccacactatccgcaaagcaatggacaagcagagtcatcaaacaaagtcatcataaataacataaagaagctgcttgaaaaagctaaagggagatgggcccaagaattgcctggagtactgtgggtcaactgaacaacgccacgccctagcacaggtgaaaccccgtattcgctagtatatggaatggaagcagctatcccgacggagatacaagtacccactttgcgagtcgagttaaactgcgaggaaaacgcttctcttttgctacaagcagccgacgatgtagaagagagaagagaatgtgccttatctcggatgcagaaccattattccgcagtggcaaggcagtataataagaagctcataaattttctcccaagggagttggttctcaggaaagtcttccagaacatcgaggagtcctgagcgggaaaattttccaccaccataccgcgtggtgggctcgatgggaaaaggagcttacaagctggctactatggatggagccgagatatcgagaagctggaatgcaaggcatcttaaaaagttctgtgtataaaaactataactatgactacaaccttaactacaattgtagctatgccttgtcatcatgtatataaaaaaaaaagggaaggttggattataaataatgggatgaaaagtttcagtcctgaccatgcatatctaagacctttcacgaaaggcaagctatgaaagaataaatgagccgcattcacgaatataagatggcaatcagtgactaaagcatgattagaaaatgagtcgcttccacggagtaagaagacaccaaagtaagagttcacacgaacttgaaatttacatggaaatgcttaataaagtcaggagaaaaagcataaaaacccattggtaatggtaaaaactaattacatttacaaaaagccactcccctcttacaacatattcgaagtttttgaaagagtgtacactctattgaaaaactgggggagtagtggctgggaaaaacatcatgcacgggcaaagatacccataccaaaacacttatgcaaacttacaaaaaatgcaagtactaaacacacaaaaaataaaattaaaacaaataagccctctacatagaaaaactttcccgttgctgaaaggctctttgctttggaatccaccctcggcggttggaagaggtaggaggacgtataatctcagaaaccactcggggtgactcctaaggaaaggaagaagcagatatgcaaaaaacagacggcgaatcgtcagttaagacagagttcttcaaggttctcagattggccagtagcttcaagctctagataataagctgctgtcgtttgagtcaaactcccctctgacacctcgggaccttatttaacctcctccataggtgccaaaataggaggaaaaatggcaaaaggacacaatgccaagggtggcgcaggtttgacacgagaagaggcatgtccctaagcctaaagcagcttgctcaaaacaaggacagctacagacctctgagaagtgtaatgggggaacagggattggttcgaaatcgcaaaagcttgaaaagggattcagaggaagaaaataagggtctagagactgcaagcctgagaaaatgttagaaaaggaagagtggtcttttgtgtgatgtatctggtcttttgacaaaatggccatagttcgaaaggaagaacagagtaccctaggaagaaactgtttaaacacaagaaagtctctgaagaattttagaaagaaatgg

SEQ ID NO: 220117 - DNA, 1456 bp, Cannabis indica
catctcttgactttgtatgaaaatttttacccctttgttatcccaatttttatcctcctaacgtggcatgcttacatggacaaaatcagtgccacgtggcggcacaactcaccaataagagggccaagttagcacctaagcaaagcagagactccatcactcaaatgggcatcaagtgatagaccagctccctcacacgagctggtcggccacccctggctagccccatggccgtgcagccttgggactgcaccatgaccggttagactgtcccccataaggacctgactgaccaggaggtgttctacaaggtttcctctgtacttttacatgtggacaacatcttctaagctacaaattgggccctaaaagcccaaatgaatagctaaataatatccagattcaatggtattttggtcttttgtaattaactaatataatatacaaatatctagggtttcaagttgtaatttagggtttaggcctcctatataaaggccttaactctaacccagaaaacctaagatgaatctaagcctgaaacctacctccaagctctaagcttaagtctgaaaacttctctcttcttcacttcctctctcacacgcccatacaagcattatctcaacacttgaggtttgcaattcttaatttatacattgtattcctaagggtgctacaacagatcccatctatagtaatctgggtagtattaaccctcggtatttatacaactaaaaggatagtaggtcattacctgcaatcacaagggggcgaacctctataacaaatctatgtgtttattactttttcattcttatttgtgcaacacctggtaagcatcagatctatatgaccccgatgttggttgatcacttttgaggtcaaaagtttggtactttcattgagagcgtggctatcgtatctgatcaagcgccatggtgaacacaagaagaacccctattgcaccatcgacatcttcgagtcaacctcaagacccacagactgaatgtccagatactcaggttccaattacaactagaatccccatgaacactgcagatgtggtgaatcctgtcaccacaacaggtgccaccagtctggccactacagctggccaaactgatataggcatctcggtggatccaagtggaaggcctgtgccttcaagagaagacccaccattggtgcatcctactgaaggaaggacccaagggcgacaacccccctggaataacaattggatctcgtctctagttctacgctggagagacaggcccgggagttggcgagctattgtggtattttcaacacataagtatacgtgttgtttacaagtatactggtaaactttgccaataccctggaaaggacatgatacttatccaaggtgtaagtatgctagaattattttaccatgatctagatttactaacaagtatgtttcattaacatc

SEQ ID NO: 220118 - DNA, 8078 bp, Cannabis indica
gggcttggcaatgagtacgattcagcaatcgtcacccttacctccaaagaatctgttacaatgcaagaagtccaattcttgctgcaaactcaagaaatgcggattgaacaacaatcctctgttgctgctttggatcttcaaaatccttctgctcattatgtagcagcaaacaagaaaggtcctacacctcctcccacaaattccaacagtcgtggtcgtggcacacatcgtggtaggggaggtcgtaactcgaacaatcgagggggaaatagacctatttgtcaagtgtgtggtcgatcgggacacacagctttaaaatgttaccataggttcgatctcagttatcaaggggaaggtaactcgaaccaaaaccagaatgaacaatctgcagaagaaccacaggccatgcttgccactgccgctactgttgctgatccccaatggtacttagacagtggagcttctcaccatgttgtgtctgatggtactgctctcactaacacagtcgactataaaggcaaaagaaagctcactgtaggtaatggacaatctcttcctattcttgctattggccaaacttatcttccatgtaataaacctcttctcttaaaacaggttttacatgtgcctggtatacataaaaatctgataagcatttctcaattatccattgataataatgtctcaattatctttgatactaacatttgttttgttgttgataagataatgaggaaggtccttctgtagggtacccttagccatggcctatacaaaatatccacaccttttgctagcactactgccgcatctctactccagaatcttgccactacaccccagccaaatgtcaattctattactgtaaacaataaggctgattgtaatctttcctctatttctaatggttgtaaagattccaagtgcattgtatctctttggcacaataggttaggacatccgtcctctgtaatactttctaaagttttacattctatgaatacaaagttctctaataaagctttgcctttttgtgatgcttgccaatttggtaaaaatcatcttatgcacttcagtagctccacaattaaaaccagtaagccattgcaattaattcattccgatgtttggggtccttccccatatcccacagctgaaggatacaaatactagatcctatttgtagatgatttcatcaaatacagttggatatacccaatgaaagccaaaaccgatgcctaccctattttccaaactttcaaaacatttgttgaaaatcaatttgatcacaaaataaaaggcttacaaaccgactggggtggggagtataggaaattacagccgtttctacaaaaattaggcattctctttaggcatccatgtcctcacactcaccaacaacaaggtagagtggaaaggaaacatagacatgtaactgaaatggggttaaccttgcttgctcaagccaaaatgcctctgcatttttggtgggatgcttttgtctcggctgtgtaccttgtcaacagacttcccaccattgacaatgcctataaatcaccctttgaatgtctataccatagccagcccgattacacctttctaaagacttttggttgtgcatgctttccttttcttaggccatacaatcagcataagtttcaattcaagacttccaaatgtgtgtttcttggatacagcccttttcataaagggtataggtgccttcattcctcaggaaggatatacatagcacgcagtgtcaattttaatgaacatgagtttccttataattctctttttcccaaacccataactggaaattaccataataatctccttgcaccagcctttgtaataccatctattattccccaatctcccatacagtttggctccataaatacaaatccacccgatcttgctccctcttccccaaaccagatacacaccactgcccctataaccacttccccagatcccaattcatctcatataactagtacagactccaccacatatcaacaaaatgatcctgacattgttataccagcagttcacatacctccttctttagcacctttaccaactggccatcccatgcaaacacgatctaaatcaggtattcgaaagccaaaagtgtttctggtcacggcttctcagcaacaagtatatgaggaaccaaaaacagtcaagcaggcacttagcattcctcactggaagaatgcaatggacagagaaaaaattgcattgattaaaaagaggacttggatcatggtaccttgcacttcagacatgaatgtactcacaaacaaatggatattcaggaccaagtacaataaggatggcagtctagataaattcaaggctcggctagtggtgagaggttttgagcaagctcctggtttggactttcacaatacctttagtccagtcattaaagcttccacaattcgggtcattttctctttggccgtgacatatgggtgggatattcaacaaatagatgttaacaatgcatttctaaatggggaactaaaagagaaggttttcgtggagcaaccacaaggatatgaagatcccacaagacccgattatgtgtgccaattaaccaagtctctatatggtctcaagcaagcaccaagagcttggttcgacactctaaaaagcactttaattacttggggattctctgcttctatgtcagattcttctctattctataacaacaaccaaggctctctattaatggtcttagtctatgtggatgacctgttaataacaggtgcaagtactgctgcaatctcatctctaataacaactcttcatcaaaaatttgccttaaaatcgttgggttcagttagttattttcttggttttgaagcctacagaaatgaatcaggattatatctaactcagtccaaatatgcctctgatcttctcctcaaaactcaatttgaagatgcaaaggaatgtgacaccccaatgattttagcaaataaattgtcaattgatgacagccccctctttgacaaaccagaaatatatcgaagcaccatcggtgccttgcaatatctaactatgacaagacccgatcttgcttactccgtcaacaagtttagtcaatacttaaaggcacctacaaccaatcattggaatgcttgtaaacgggtcttgagatacattaaaggcaccacacactttggtcttcatttcaaaccttctactttactcagtttagaggcctattcagatgccgattggacatctagtcttgatgacagaaaatcaacaactgggttctgcttattccttggaggtaatctaatcacctggtgttcaagaaaacaaagagctgttgcccgctccagtacggaatcggagtatcgggctttagcttctgcagcaacagagatggtttggttgagttctttactcaaagaacttagtgtcgcactacaaaagacattacctattttatggtgtgataaccaaagtgctcaagcattagcactcaatcatgtttttcacacaagaaccaaacatatcgagttggatgtccactacatccgagagcaaatagcagacaaaaagattgaagtatgttatatacccacaactgatcagacaactgacttgtttactaagcctttgtcctctcctagatttcaatacttatgtgacaagctaaatttggccacaaccaaacatagcttgagggggggtattaggacagttagttaaatactgttgagggtagttaattctgttacaccagctgggtctttaggtggagttgcatctccttacagctggccttagtaacagaattctgttacttgctttgtactctcttgtacatatatatattacattttagagcctctgatattcaatcaagctcattgtttcactttcttcatctcaactgacagagtacacctaaaaaaatactaacataaattattaaacactaagttttttctttttcaagtcattaaacactaattcaataaataacatactggcttatttttgttttgtctatggcttagtaaaaagaatggaatactccgcataattctctcaactagatagggttcagttcaaattctaaaagtgaatagttcttatcaaaagcccaatataaggttaaccaattaattggcattaaaaacaataacatttcaatagtggcaatttggtacccagaaaaaggaatggcaagaaagtactcgttgatgttaatggaaataaacaactaaaactaaaaaaaaataacacatatcaaacgatccaaaccttcaaccaatcgaaattgtgtgggcattggcttggctgtgccccacgtgataaacacaacctacacaggctgagccgagtccatttcttatttccatgtacaagaaccagaacgtagtcaaagattaaacagaaagaagcaaagagtgagtagttacatgatccaacattccttgatccatggaccttcccaaatttacataatacaaactaaaggtttccatatatgactgtttttataccgatcacgaaatatgtcttaatctatctaactaccaaattcgagttgtttagcatcatctatctatacagtcttctggctaaaactacaagccccctatctagaagacaacacactgaattcttcagagtccggatatgggtgactctctctcctgaatggattaaggaaaaactgcaaataaaaaatacaaaaagaaaaattatgaggaatagttacactagctgtctccttgatcaaatactacaaaatgtaaattccttaacaaaaatttacatactacacacattcccttggtactctacaccaagtaaaaaacttcaactaaaaagtcatattaattgcataaaactcaaactttgaacctcaactttcgtaaagaccgataaaactactactataataaaaatgtactttacaaaaagaaaagcaccatacaaggattgaaactaaataacaatacaaaactacataaatatcatttaaacttcttgttgcattgtagtaacacaaacttcacaatatctataaattgcaaagtttaccttttttattaccttactcaacgttgtgagactggtcatgctcgataaagtccagtgcccgatctttggaggcaactttaacaaagctcaccctgttttgatgtgtgacataatatattttgtctgaaactttgacaagctccggtcggaatgttgtggttatgaattgagtatttgcaatatccgccaagcgacgaatcatatctacaaggaagtagtaaggaactcgtagagcccaatggatttcaagatcacaagaagggatggaacagataaagagtgcaacagttcacaaagtaattagtttaagatctaagtataactttgtcttgtatggaaaaacaaataataattaaataaacaaacaaacaagtacaataatataggatacttcctacagcagtcctgtactgaggatccaaagcggcatctatctcgtcaaaaagatagaatggagctggatcgcatcgctggatggcaaagataagtgtaagtgcaacaacagttttctgacccccagatagttgcttcatggactgagtttctccttgcccggtaaaagaaacctaaaaaacaaaccaatcatgagcgaataagttttactgtcaacaaactcatattggcaaatagataacatatatatttagttggaaaaatttactgaattagcttctacttcgttaactatacaacagaaaattttacgttattagttcctacttcgttcaccaacaaatactataacagaagatggatggatagctcctgctctaattttctggttccccactattgtaggattagatgaggagtactttcaaagaaaatatatattactataggaaagtacagttgatctcttgaattgttacataagatcaataaagtgagaccaaatatgttagttttcttttcacaatagaaataaatgcttaggtgaggataacacatgccttaactttcacaccaatgtatttctcaaccctaccctccacatctgcttcacgaggtccatcttcatcatcatcatcaccatggtcaccgtcctgtaaatgtaaacgaataaaagtaagaaaaaagatattagaccaactttcttaacctgtattgctagacaagaagcaactgatagatgctgactagccacaaaaatcattcaaccaacaaaaacatatgctaaccatatataagagataattaaaccacccgacacagacagaactttatcaatcttctttctgcttttatcttttcctcgttttattgagtgataaaggagaattctagtgaagttattaattaggtacaacatttagggacaggatgaataaacagacagaatacagagaatagatccactcccgcaccaaattcaaaaacaaataaactttcgaagcattatcaacattattgccaaaccccaacgagtaaatacaaagataggttatcttcagcaatataatgacccacctttttcttcatcatgactaggtggccatgcccaccttgtactagctcagaaaaaacttctctgaagtgcctggcaacacctttgaaagtacgttctattgactcgtcctttctctgatctagaacagatataagctctctaattttctgcagaatttgaaacacagtacttgagctaccaaaatttttcaagcataaaatatgaaataatatttatataacaataagcatcctgtgagaagatacttcaatgaagtactaatggcctacctcttcaccggcctccagttcagcttgccttttctggagttcttctcgttgttctgtgaaattaacatactgatcaagtgcctttttgttgacatgactgaattgctgcaattgctcagtgcacttatgcaacattttattcagttctttaatgttcctccgcttatacctagcaattccattagaaagataatcccattagattgtctacaatgacaaaaatgaaaaaatcgcaataacattattccatataaaaatgaaaatggagagacttctataggttttcttttctctaaatgtttcaatccattttcttataaatactttaatcaattacgatataaggagtttaatggtgttaagtgttaacatacttctcttgttttattatctgcttttgattattaattaattttcgtgacatgatcgaacctttttttttgcactggaactaataaaatagaattacatatccaaatacgaatatacaatttattagttctacacaataaaataaaacaaataaataatactataaaatagtatataaatacgtgaatgtgtgtgtgtgagattaattagttacgttaaagatcaaaaagtcatacgtttcaaaagcatctgatgacaatggaccaagctccctgatttttcttgagaactcttcttgtttagcaaggaacatgtttcttttacttaacagctgttctaactctttagcttcatcctgaagtgttctctcgtagttgtcttctaaactctgcattcacaaacaatcattaaagcaccaacaacaaaacacacagccaccactccagccacacaaaaaaactacctttagcttggtcttctcatctttgatcttcttaagttgctttgttctatcccctatacttgcacatactcctgagaaacatagtttttggccaataacagaagcaaacattaaacctttattccagctggaaatcatggacaaagaatatatcatggctctcacttttaagttgctctgttgcatcctgaactgctgatctagcatcatgaagttcttgcctcttattttcaacttctccttgcaaattgtcagtttctgcagaagatactatgacctccaattcttgctttcgcctcttgaggttggttgttaaattagtctcaagctcagatttccttgattcagtctatcagttgccaatatatgcatgtatgagatcacattacatgaaaaaaaatctaatataatccccaac

SEQ ID NO: 220119 - DNA, 6099 bp, Cannabis indica
caacagagaaaatggtagaaggaatttcttctatccatatacaatcattatccaactgtaaagcttgttttgccaggccgtgagcggcttggttagcatcccgtctaacatgagatatacaagcattagagaaagaggataaatgataagaaatatcttcaactaaatcatgaaagctagagagttgtgactgtttgccttgaagagcatgaactaacatcaaacaatcagtttccacacagtgaggctgtagctgcaattgtttagcccattgaagaccccaaaacatagctttggcttccatttcttgcgatttaaaattgccaacaacaggcttggacatagctgctataactcgaccagtggaatcccgtataatcacaccaatacctattttattcctcgaagaatcaagtgttgcatcgacattcatttttagatttgattcagtaggaggaacccatttcacagttcttgcatcagctgccacacacgaaactgctggtgcagtagcagatttcacagagtgaaaattagcaagataagcttcagcttgtgatgaaatagccattggatgcttgagttgtttgccatgaatataattatttctatccgaccaaataaaccacatagtgcaaaatagtttttccagttcagatttggttagaattgtggatagaaacagtaggtagtcaccatctttcatgaaaccagccttcgtaaaatcaagttgaaaactggtatgctgccaaacagatttggcatgacagcaggaaaataatgcatgtccaatagattcccatgctcttgaacaaagtgagcaggtggctgaggtaatcactttcctgtgaaaaagattttgtgccactggtaaggcagaattgatcactctccagccaaaaattctcaccttagatgggagatttaatccccaaaacagctgccaccatgcctcctgcgatgtagaactggaagagttgtctttggtttccaatgagcaggctaaattatacccggatttaactgtgtaatccccagaggaatcatagtgccatctccatcgatcacatgtggaattataagacaaaggaatggttaaaattctatcaatatccgctggagagaaatcattgtgaagcaactccaaatcccattcccgagtgtccgtaatgtagtctgctaccaaattactacagctgcctgtgaaacgcagaggcttaaaatattcattgcctggaatccatgaatcttgagcacaattcacaccaataccatctccaattttaatgattaaacctttgcttaacagctccctgccccaaacgattccctgccatgtcaaggatgataaaccagaaacttttgctgccataaaatcattttgatgataatatcgaccctttaagacacgactgagcaaagaatttggagtttgaaaaatccgccaagcttgtttggctagaaaagcttggttaaaatgtacaaatgatcgaaatcctaagccaccatctcgtttagaagtacaaagagacttccaattcttccaatgtatctttttattatccgttgaagatccccaccaaaatcttgccatcatagtttcgatttgcttacaaaacttagcggacaaacgaaaacaactcatagcatatgttggaatcgcttgtaccacagcttttaaaagcacttcttttccgccaatggagaaaatcttatcactccaagcatgcattaatttccaaattctttccttaatgttattgaagagttgggatttatctcgttcactgtaagctgggagtcccaagtaagattcatgacaagcacagatcggcatccctaaaatttgttgaaaggaaagcttaacagcttcaggagtgttaggcgagaaggacataaccgacttgtcagtgtttaaaagttgtccagatgcacggtgatatacatccaaagcacgcttaatggagccacaagatctatcattggcttgacagaataagagactatcatcagcgaacaaaagatgtgtaatggatggtgaatgtcgagaaacagccaggccttgaagtctaccaatctgttcctcatgttgcaacagtcgcgaaagcccttcagaacaaatgagaaatagatatggggagagtggatcaccctgacgcaacccacgctgaggtattactgaacccgagacttctccattgattaggaaagaaaaagagtttgtatgtaagcatgtcatgatgagagaaatccatttaataccaaaacccatcttccccataactgcagcaagaaaagaccattccaccctatcgaacgccttactcatgtcaagtttgagagcagcaaaccccttagagccacgagttctgtgcttcaagctatgtaccatctcaaaagccacaagaatattatccgtaatcaagcgatttgaaaggaatgcactctgtgtttcagaaataacagaatgtaaaacttctttaaatcgcaaggctagcatcttagagattattttgtatgtaacattgcagagactaattggacggaaatccttcatggtcttaggctttttgatcttaggaatcaaagtgataagagtcttgttgaaagattcaggattggttccattattcaagacatcaagagccacctgagtcactaattccccaacaatattccaattgtgatgataaaacatagctgacatcccatctaaacctggacttttatctgatccgatagtcttcaatgctgtaagaacttccgaggctgtaaaatcttgagacaagaaatcattctgttcatccgaaattgttgttggtatggttgatagaacatgagataaagcccagtgatcttcattggaagctgtaaaaagttcttgaaaataatcagccaccactcttgaaatgccttcttttgttgtaactgtatttccatggtcatccgtaagtgccttaattctgttattcgaatgtctagctgaggctttggaatgaaaaaacttggtattacgatctcccgattgaagccaatcaacccgtgaacgttgttgccaatattgctcttcattagccaacaattcatccaatatagattcagccgaatgaacttttgcagagaaatcagggtctgaacttgcagatgtattcaacccgtgaacagttttttgagcaagtttgatgtcttgtttcatctttccaaacttcctataatgccaatcatgaaggttatcagcacaaacacgtaaagatgacactaaacgagaagctgggtctgtttctgatgaatgcagccacaagttagagataatttcagaacactctttatccttcaaccaaaactgttcaaaacgaaagcgtgttttccttggagcttcagcaggtagtgtcgaattgaagtctatttcagccaataaaactctatgatcagatccataataatctaaatgtgacaattttgggctaacaaaattatctctccatacatgattaatgaagcaccaatctaatctctcctttaaactagatgcactttttcgatttctagcccatgtaaattcatcaccagcagcagggatttcagtaaaaaagcattggtccaaagttgtacgaaaggcttgcatttgattatcatctcttaaaggaccaccatttttatgttcatttgagaaaatttcatttatatcccctattaatagccacgggtctagaggagagacatcagccaatctccttattaatttccaagtatgcttcttattgacagcttcaggaaaaccataaagagcagaaaaatgccaacgaggaccatcatcaaacaagatatagcaatcgaaatgatttgtattcattgataaaagtgttacatcaacaacatcttgccataataacataagaccccccttcaaacctacccgagcaacttttaagccattactaaaatttaaaagattcttaaaacgagaaagagcaccatcacacaatttagtttccataagaaacaacacctgaggagattgctcacgaataagcaatcgaagacgacgaaatgcactcgagctccccaaaccccgtgcattccaacttaagagtttcatgatgaggagcgggattgcgaagcaatcaccgctgcattgtcattttctccatcagaatctgagctttctgtcgaaactgtaggaagaggatgcaccccaactgacaaggctgagggatcagtcacttggtttccacggcatcgtttaagtgtttgtcttaatgagattggatcaaattgccttttgaattggcggttgggattcaggttctcttgatccatatcaacaaaagggtctggtatagaatgtgaagctgtaaatggtggtgttattgaaggagacatagagggatatttatgggaaaaaggcataggcagtgtaatggcaggttttaattgtggtgattaatggttagtgttgataatgggaggataagtagcatgtatgggatcaagcagtggtgatgtaaagtgcgaaaaagaggaatggccaacatctggtgtatacacatcagataaatgagttgctgttatggtagaagtagaatgtggttttgaagttgcataggatgtatggggaaacaattggtcagatggaaagttgttaatgtcgtgtttaggtggtatgagggtggattgagtgagaaaaccaggggaaaaaggatgtggtacttcggaggaagtgatggctgtattggtagaaggtagaacccgagtagaattagtaaccatattcccagtatttgacgattcaccaattaacaagggtcgtggatgtgcagcaggcctgtgttgcaattgtggaattgaagcagttaaagaagttcttgctagacgagtgagaagtggccatgcatttcccttagagaaatccgatctatagcgatcatatgatgaagaaggcagggcagaaccaatcaacgtaggtccatatggaagttcaggatcgacaccgttgtctagttgctcaagaaacacaggacatttctgatacaaatggccaattaaaccacactccatacaatattcgggaagacgttcataccgaaactcaacccagaactcatccttcacacgaggcaaagtaatcatcttgcctctaagcaaaggcttagtgatatccaatcgaactcgaaaacgcaaaaacggaccccaaccctcattcaaagagtcttcatggacagaaataaactcccctaataaatttcctaatgatctggccaaggactttgatttactaagaaaaggcaaacggtaggcttgcacccaaaaaggagaataaatcatggcttcaggagtaacattatgcatcgccatcgggggataaagtacaatatggtgatcttgaaagtgccacggctccttttcaagagcccgaaatcgatccccttcacacccaaaacagagtataaacagcccagaatagtgctctttgatgttaaccttaaatcgaccatcccaatgctgtgccatttgacgttgaaaagttgaaagccagaccttcttatttgtaatcacacgggaaaacagagaaaaatcaggagatggtaattcttcagcagggccgtcattgccatcatcagtaatagcaacaaccgttttctcagcatcagataattgcattgctgatttcatcttgtgtagaaatggatccatagtaccagaggaagacaaagatggtgatagaaatcggaagatgagcagttaagaagaaaataatttgaaaaaattggaaaaaaaccttagtggacaataactgcctcagagcacaacaatagggcagacatactcaaatcctattaatacattggttattaaataaatagaaattttacattatatctaaaagacatacatttagaaagagaaataacaaaaacttaataaatttttttacaaaaaaaaaaaaacaattcaaatacttcagcatcactctctatgaaagaaatgaaaaaacccagcaatgaacatttcttggccggaggaaaattttatcaggataaatgtgagaatcttgtacttgaaaggattgtctcccttgaaaaaaaaaaatctgtaaat

SEQ ID NO: 220120 - DNA, 1891 bp, Cannabis indica
tcacaataaaatttgtgattaattataaaacatcattcttatgttgtagctaaaagatccgtggctaaaggcattaatcataaagattacaatttgttgtttagtcacaatacttgttgggactagaactaaattagtgacaatttgtaactaaattttatattttagtcacaagtaatattttgttgtgactaattaaaagtcacatttagtcataaaaaatttatattataactaaacagctatcactaaaagtaactattttttgtagtatatatatatgaaatatactttaccatattattatgtttaacattctctatttaagtattatatgatatatatattatatatatttttgtccaatcatccccaataaaaatagtaaagcataaatatcaatgcagtttatgtataattaataaataatgtcttaatattttattttttccaaaaaatatatataattaagtagcttccattgcagtagtttttggaggttaggggcttaataatcatgaattaaaccataattaagtaatattaagcatgataagaacctataatgaactcatcaatcttttcttttttacagcatggtccaaaaattgaacagcattgaattaatatatgtctattaataatattataattgtcaaccgttcacatatcaatctatttggttggttggatggacgtgttttatgatttatatatatatatacataataatcatattattctatgttatctttaaataaatatttatatataagaagatattgaaatgaaagggttctatttcccacttttgtgtatggagaaacttatcaagaataaaaccttgtgttgtaagtggttgccagttaatcatgaatttgctttggaatttagtcatataaaacataaagaataatacaaatttaatttatttttttatatttgtatgtatatacataacttgaacaacaagcaaacatattgtgttaaaaaaaaaaaaaaagaacaacaagcaattttttttttttaaaaaaaaagcaagcaaaacttaagtactataattatgtattttaaaaaaatgataaatgctattatatttgattttctattttgttaaataatagtttatattttatattttttaaaattatacaaaataaattatgagcttaatttttattaaattaaaatttaataataatctgatcagtaagtattatgataagattgattatatttttttatatatattcgtgttagaaattgactccaagttgactataatattaaaaaaatcacaaaaattgattttatagtttaaattttgtaccattctaaaaaaatacagatttaaattgtgatttaacaagataagtattaagtaatgtaatttttttttttaagaaaaatacttattattattaaacaaaaagaaattcgtttacaataatataagtaatgctaattagtaactcttaaaaaacacacagtatccaaaattaatggtatttacctttataaaaatgtatatttatttaggcatcgactaaaacttgcatgaaaaacatttttttttcttggtacataaaatatacttatctttaagataaattttaattatttgataaattatataaatatagaaattcagcaatatcaagtctttaattaatcccaaaaaaaattaatttaaaaaaaacagtgacattaatagttaatttttaataaatattttacttttttatataaataattgtgataattttctatttgtatatactacatgctcacccacttgtattaatgtggaggttatagctcccattaataaaaatattatcttttaaaaaattaaattaaattttttttaatttgataattatagattaaa

SEQ ID NO: 220121 - DNA, 2321 bp, Cannabis indica
aaaacaaaaaacaaaaagaaaaacatgaaacaaattttataatcttcttcaattcactaacacggaattgaagttataaaatcttatttatttcactatacgatttatatatgtatataacatgatatataagtacgtaagaacaaaaaaaaaagttagatatagaaatttacgtacctcatcatcatggaaaagtttttgattttgaatgggaaagttaataaaacattcatgagtgtcgtctgaagataaagtactcgaagaattgatgagaacaggatcaagatggatggttttgtgtggtattttcggatcagtacttgataagcccaaaacccatttgttgctatcgtctttgccttctgtacttactacttcaacctcttttgcttcatcatctttctcaacctgagagagtgattttggtgaaaccatatttaagagctaagacactaagataaatatttgtgaagaacaacttgttccgtttataaagtgagagagtacatggttttatatatatagaggctatagcacaccacaccggtatacttaaatatcaatatataataaatataagcaaatttggaataaaaataaaagctctttggtggaatcattgtgtgatggtaaatgtttaaataattgactaattaattcaaagtttgattttttttttttggaacttttaatatattatgataaaaaaaataaaaactgatttttttttttaataaaaaacaaaatatttattacttgtaggttacaggagtgagtgaggttttggcttgtatagatagaaaagagaagatccattctggagggattttagtaactgatgtaattatagtgaaagccaacgaattccacattgcaaaccaaaacttgttgtaaccttcttatattttgcaataaatgcacactcagggctggaagaactacgtgtgtgtttttgttcaacttttatttttgttgtttttcaatttttatatttcaatataacttttaattataatattaaaaaatgtgtgtagatatttatatatattatatgcgcacacagtgcagtgcgtaaataaatgccccccataagttctgaaattttgacgacataattgggacttaattattcaaaattaagaaagtagtttcaattaataatgttctttaaagctttttgtacctttgttctttccttccgtttaataattattttgtttgagaaaattttacagaagttgtaggacattaatgtagaggttgttgtttttagaaaaaaaaaaattaagaaggtttttttttctacctaaaaataaaaatatcacgattaaaaaaattattaatagtgatcatagacacaacattagggatgcacgtgaagcagaaaattaaaagagagttaaagattttaatctctatcccttttattttacatggaataagtgttttcatggggatggtaaatcccttaataaaaaataagaattaaaaatataaaaatattaaactatataaaaattaaaatatttcaacgtaattaattattatctaataaattaattattatctaaaatataatttaaaatttataaaaatgatactaatatattaaaaaaatacaaatataaattataaaatattattaaaaatataaaataaaatattaaatgagtacctatcagggcggggagtgttattcccgttcccaccgtatttaacatttagacagaaaatctctgcgcccattaagaatatgttaacatgaggttaaggatgatattttttaatgcgtttttaatatatttctttttatgcattatcattggtgagaacatgtgcaccaaaaaaaaattaaaagtaaacagaaaaatcctatcgaacatgcattaagaaaatggaaaaatagtaaaatttcatagaaaaaaaaaagttacgaaccaatataatattatatcatgtatgttatggacaggtatgcattaggaagttataaacaaatatgtatgtacttatattacagacaaatatgtatatacttatattatagataaatatgtatttatatatgttatgaacaaatgtatttacatatattatacacactagcaaaaagttaagtctgaagcacgtatactaaattttatgttatttttttttatattatttaaaagtaatacaattaaaaattttaaaaaaactattattagttattaggtgagatttattattatgtatatctaattattatagtttataattttgtcaattaaaagaataccgaatacaatatattagtgtttaagaaagcttgatgatttaaa

SEQ ID NO: 220122 - DNA, 2429 bp, Cannabis indica
tctctctctccctctctctcttcaattggcattttcaaattttaattgtgaagaaaaagcttgaattggtgtagctttgtgtatgtttttccttggggatgcttgagaaatttgtggtaatgatccttagcctttttgatttattgatttctcaagttatgtgatgatttaaggtgttcttgatgtcctttaaattgtggatgcatgttgatgaaattgaaggtgattttggtgtttgttgtatgttttgagctattagaagtgtgtacattgcatctagatggttttggttaagattaggggtggtttatgttgtgcaaattttgatatttgatgtttaatttttggtgtaaggctttgatgttctgagttttgtcttgaagctatgaacttcaagtttgagcatatgtgtgcaactttggtgtttaatgtatgctttattttgattgttattttgatttttgagcttggtgtgatgctaaatgagtaccaatgtagttttggtttggttctagttgaaggattggattatgcatggtttggttatgtttggtatgaatttttagttgaattttgaagtgttggtaaaaattgcattttaggggtttcacggcccctcattgcgaccatgatttggctccctgcggcgtgggcagccaagttgtggccacagcaatgcggccacggtttacctcgttgcggcgaggccctattttccccaagaaatttcgtatacttatttttaccataactttttactcgggactttattttggacattcttaatatcgttggaaagctcgttttgagccatatatgttaatatgtaaatgaaatgccaattatgttttcatgtgaaattaaatatgggattgaccttatttgtgatatcttgagaacgtgtgacaaggattaccgatgcttgcttaggaacactcgagggatttggaatcttcacatacttaaattactaggtaaggcagtaaactagcacgtagagtttagcatagtggcacccatgtatgttatttgtgtatgctatgcgagaaactaagattagagttattaccctaaacttagcggttatgtggtctagggttattaacctagtatttaaataattttgaatgcaatattatatgatatatgttgagataaaagaattatgcgtgcatggcataattaggttagactcagtaattagatcgagataaaccactctaaggccttaatgtagatagacgtgtgagcgtaacacgtaggtctatgtcaaatagataaaccattgttgtgtgttgtggtgaatgaccaaatttgagtttaaaactcaaacttttgtcaataatggcatgttttgattttgtgtaaatttctgggttttactgcttggaatatgttgtgggatgttgtattaggtgttttggaaagtttggtaaggtttggacacattttggactacttgggcaaacctagtgcaaactggttaactgatttgccaggtcctgtaaaactagttaatcggttttgggacaggtttcccgagcaatccattttttttgattcgtgttagttttagagccttggtttggtgatttcgtgttgcttagggtattgtagttttagttgtcgatagcagaacctttagttaaaggtttgggtttctcggactagggttttggtgcatcatttacccatttatgttatgtgattagggcatccatctagcgcgaagttttccgttcaggtcggccaacttacttgaattcggaaacgaggtaagaatagcatagaacatatgatatatatatatatgcgaatgtatgaatgtgtgatatatatacgcatgcttgttatggttagtacactaccaacacttgtacgaatgtggtacaaagtgcattggtatagtgtacaatgtttaaagagtatgttacggtgtaactagcacaagtacgaaaaagtacagggtgtgtgtggtacaagactttatggtcctcggggtacgagataatccttaccaacactcatacagtattggtacgtagtgtatgtggtacagtggctgtaccctagtaaagaacatttaagccttttaaataggtgtatgggtgcctggatacaagtcgatattatattatttgttatatgcttttcttactgagtctgtcaactcacagttattatttccatgtgtaggtaaaggaaatgcgaaggctgaataggagtgagcttcaagctaggattgtttttgtacatgtcatggtggcacgacctggagtattcggtctcaggacatctggggctttattttgtagtcgctatgcgacaaaactaaatatattttcataatattgtaaaagtttaaatacgggatccttacttttgtaaataaatgtgtaaatgtttataaagtttaacaattaatttaa

SEQ ID NO: 220123 - DNA, 2496 bp, Cannabis indica
taaaaaacacaatttattttttatacataatttaaaatattttatatatctgccgcgaagcgcaggatatttactagttattaaaaatacaatgtactaaatatatttttttatgaaaacacgaggtatatattctcttattattattattattattattattattattattattattattattattattattattattatctgaattttgataatatatgcataatgaaaataaaagatttaattggtgggataaaaaaccatgtcatctttcctgctttgttgaaaattcactcatttgaaattgaataaagaaagaatttctcattgtcacagatggtcaaagaagtatcacacatcaattactccaaaaacacaaaagctttgcatgttgagatcactaacacaaaaactgaatcaatacattacaatttttaatcaactcaaaatctgtatttggatcaaaagctcctaatagaaaccaaactcttaacatagaaacattcaaaaaaagcaaatgtgtttccatcccaaacaaactctctacacatgtgtctaagaaggttgtaagacaccaacttcgtttcagtcatagaatctctccagactttgattaaaatatcatccttcttcgaaaatggtaacacacgaacttgattttcaaattttgtaaggtgaacatatttggtaccattcaaggttgtgatacaaagggtattggcattggctttccaacacaatacaagtaaatcattccacattgacaggtgaggcaaatgacaagtgagcaaagctccaagtggaaaatctaagatgaggccaaatttctcatccctcatgtcaaaagtcagtatatgtttatatttatcattaaaaaacttcacaagccagtaacaaacacctctccaacataaaccatcttcaagtgtagtacctctaataatgtccttaatgttttccctcatgatgatctctctccaagaatcagaaccaagtgtgtagacctcaactgtgcaatcttgatcatagagccagatagagacacatttgtagttattggttgtggaatcaatttcaaatcctatctttggatgaggccctctaagtataatgttatttggctctgggagaatcttgaattctttcaaaaaaggattgcataacatcattttcccaagagtatttacttgtaaaatgagtccatcgcagtgatataaccgattatgttgattctcatcattgcacctttcatcatgaataagtggtaaactaatatatcttgtgataggtgtaacagaatagttcaccacaacatcatcatcatcatatattacagtcgatgatgggtatgagattaagtgatcactaacacggactaaaggtcctttgaaaattaaggatgtagaggactggtttttggtaatggagaggtgcttggaaacaaatgttgggttgttgatgaaatccgagatcacccaatagtaaaacttgttcacaaattttaactgaagcacagaatggggtggtaccaagaacaagatttccattaatatatcacttggcaaatcagagaagcttgccatcatctgcattaaccataaatggactttcatatattaaaactgtcctaaaatcaacacatatatatcaaactcttgaagttgaaacaaaaagactcataaggaatttaatcaaacaggtggtaatagaaatcaacatactgagtaatgaagtttcaagattatttagtatgtattattaacagaataaacaaatcaaattaagaaaaagcatgacatttgtgtttctttttgaacaatatataatcttgaaatgaaacttttcagaataataagaattaaagagaaaatggaggacaaaatacaaaccaatgaggttgtaatcgtagcagggagaagatgaagttgaaaaccaaagaagaaatcttggagatgagaaatggactttctttctcacaaaattcaatttcaaagttgtggctccgtagatactagtataactaatattgagagattagttttggaataatggagtttgatctttaaaatttattttttgcaattggcataataaaaccatcaatatattttatttatttttattaaaaaaaataatattacattttgtttaagaaaaaaggttacatatttagattctttatcttcaattaaaattgctaaaactatttcttttttaatataaattataattattattattcctctaaaattatattaaaattataagagtaatttgcggcataaatattaatttaatttttaagttaaaaataaatacctaaatttaatatttggtggtaatgatacctaagttacaattgtggaatattgataggtaacttgttgttaagtgttacataaattaccacgtgacaatttttaattagtctaagtcattaaattttttagtttttttttttttaaaaaaaattgatttaaatataccaataaaaaa

SEQ ID NO: 220124 - DNA, 2319 bp, Cannabis indica
aatttggggataggataaatgaggtttcatctcaaaattaattggcaaatgggaggagtagcccattcctcgtatatattctattatctttccacacattagcaatgtgagactctctaacaataaaagactagaatctgttttattattattttttcacagtaatttttttattatttgtatgttatttttcttttattatgatcacgttgtttttataaaatattttaaaaatgttaaaaaatttccaagaatacttgtttaattttttttttacaaatatagtttataactccatataattataatggataatacatatattataactttttttttggctaattatatttttatcaatattgagacttcaaatttgtacgaccaaaaggaatataaaatgtatggggatatctataatctattaatggcttattttattttattttattttcaaatatttatatatagcatgaataatttttagaatttttttcattttctcttatgcatgtattcaaaattgaagtgtcaaaagttaatttgggagacagtgctctgtactctaagattcctgcaaataaagacatgtcaaagtaagaaatatataagaagtgaagcaatttccaatgaaagaaccaaaatccaccatttttttacaagtctttctttcttggtactttcttcttcttgttttttacatggaaagacaatcaccaactttgtcatattggaaaacttggctttggttaaggggtattgttgtaattccattctattatagccaattaccaattaagagtgaggaaaattttatatatgttttatatgattttgatcgggtgtttatatatttggtatcttgtattttattaaatataaattatgtattctgtatttttaataatatttatttagtatcttgtattctaaaattatacatatttagtattttaaatttaaatttttaattttgataattttttattaatacaatcaaactgtttaaaattttatgaatttttaatttaaatttatattatttgattatatataactaatatgatttaattaaattgataaaatttaatttaaagtgataaatatgtacaatttaaaaatttatacatgttttatatgattttgatttcctagaaaagacttatatccataaactttaagacttgtatatattttctccattttaaattacaagaaagcaatttatctatttgtataaaattgacaagtagaagaaaatagggtagaaaatgactcactactataggccaaagccaaattagaagtttcatgttttcaatttccttatactcttcttcaagttggtgagttggaaaattaagcatttaagagattattattggtggacaggcagctatttcttcaatctactaaatgaaaaatttaattaaaaaaatctaatgaaaatacagttatgaaaattttaaaatataatttaaataaaaattgaagaagttgatgtaatgacatttctaacccaaatagatatttcatcttttactcttttcttaaccagttgtttgaacttagaacttagagattgtatttatgctatgtaacataagggttttgagttcaaactcacttaagaacataatatatattctctaaatatatagataattttgttttttattattattattattaagtatcgttattggtctttttagattgttgaggtactgatgtccccacttatcgtgaaaaaatttaaccctccgaacctttttgatagaatctaatcgattagggaattatatatagaattgggattattaacatgttctatactcaaattatacatatttaatggaacatataatgaattaaaaaaaattattctattttttttcttttttcatattatgctattctattgtatataacctaagatcttaaatatcacactaaaaattatgtgttcttattaattattaaagtttacaaattaatattaattaattaaataaaaataaaggatattaactgcgaaaatacttaaattgcattaaatttagggattatatcacaaatacacaaaaataacaaaatataaaaaaatacgatttcacaaaattttaaataattttttacgatttttttgatattttacagaaaatacggtcttttaatattgtactcttgttcaattgttgttaattttttattatctgtatgttattttttgctgttgttttgatgttatttagatgttattatcatgttactttttatgtaattttctcattgttttcgtattgtttttatgaaaaa

SEQ ID NO: 220125 - DNA, 2988 bp, Cannabis indica
gactacaaacagaacatagtgatcgtagaagtcatacacagtgatagtaattatatttaagaaatcttacctggaaaaaaatatcttaaaatttatcttattcgaaaaataattaagataaactcttcaagagagttcctattattattattttgataaatattattattattattattatttaaagtagctaaggtaataggggtcctgatttccagcatgatatatcgtctccactcaccactaacctcaaacaacacgttttcaccaacgttacaaagttactaagtcacataataaccgccaaatgatgctgccacgtttcatgctgccacgtttctatttttttttttattattattattattttacaacagaccacgtttcctttggccaccccacgattttactgcatttccacttacatcatgtatatatagtactgttcctcccttcgaagtttcacaccacaattttgagctcaaacattcagcattcggtgcaaaagctttgcaagagaacaaagttatcatcagcaacagagcatcatccttacaaatggcttcttccattaaagttctctgcgcttggatggtgatctccttggtcctcatcatcaacgctccaacacttgaagctgtcaaggaatttaaagtaggagacgagttgggctggatggtgccttcacccacaaacaagacttccctctataatcagtgggcttcaaggaatcgctttcgaattggagattctcttggtgagtgaatcttgttgcatttatgtatgttagtactaaacatgttgaaagttcttatcttttctctgtctctgtctcatactatgctcttttgtttttggccatgttttcgtgtccatagttttcgagtaccagaacgattcacttgttttggtagagaaatggggctactaccactgcgatgcaagcaagccaatcgtagcctttaacaatgggaatagcactgtcaccctggacaggtctggtctcttttatttcatcagtggctctcctgatcactgcagaaatgggctgaaaatgattgttgatgtcatgtctcctcaccgccataatcctctatctcctgcttttccgccagaacccttttctactgcgtctccaccagcacacaatgcagccgttttggcctctgtatcgcttggctcgcttgtaatggcaccggttgcagttctgctgttgcaaccctattattactattttgattaatctttgtgatttctattaattatggaggtccttctactattattagttggttttgttaattgtttaatttgagtcagattccggctgttggaatctttagtattttttacttattcattttgtttccaagatcattgtggtcttattttagttaagtacatttggattttcattattaatactattactaattttttgtttttgttgaaatgttagttctttattcttttttattgtgtcaaacacagttttgatgaattaactaccaactcttttaacctgctttttaagtcaatttagcaagcttaggatatgattttaaattttagcagccttagaaaattctgaacatcaaggtccacattttttaattcctaatattatttctctattgacttgatatattgaatgaaaatgggactgaccaggttaatctaatctattagctttgccacctttactcataaatcttaatcatgtttgtcctaatacttttctaatattaattttataactctactcacgtcaatactactataagcatgaattagatcgttttcttttcaagtatagaatatcatcggtaattgtttcttattattttattttgttatctaattatttcgacgtggctttgagctagtccagcgagaatgaaaatgacattaaaattgtacgaatttatttgtacatgcttatatcagttgaatggcctagtcaaagtcttctcttttgtcatgaaagtatttcagaagttgtaaagttaaactaataagttaaaaagatttaattcatgtaccaaatacacaggacaagcaaaacaagtttacaagatttgaaagcataaaacatttttccacacaagctgtaaataacatgattaatcttgataatcatatacaaccttaacaaatttctaggaacttgattgatcaaaatgaatgatacccctgatggaaagaactctcaacatcagaattatgactctccacttcagcatctctaagactccatcttgccatcaattttctccacttgagtttccttagccagtgttcaaccagtaaaacgactaaagcaatgaaaataatcccaagagttgcgccactaacagccagaagagccacaaacagaaattcagtcccctggcttttaggcaaggtggcccatgtggctgcaacataccctgttgccataaacgccacagccacccacatggccttatgagcaaccacaagcagtctcatctgaggctttcttctaaatggtatgatactgactaaaacaacaacaattgaaagagacgtgaacagagccaaatcgttgcttattacaaatacctgaaaagctttcgtctctcccaccattgatttccctctcttaggtccatcttggtagacccctccaggagggttaatcccggcagcaaatgttactgtggcgatcaaaatggtaactagtatgatagtgtttcttgcgtttagtattgcctcatcatgtattatcttgtggttcttttctttgaaactactcatgtgaagtcttttgctgtgagtcctctgctttgagaaatcggttggggacaaaagctcaatctcttgagtttggttttggggtgatgaaacatgagattttctttggctctttagattgatgcagttggttatctctgtaggcattgagggggaaccgttttcgttatctgattcgaatagataacttagccttgaagacaaggtgtcagg

SEQ ID NO: 220126 - DNA, 1682 bp, Cannabis indica
attttcaaaacccgaaataagccaaactggtgtacaatcgggcacaccataggacgggcatcgggcaccccatcggacgggcatcgagcacacagacgagcatacatttgttcaagtggcatcgggccttgtatcgggcccaaacgggtccatcgtactaccccttgtgatgcccatcggacctattatcgggcctacatcggaccttcttcttctccggtggtgttcggccggcatgcgtgcgtggtggatcgttgataatggttcggtcgagatgggtatggatgggcgtgggtggtgctcgtcgtgcgttggtggttcgacaaggaggagagggatgacgtgggtggggttgttcaacgaagaagagagggatggccttggatgggcgtcagtggggtggtttgacgaagaagaaagggatattagccggtatgggttttggatccctaggaaatttgagagaaaaaagaggaagagagagggacggttgggaaaaatgggaggggtatttttgggtttaggaaaaagttatcccatttaaaaaattatccatagtattagtttagggggccaatttatgactttattaatcatggaaattcaaatttcccctcataaaactcattcttttcactcattttattatcaaataacacaaatttttgatacaaactatactgcaagctcactgctatggtggaggttgtttttttttttttacagaacattatatacgaattcaatgggtaataatttttttttatttaatcttgttgttggttgttatatttagtatataatgttgttttaatggtcgatctattagttgctgctattttatgttgtttttaagtgaaatggttgttggtcaaattttctgcgttattctattttttggttttttttttgtctttcctaatggtgtctgatagaggtttgatggtggtctgatggttagatcagttctaagattagggatgatgtgtaaataggcatgatgggtgtgagttcgatagggtccgattccttttaattttctgatagttagttcgatattatgtttgatgccactcaaaattttgttttatatcccatgtctgatgggtacaattattgtgttgatagtttttgttagaatttattgtatggggtccaatataggtctgatatgggtttgatggttgtgtctgatagtcttttgttagaatttattttatggggtccgatattggtctaatatgcatctgatggttgtgtttgatagtttttttatttgaatttattatatggggttcgatataggtcttattgtgtttgatgcttgacagatttatggttttttcaggattttttatcacttttctgttagccttttgttttaaattttcattatgtttatatatctgtggttgacaggttcaactgtttttgcgttcattatgtataatggtatttgggagcttaagggtagagattagtgttgggttttgtgccctaaataaaactcatttcaataaaatcagatttactaattaataaaagatcagaaatcacttttatattgcttggttcacatgatttatttcatgattgtttgatgtataaattctattaagtccagaatatatgtatttgttcatgattatagtgtcgtcagcacagtggaatataatcatgat

SEQ ID NO: 220127 - DNA, 2229 bp, Cannabis indica
ttgatactttattaattgatttcaattctctgagcgttgccccatggactagtagtttttgaaagaccactgataccacatacaattatcttgtatcaagttttaaattctgcacaatttatttctgtttctattttgtaattgcaaatctgtgttatgttgtaacaagatttcaatatgttattgcaaagtgcactgttgtactttaattacagtttcgaaagaaataaattaaaatattcaaaaacacggtctttcaagtttgaacttagatttgggactacgcatctatcgtaatggttgcggtggtggtggtagtggtttcatccattcgtctgtcagagaggaataatgaagaaaaaaaggtgaaagagatgaacacaaaatagaatagcgatttaaaaaagaataaaaaaaaaagataaagaaaaaatatgagaaaaataattcattaatttttaagataatttgtttagttttttatttaattttaaatttttaaatcaaaattataagttgaaccaataaaatatcaacatgtggcactattacaataaattaacggatgagttaaaattagtactaatagaattacaaaaattaagcgcttgaatacttttgctattattttttcttgattagagatttatttgcatcaaattaaattttttgaatataacatttatatatatttacattttcctctctcttctctctataagctagggtttcatctctttctctttttcttgctcggctagagacccagccgttggcctggctgtgcggttggtgttctctagccgagagggatgatggtactcttggtcatggttccttgcacgacgaacatggagaagccggcaacagtgatgctttttcggagtcgccgtcgaggggagggcaaggtttttggggcttcgtggtctacagcggttgaggtccgaaggtagcaccgatgggcctccgacaatgtcagccgatttttcttggctggtttttgcatttttggccctcttcctttccttttgaagctcggggacgaactgaaatggaggggcggtcgggttctgcgttccctccggctccgagagcttgttggtggcgagttgtctcttcctctcccgttggtgtgggttctatggtcttgtttttatatattgatgttgttttattttagatctattttcagatctattgctttatgtttgtcttttaagtttaggtttttggtctagtaatggatcttttcttgttagagatttgagggtttgtattcttgtattagttctttatcttctatttatggtggtatggtacttgaaaatgactatgacctcgattggtcggtctattggctttattgctgtttgctcgcccttgttggtattgatttgcttttgcttattgttgagttttgtaatggattttgtctgttttttctttgttaaatgaaaacttaaatctttccgtaaaaaaaaaattgcattttttgagaacaattataatgtatatttatagtatcatatataactagatatatatagggaatattttttttgtaacatatatagggaatattttgttttagaacaactatagtttttgtcggttttataaatatggtatggttgcacttgcacgctttggatttagtttataattgattttttatatgatggtgaaaaattacttgtcgatggttagtagttattttacaaaaattaagtacaccacaagtactttttataactgtaaatttttaaacttagtgattgaactagttaataaactttaaacacatcatgtgtgtcatgttgatatgcattaacagaagaagaaaaataagtatatatgcatagtaatagtattttattataagttaaagcattttttataaatatagttttttttttttttgtaatggaaactataaatataattattaatattatgatatatattaaatattttaataaactaatgaagttttatattcagccaatgtatataaattaagacatttagtaatgcatatatcaactaaatgtgtggaaaaaaaaaaggtggagcatttaaatttagaaggtgaagtagttgaagcaatgagtaaattatataaagatgaaaaagatatgatgacattaaatgatgaagatggattttgtaaagagtgtgaagaaacgtagcatggagaagaagtaataatgtgaaccgctattagtgcat

SEQ ID NO: 220128 - DNA, 4703 bp, Cannabis indica
ccttcgataaataaaatctatgtttaggagtcaaagacatcctatagagatctaatatttttttttctatagttgatgattactcaagaaagttagaggtatttattttgaagaataagacgaaaattcttgagagatttaagcactagaagataatggttgagaaactaggaggaaagtgaaacgactaagaagagataatggtctagagtattgttcggatgattttgatgtgttctgtaagaaagaatgaatagaaggcacaaggccgtgatgaagactcctcatcaaaatagactcgcggagaggttcaacagaaccatcttggaaagagttaggtgcatgctattgagtgctggattgcccaaagtgttctaggtgaaagttgtgtccattgcaacttatttgattaacaaatgtccgtcaacattattggatttcaagatgtcagatgaggtgtggtcaaggaagccaataagttatgaacacttgaaggtattcagatgtgtctattatgcatacatcatgcaagacaaacttgaggcaagggccttaaagtatattttcttggagtatccagaaggagtcaaaggatatagattatgatgtctggagcctggaatgagaaaatgtataattagtatggatgtgacttttaatgaatctgctatgggatttatacaaacctgctggaagtcaagccaatactaactgagatgaaattaaagctctgggaactgagcttgaggttgagccttcggcaagagtggagactgaaacacatgtagatcacggaagtgatgattcggaagatgattctgaaagtgataatctaaaaagttataaactggctagagatagaacacagagagaagtaaaggcaccaaagaagttggttatattaaaaaataatttaatcgcatttgcatttcatgttgctaatcaaattatgcatgaaaagcgtactggctatgcacaagcaatgaacagtaaagactggaaaaaatggaatggagctatgtacgaagagatgcactccctaaagaagaaccagacttgggatgcaatactaatgttggaagacggtaaaattattggatgtaaataggtgtacaaatagaaagaaggcattccaggtgtacaagaggcacgatataaagcaaggttgattgcgaaaggattctctcaaacaaaagaagttgattataatgaggtattttctccgattgttaaatatagatcgattagaattctgttggcacttattgcgtgtcaagaactcgaactagaacaattagatgtcaagattgtcttcttgtatggacatctggatgaaagaattctaatgaaacaacctaaagtatttgaagaggctaaaaaggaacactggtgtgcttgttgcgaaagtctttgtatggtttgaaataatcttcgagacagtgaaacaagagatttgatgattatgtgaccaagataggtctaatgagaagtaagtttgatccttgtatatattttcgagagagaaatagagatactttgaatacgttgcagtacgtagatgatattctgatcgccaacaagagtgtacaagagattaagcacttgaaactctagctaaagatggagtttgaaatgaaagatttaggttcggctagtaagatcttaggcatggatataagaaggaaaaggcagaaaagactactatactcgaatcagacaagctacattaaaaaagttctagatacttttgaaatgagtaactttaagggagtgagtatagcgtttgcacaacactttaaaatgagtgctactcagatgccaaaagatgagattgagaagtcagagatgtcgagagttccatatgctagtgttgttggcttcctgatgtatgtcatggtctgtactagaccagacatagcatatgcattgagcatggtgagcagatttatgaaaaatcctagaaaagagcattgggaagcgttaaaatggattctacgttatttgaagggattggtatttggtataaataaccagaatgaagacttggatgttatcaatggttatatggactttaattatgtagggtgtattgatacccgaaagtcttcgaccgcatatgtgtttactatgtttggaataactattagttggaaagcaaaccttcagaaggttgtggcactttcgacaactaaaggtaaatatatggccttgatgaaagtgatcaaggaagcactgttgttagttgggttgatggaggtgttgaagccaaatcaaaagtttattactgtttattgtgataattagagtacaatttaattaaccaagaattgtgtgcaccatgaacgtactaaacacattgatatcaaacttcatttttcatacgagagattgtggagaaagaagttgtgaagattgccaaggttcaaattgaaaacaatctttctgttatgataactaaggtagtgttaagtagtaagtttgagcattgcttgaaactgattggagtcagctgagcccggaagggctgaggggacaacaacatttaaaacaatgatttattcaagtgacttcaacttgataccaaggtggagatttgttagccatggttacaagttttgtcatccgaaatggaagctgttaatccggagagcagataccgaaagcttagtgtagatccaaaaagccatgtgcagaaagtcttgtagaattcaaaaggtacttttagataagcttgtaccgtgtatgaaatatctctcctagatagcttgttataaatttggaggtacattcttagatagcttactatcaatcttgaaggaccatccgggaaggaagtcttgtacgtacctagaaggcttgtttgtttatcaagctttcggattgtccatactgaaagcctgtttttcaagatgacgtggattattgttgttggtgatgagctgaatcatttaaggaaatgtaattgtgtcagataattttggtgaacatttttaaatttaaagtcatcttacacctcatcccataaataaacggtcttaaaaagtggggcccattttttatttgaaataccttatgtgacacaaatgcagaagtttctaggcacaaaatggcctacacttgaaaacgagggagctcgtttccaagagaacccaaacgcaaaacgacaacaaatagatcgtcgtatgagcctcgcccaaaatggatctcattgaatgttgatacgtggcaacatctaattggtaaacctcggatacataccgtacactgcttcacacctgaatcgaaagaaatcatcttttctaacatacgccgagggctcagagtcttcccaatctgtatatataactctctcagtcctcctcgtccgaattttcccgaatttatctgcaaattctcaagaatctcctccttctgaaagccctagagtgttcgggaaccctaatttcacttaagtttttctgtttctttaacagatcagtaaaggggttacagccatggttgaatcaaaaatggaggaaatgcctctctcagcgctattcgatcaagctcggaaaatccatcaattggctacggagtcctgtgaagctgatcaggtaagtctaagggcttttggtattttttttgaagaattttacgtggctgatggtttgtttgtttttggttcaggaaatggtgaggaagggttgtgaggctcttgaaaagtgcgaagatatggtaggtacgcttgggttgttctctactaacgagaccaaggaggatatcagcaccaataatctcaaatacattctggtaactttgaatcttactgcgatttttgattcatatcatgtttctttttgtgggaataggttttggaaagtattataaatttttggttttttttcatactggagcaagtataagataaggcgaataaaaagtaggaaattggtgaagaaattgtatttaaaagtgtggtcttttaataaggtggctttacatgtgtgcttgattctgatgtaatggggtgtttaaggacataatttatttagttataggcagctacttacttaattttcaattctaggtgccattttatcttggagaattgactgaaaaagtcgaggaagatgataggatacagattcttaagacttcccaagcaaagttgaaggtggattttttcactttctgaaagatatcctgttgctatttatgtttcatacttactgtttgttagacgtgttttgtgtgctgtaataatgacatgtttagagttgaattgttctaggaattcattacattttgcgagacaatggaacttctaccagaagaggagttggaagcatccacacagagaaactcagattcccatgttgatcgaagggccagaaaggtatttttttttcttttgggaagattgaaaagcttgaattttgttacattctcactacttctgtttagttttgtcgttaacttgtctattttttattttttttaatagaggcaaaacttttgcactatttcaaaagaataaaatgcaaagaaactaagaccaagatggtcttcaaaataaggaccacgagcttgaaagcaaccaaaaataaaataaaaggaatcttaacagtaaacaagagaaaacagataaataaatctatgaatgaaaaagcctttgaaacatttagatttataaacccactttgtgatcaaaaacattagcttgt

SEQ ID NO: 220129 - DNA, 4378 bp, Cannabis indica
tagggtggacatgaggagcttgatgcagccagcttacgtgaacatgaagaattcacaaaagtgaaaaatatagcaactattgaacttggaagatatgagattgagacatggtacttctccccttttccaccagaatacaatgattgtttgaagttgtatttttgtgagttttgcctcaatttcatgaagcgcaaagagcagcttcaaaggcatatggtgagcttttgttcaattattctctctttcttgcttgtgaataaagcgctttatgcaacgattgtgtagtgaattgaatccatgttaatgtccttgtcctaaattgttatatatatatgtcaattttggttactacattgcctaattttgagttttttgtccccccttaaaatttttactatgaagaggaaatgtgatctcaagcatccccctggtgatgagatttatcgaagtggtacactctcaatgtttgaggtaagctgctcttacataatatttatgttaatgttataataataaactccctccaaaaatgtttggtcactctaataaacttgacatgatttatttaccattgccagtgtgtttttatattaatcattgttctcatacaatttctttgaaagatctcttgttctgtttccactagtacaagtttatagctgatattgttatgtaattatactgaaacaggttgatggcaagaagaacaaagtttatgggcagaacctttgttatttggcaaaactgtttcttgatcacaagaccctttactatgatgttgacctctttctcttttatgttttatgtgaatgtgatgatcggggatgtcacatggttggatatttttccaaggtaagtgaactcgcttggttgctatccagaagcttagagctattttatgcatgttatacttgtattgatcttgccacttgaggttagcttaaattgttgtgcgagtaaatgtgtttgattagtttggggtttaagtttctgaagaaaggaaaaaaatcataatacacttgtatgaatttgttatctttcttattaagatattatttaccttttcccactttgtaatgttttcttataaaaaagaaaagaacagtttttattagagtttaaagattctatgtaaatgtattatagtgtttgctcataaattttatctgttagagttttgtggatgcataatcttaccatcccgcatcacttgcttctctattcaactaatgaccgttaaaaggctttcttttttcacatagtcactgtaattactgtattacttattttttgtatccctgttaaacccaaattgaactaatcaaaatatttaaagttttaaacaagtttttgagtatttgtacatgtactcacaggtctatgtttctgcaggtttgtctagttttattttttatttaaagtaattaatattttgcttctgtacgtgttggtgcaggagaagcattctgaggagtcctataatttggcatgcattcttacgcttccaccttatcaaaggaaaggctatggaaagtttttgattgccttctgtaagttatcattttaaagccttttactttactgttgccatatcttgaaaatgttcactattagaatcttggcacaacatatagtactgggtgcttctgaaatatgcttctatattggaagatctaaaaggttctccttcacgcctcatagatgtttgttactgttgctccttagtagcaatttagtcatcattcctcttaaatttaaataggttgaagatgtgggcaataagaagaaattaagaaatggggaggacttgggatcttctacctcgctacaagaaaataaatcagtaacttaaaccacattattctaattacagtagatagtgaatcaaagcacaagtcctgaactttggtaaaagaaatccaagtaggcaatcataaacgctctctcccacatattaaagatttttctccagattaagggacccagataatggtcaaaacgaagagctcccatagaattaaaaaaatactatatactttagctcatttacttacatgtttgtatgtatgtttattgaatgtgggaaacaactcataataatttacatatatatgtatatttgtcttttgattttttctatacagagctgaaagtctaaccaagaactatgtattttttttttaatattaatgtatattgtatattttggggtataagtgctgtttgttccctcccttgtgattatatttactaatagtatacatctaacattgggcagcatatgaactttccaagaaagaaggtaaagttggcacacctgaaagacccctctctgatttaggtcttttgagctacagaggatactggactagggtacttttagacattttaaaaaaacacaaggccaatatttctatcaaggtacgcattttggccatttattttccacgagtgttcactatgatgatgatattctgaagttttgggtttattgtgtggctaagcatcacaattcacaattttgattctaaattttgtcaggagctgagtgacatgacagccattaaggcagatgacatattaacaacactacaaggcttagaattgatccagtacagaaaggggcagcatgtaatctgtgcagatccaaaggttttggatcgtcatctaaaagcagccggtcgtgggggtcttgaggttgatgttagcaagctgatttggaccccatacaaagagcaaggttgactgacttctcttctcatccacagattaaaaaataacagttagttgagtggtcacttcttctacttgtataatctaaaccaacatctccagactatatatgaacttagcaacataaaatcaaccgacatctccagactatatgtggtccattgtttcttactcctagggtcttaattaatcttaacatcaccatttgtgtctgatttgttctggtatgtttggttatcgtggacctcaacagtcagaatcctttgctactgtttgtacaaggtctgtaagaaaagtgtgtgtatgtacatagcatttgcaactattatgaatatgactattatggcaccatcgtcaatcgcacatcaatgaatattgatgtatctctgaatttgatctatcttaatggatctggtcctgccacgtcagatgctactggcaaaaattaggcgttgttctaagatatagaagaaaaattgtacttaataagaagtggtgaattagatcaaatgtctttgcaaagttgccatgttgattcgatgaagttgcttatgctttttgggggaactggggaacataatctaacctcttgattctccatttaagaacaaaaggaaataagaatagaatggtagtaattgattaaagtcacaaacgtcattttagtagtagtaaccagtaatgataataaagttaccaaaaaattgataggagtaagaagcccttgcattttcttggctttgtggtccttatctactagcgagtgagataaactaatggaaatctgaatttccatgcattgagacctttattaaaagaaaaaaacaatcatcttaatgcaagtaattgaaaaatatgtttgaaaaaaccgaatgagtaaaagttcaattagtttaagctttgtcaagcataacacttgcaacacatgtgatgtgagatgttttgatgaagaggcttaacctcgttctagttatactcctttgctcgcatcatggccatgcaaatagcttccaactttacttttagagctgaccttattgaccatctcttccaccaccaaattctctcttcaccgatgcaaaaccccaatatgtagaagagtgtacttggtgctcttcaatatcttttcttgacaagacctcacattgtctttgttgtacataaactgagccaatttcaacaatctcccacctttgaacattagagtacttgcaaaacaattttgaggtactttgcaggaacactcgatataggtttaactttcaaacctagctttagacttaatctacaaagtttcatagatgcgagctgggcatgttgctatgatgatcgaaaatctactagttgttgtatctttttgggaggcaacctagttaactggtattttaagaagcaaaaggttgttgccaggtccaacatcaaatctgagtataaagcacttgctttaaccacaactgaactgatttggatacaatctctacttttagaaattggattgtttcgtcctcaatgcgctattctatattgtaataatttacaatcatgttctttgatatctaattcagtgtttcacgcacgtactaaacacgttgaagtgaaccttcattttgtgtgtgttaaagtacgggtcaacaactcaatgtta

SEQ ID NO: 220130 - DNA, 1789 bp, Cannabis indica
gccaatggttttgccttgggatttcatggctctagaccatttcctcatctcgtgtttatcggttattaccaatggttcctttgtagccatttcttgaagttgattgaattctgaggattcgatgaaatcatgaaatgaattctgaggattctatatgtggcggcttcattaggtagcggctttttttgctgacaaaaaaacaaagataataaatattttttttttgagctaacctctgagaaaatgaagaagaagaaggagaagaagaatacctggtgtgggggcttgggttctcgcttctcgccgtcgccgaatctggtggctgctggggtggagcttggctcgccgtcgaggtggaggagatagaagggggagggctgggttgggttggaaaggaaggaaagtggcttgggttccaaccaataactaaggcttttctaattaaacattttttatcaagttaaaaataatgaaaaggttctcacttttaatgtggataaatttttgtaaaaattttacttcaaattctttagtcattttgtaaaataataaaaaaaaggaaagaagttcctaacaaaaaattaaaaatgaagacgaagaagacaaagggatttcttgattcgatatactaatttgttgttcaatatataaatagttttttttgaaatgttctcaaaaagtagataatttttcataatatacctcaataactctacgaattatttgataaaatttcaatatcattaattctatgatttgagtttttgacggtactcatgaaaaatcacttcatttataatctggatgtatttataaatacaaatatgattaaaattgtatattttagtcataatagtaaatatgtaattaattgtttcttaaaaaaaatggaatgtctttattaaaatgagagaattgctaaagggtatcactggtgcttagcaccctctttagcgtcatactgctatttgtgtaattaaatagagtgtctcatataaattttaaggaatatcgctaaccaatcataaggtgacacttatggaaggtgctggacacccaatagcaatgctcttaaaattaaaggtgtaaatataactttcctaaaacttttaggagggcttgatgtatgagaaagagtataaaaaaaagttattacatggaaaatataaattaatactttatttataaaaatatcttcataaagtgtagataatatttatacctcttacactatcacttacacaatcagatgatggttgcaggatggttgataggtggttggccgaatgttgcatcagacaaaggtttcaattagacgaaggttgttgggtggttggccgaaggttgtataagacgaaagttttaatcaaacaaagttgttggatggttggctgaaggttgcatcagacgaaggtttcaatcaaacgaaataaatgttagcaaaatgtttatgcaattgttatgactatcagtcatacatcatgtaatccacaaattgggcaaaggctagtcactactaccttcttggtgggtagcattatcatagtcggtaggcaactagatccttccctccacataagatttttaaacttgggtggtattttcaatcacttaagtttttggagcaaattgaaagcactcttcacagagtaagcaccagaaatctcatgaaaccagtataaagaattcagactaggaggggtaacctaaaatggaatgctacgaattactgctttatcataatcattgaacaaatcatccaacagctccaaatcctaacctactccat

SEQ ID NO: 220131 - DNA, 2286 bp, Cannabis indica
acacaaactcaaggcaaagttatgcagaaggaaatgaattacttcacacaaatagaacagctatacaatgctattctcaaagttgacagttcttggttttattgggctggggtgaaaaaacgcaaagtagttaagcaaacaacgtttactattatgactaattttaatccacaatcttattcttgtcttctcgaatctctacattagttaactctctctgttactagatctgagctatctttcttcaaattttcatcagtagattgaatgtcataaagtaaacacaaatctctttagaacattgtaagtgatcagaataatgtacttacatttcttcttcaggctcattcttcagtgcatttttggctatacattcaaaagcagcatcaacattgaacccttctttggcagatgtttcaaagtacggaatatttcccttagaagcacaccatgccttagctttcttctcagacacctataacggacatgaaaaaaatagttgatacactaagaaacaactgcacgaacacaagtgaaaaccaatcatcagcacattgtggcctaaatccaaagaagataaaagaacttaccacccgactgtttccaccatcaacatctaccttgttccccaacacaacaaatggaaagttctcagggtcggatggactagcctgaaaaacaatcccaaaagccactttcaactagtgctcaagtcccatatttagataatatgcacaggttcaactaatgaaaactacctgaatcagaaactcctcccgccaattgttaagattttcaaaagatttcattacattcacatcatagacaagaacacaacaatctgctcctcgataaaaagccacaccaagactttgaaacctttcttgtccagctgtatcccaaatctgcataaatcaaaatagatttaacatttaacattttaagtaatagttatcccacttattcaaaaaaaaaaaatcattaaaataatgcttaatttataatgctctctacattaaataattcttattcaacatgtatcaaagatctgtaaatcaagcatacaagatctaatgacaatggtttaagagaacaaaaaccctgtgtgaagtgataagaaaacttaaaaaaaaagaaaactaaatattcaagttttgttcatctggggcacagcagaatagcctaatttccttcaatttgctaaaagctttgataatcaattctaagcatcatagagacatagacaaggattcagcactaacaacaataaaaatagctaaacagaattacagatcaagattgctcaccaatctaaaacttaaaattgttcatcaagaatattcataaatgcatttcattataaaatttacctaaaataataaagtaaatttagaagaagaaagagaccgacctgcagtgtgaacagcctgtcttcaaactgaacctccttcgtcagaaaatcagccccaattgttgccttgtactgattactaaacttacgattcacgtacctaaacatcaattaacaacaatcgattaccaaaacaacccttcaagtaacaaaatttaacaagaaaagtgtacgatctaggtttaagaaagtactgattcatcagcgatgtcttcccaaccctggcaaaagaatcatacaaaccatttgtcaataagatgatcaaccctccattatttcaaatcaaaacacaaaattcattctaaccaatatatgtataacgaaataaataaatgtgaggttcttcaattgtatagtttcctccattttcatggaaaccaaacggatatcattaagaaaaaaaaaattacccgctatcgccaaggatgatcacctttaggagcatacgccttcgagtagccatggatggaattaaattatatgaaaatcgaaacaaaaatgagcaaagaatgactttgaagttgggatcaaaagctactggagagaggaaattttccttgtgaaaccgtaatttgtcgaggaagaaggagctggttttggattttggtgccaagccgaagaaacgataacctgaaataataatttaaaggtttttttctataaatttctactctgttttcattttcaattttcgaaaatacgattttaaatattcaaaattagaaaaataccgttttctgaaacattgtaagaaaaagtaataaagtaaatttcatctatggtgtcttaaaacactaacaggtgatacaaaattaaaaaaaatgctctaatagtatactaaaagattaacccaaatttggtacataataaatgtt

SEQ ID NO: 220132 - DNA, 3325 bp, Cannabis indica
cacccatgccttgttggaaatttaaggcgtagggggtagatggatgttaccgccttcaggtcattgaggattggtcaacctatcattgcgttgaaggccgaggcatcgtcgatcatgacaaactgtgccatcagagttctggcggtttgattttctccaactacgaggggtaatctcatatacccaataagtgcaatgccctagccaaagaagtcatagatcacttaattgtacggtgccaggtcggtgagctggagccccatcttttcatatgttagtttgaaaagaatgttggaggaggctccgtcgtccaccatgcatcttgctacggtcaatttcctaatctatacagtaatgaccagggagtcattgtgcgggaaactgatctaagcaacgtcttcttttgtgaaggagatcatgggctccataggattttgttgcttagagctcctgtcttcgacaactaggatataacttttcagctcatgacagagtgtctaagcgtagcgctccctagattttctagtctcgcctgtaatgtgggatctgcaaatgatgactcctagatgtcctgcaactcgtggtggcattggatctccattttgggcaccttgtggctgagtttggtcgtcttgcacataacgatgcaggtgaggattgttactccttatgaggtattcaatctctcttctcagattttgacactcatttgtgtcatgttcaaagttgttgtgataataacaaaacattgacatgtccctttttgtcctctcccttttgatagggaagggctttcagtatgggactgttccctgagtggccatgagatggcctcaagtttctttgtcacgagtgtgaagtaggtgtacttctcctccttattcttatgtggcatgggagaagtgttaaacttcccctttttagtgatgttcctcgcagagctattggatttgcgcttgtttcttgtgtttttgccactacatgtctaggtagagttattagtgtttgcctgtgcgtgtggtaggtgaggagactgctggatgtctcgtggttgcctattgctgacatgcattgtttgggcttgtcgtatggcctcctcaagcttgatcatgccatcaactctatcaaggaactccttcatcctgttagtagagatccttcagatatcattctagaaattactcaacaggattatgcccttgaggatggccatatatcggccctcttatgtaaggtttttgaatttggtagccttggtcatgaaccttttgatgtaatccttcaaaggttctcctaatttatttgactttgacaagatcttctagctgtgatggtataagacttgaagatgagagtttcatttggaattctcgagagaactcatcctaagagttgaatcttcttggggtgagtttgaagtaccattgttgagctgtgtccaacaaagtggttgggtaagcggcactgcacatcaccaataatcttctggaggtcaagttgaatctcgaagtatttgatgtgagccaacgagtatacttgcctagtgtacatcttccatatcgggatcttgaacttaggcaagggcaagacatttatgtatgccgagaatggtgacccccttgatcgatcaagttcaaggtccaaaggctttagaccagctatgccttgaatcatgtccctaagttggtccaactgtgcttgcacaaaaggatctgttgcaggggatgactaactggccctccttagaggggttgctaattgagaaaagataggagctagctggccataatctgggagagtgtatggtgaagtttagtcagtcttgtgttgaactgcagaccatggccgaccattctcaggtatgggtgttggctttggccggcgaggcctacactttgctgctatcattggtcgactagacctacattgggcaggctttggccacccattgctcttccatggctggccaaacttgcaaagggtagggtctggccacccgtactgcatccatggatggcaataactgtaaagggtagagtctggtcgcccgtgactctacggtcaactgatgtttgttgtgcctttacaagaggtagatcacaacaattactgaagtttaggtgatataggtgtctgaagtgatcagatttgcatcctgaataagcattttaggtgtttccacccgctcctagtccttatcgtttgaaaatcaagctctaggaacctctctccccttggggaggaagtgttgtcctctcgctggccaagggtgctcttgctcgtggctggttggcgatagactatacaatgagcggtgttgctaagccagagattcgtggctggccctccatgtcactggttgttgggatctggcaaccaggttagtgagcttgttaacagaccctccccgatctatcaatgagtcttcattgaagtggatctctgatcagatcctatcctctctcattggttctctggttgatctgccttttcagatcgctagctctcggttgcaacaatccaattcttcttggtgagatcggaggatgtactaccgatcatccatccatctcacgaattcacatctctactaagcaaacacatcacaattagtagtgcgtggttcttcaaattggcctacttggcctacagcttctctaagtctagctaactcgagatcctctcctaagtccacatggggctcacaaatcataggctcgccaactactggtcctgtctctccagcgtaatgttagagactagatccgattgtttttctcaggcgctcttgcccacgagtccttcctttagtgggaggctccaatggtggatcttcccttggaggtaggggcctgttattcagatccagcaggacgcttgtatcactttggctagatgtagaggtaagacttggggcacccattgttgtgacaggattcaccacctccgctgtgttcattagtattttagctgtggctggaacttgagcatttgaatctgcaatttgtgggtcttcagggagacccgaggatgcaaatggtgtgacaagggttcttctcgtgttaaccatggtgtttgatcagatacaatatccatgttttcaatgaaagcaccaaattgttgacttcaaaaagtgatcaaccgaccgtggggtcgtataaatcttatgcttaccacgtattacacaaacaaaacaaaaaaatagtaagcacaaagaattgtaatagaggttcggccccctgtgatagcgggtaatgacctactcccctttgttggaaatattttaccaggatctagatttactaccaagtatgtttcattaaca

SEQ ID NO: 220133 - DNA, 4510 bp, Cannabis indica
ccttaaacatagatattttctactttatgggcgattaaggcccaattcgcagtccaactcctagtctatgtgtagagatatggatagaaccctgctaggtccattcctagccgactaggcatctgtagggagtaggctggccagccttatgttgtccagaggctgtccgaccatatggggtcggccacaactcccttaaggtagttggtttgtcacttttcgtcttgtttgagtactgggacccccgttggctaagatgctgaattggccttcttgttggaaagttgtattgccacatggccctgatcttgtccatgtaagcatgccacgtcaggtgggaaaaaattgggataacatttgcccccatgtccctatgcggatgtttgtacgaataagaacttaccaattaagttaggactgatgtagcctttgttgaatagaagttgctgcatttttagccttgtgaaatactttgctgttggatgtcggatctcatttgtttctataaactaactacttttacatgtctctttgttaagtatgtgtggcaagtgaaggagtggtcccacagatagtatttaagtgcttttggggggaaactctcttcaattttcacttttcattctctcactagaaagtaacttttaaagaagcttctccttctctctagagggccgaacccacatagcatcattctctgggattttcacgccatttcaatgatccaagcttccgtcttcttcaccaacgatttcttattgtaggtaagctttctattcctgttattcacttaattaagtttatttttccatgaatgcatgaacattgttcttcactttgaatatattttgactcccacgttagactgttgttgttatcctgtttttggcgccttgacgtggtaatagaactaaataatacgtgtcccatatttttgatacctagacggaggaaattattcctcgcagcctataaatgactaaccagcatctgtcatctgagcaggattttggagaagatgtctgactaggtttggacatgtttgtgctgagcaaagtacgagagatggcaactttggagattaatctcgttgtgtccagtcacgaagacaatcccttaatcacaggattgagtcaaagaataatggcaacatattttaagtttcctatttcttgaattgtaattatagaattaatggagtttcctattttattcactataagaaaaagggaaatcatccctcatgtattaagtccctataaatagtggcctaacctcactatgaaagggatcaaaagaattgctgtagaaatacattctagagaaaaaagagtgatctaagagagaaatatactcagagatccattgtaagagcttcaagaggaagaacactttgttcctttttctcaagtcaatacaatataaggggagtaggccattaccacacttacggggccgaacctctttaaaatatggtattcactttattttattattttttgctttcttttaattatcttaatcgctttatttttgattcactgtcgttggctagaagcgaggtcaatattttggtgctctcattgagagcaaaaacacaagtctttgtcttatgttttgagaggtaaaataggatggttgtacaaactcaaaggggaggccttgctgattagggcgacccaatggtgacacatcccgacgtgcaaactcctagaaacacgacaggaccacttgggacaaaccccgagcaggttaatacacaacatcctactgtaggccatggagtgaatttccctcgggctgggatcacactaggcgtacaagagattagaaacaccagttcggcagccgatcaatccattcccagcactggggtcccgtccactactaatactcaaaggcccgttagagatgacactgaactccaaaacctacagacatcacttgggctcatgaaaggttataataaaactttggatcatgattagaaggacctccgagcaaccataaaccatgcattctatgagcaaagatgccagttcctataatggagggactgggagatatggaaactatgagggctcagaaggcagccattgatgatcgtacaagggaggccaccgtactaataagaagggcctaccaagttaccaatcaacaactgactacttcctctagtattcccttgggtgggtcaaaagattaaggagctggacataccgcactaactcatagtggccagccgtccaatccaaggccacaagttcaaactttgggccaaacagtagacgaatagatccttccagactgtcctttacgaggagttatacttcccaacaacttcacccctgtcgaagtctcaggccaacctatcaaccaaacaagttagacaccgaggcccctcggtaccttaatgtttaataggttgggtactgcacatgaccttaatacaaatctaaattgcaaaaggggcctggatggacaaaacagtctaccaactgtccaaccaggtatccgtgcccaagattcagttcaaagagatccaaatgtgacacaggccggtcagcaagctgaacaagttcatccacttgtgcaagcacaaataaatcaacttaaaaatatagtacaaggcctgaccggcccaaaactcacagatctcgaactcgaccaggcacgcgaatcacctttctcccctaaaattgaggttcttgaggtacccgtgaagttcaaaatgcttacctagcaaatttatataggaaaagaagatactttatcactcctgcaatattttgagatgcaaatggatctacaaggggtaaggggtgacgtacggtgtataatcttccctgccacagtcgtagaggctacccaacaatggtatttcaaattgtctccaggaaggtttaattcatgggattccttctcatcaaagttccatgcacaattttcctcccctcgtcagcttacctcacacatggaagacttggtggaagtaaagcaaatgccattaccaggggagcccctctgggcttacattatcagatttatgaccaaggccccaaaggttaaggggatgactaaagaaggaagactagctgcaatactaggggcattgagcctctcggagaactgtggaaagatattaaaaggctaactatgggatcgatggctgaatttctagaatgagcagatggatttattatgctcaaagaagttgttcggcccgtggatattattgggcaaaagaaaaaccaaaaacgcaccttggcagtaggaatgtctgtccagaattcataatatcccaacagttcaaattcaaatgggaagaggtctaacaatgataacatgcaaggtaatggaaagaaaggcagattcattggaaatgccgagcagtgccccaaagaaaatgcctctaatttactgctttctcagtcctacactactacaaattaggcttgtagtaacactatatagttacatgcataaaagtgtgggtcactaaaaaattaagagtaggttttagtgacacacaccattagactctaactattcggtgtttatcacccgacatgtgggtcactaaaaatatggagtgtcactaaatattaaaaaccaaaatttataattttataaaaataaaaaagaaaccatggcatacagaggcgtgccatgcgtgtgagaaattctgtttaccaacgcattgtgcgcgtcactaaagccacattttagcgacagcattaacgcgttggtaaacagatttgctcacacgcatagcgtgtcactataccttgtgtaggggagccaacaataacattcactgaagcagatgccaaccatgtcatcttcccacacaatgaccccccggtcgtggaggtgcaaattgcaaacaagatggtggcacggactatgatacacaatggagcttcctggaacattctgtataagacagcttatgagaagatgggactccaacttaaagacttggtcccctgcaccaagctaatatatggtttctccaaccagagtgttgcacctcttggacaaatctgcctgccactcactattggagaagcttcgaggagcataaatgtaatggcgtaattcttaataattgatgtcccttcagctttttatgtcatgttaggccaatcggccctatatgacttaaaagctgttacattattttttcatttgtgggtcaagttcccaaccgaaaggggagtgggatgtctcaaaggaaattaaagaattgcacaggaatgctacaaccttactctaactaaggccaagagggaaaatacctttagccagagtttggacaaggggaaaatcattgcccaaataggaagtcacccaaagcggagatgaagacatggatccccaacttggggaaacaaatataaatggttggccaatagaagagctagaaaaagtggaaatcgatgcaaacatcccggccaggaaactcaaaattggtaaaggtttgctgcttgaaataaaattagcttta

SEQ ID NO: 220134 - DNA, 1844 bp, Cannabis indica
gatcgttgaaggaggtacttgtttgtttttctatattttttttttgttattttacaattattttttcttttgttcttatattcagtttcttccatttgtctataattttttattttgttttgttgaaattaaaactgagaaacatttctccaacatctgtgcagagagtaagtttgaacttgcataactatttctagggtgatgcaactttggactttattaaggttaaaggtaaaggcatgtatggtcaagattctaaattcgtccccaattcttctgtggaagctgattttcttagtccatcatcatcaaaggtgcatgagcatgttactcgtattgagtatgaggacttgaagaaagatatgtctgttattattggctagactggtacacaatttgatgatgtgctccgcacttctgaaaatgatgatgatatggatgttactcgtattgagtatgaggacttgaattcctcataaggaagaacaaccccacttgtgtcattatgtgcagaacgaataatctcaagcacaagttgtccaaaatggagatcccatgccacctccagtggcgggtcacttaggggtcattatcagccgaccccacattgcaggcaagaccaataaggttagggagcgctatgctcaaacactctgtcataagcctaaaagcgataccctgaccgtcgaataaaggggctctaagcaaccaaagcttagagaacccaccatctctttcacagaaggagatgctactcaagtcaatttcccgcacaataaccccttagtcattacaacacaaatcgggaacatgacagttgcaagatgcatggtggacaatggagcctcctccaacattcttttcagatcaacatatgaagagatggagctccagctaaccgatttggcaccctacacacaagtaatgtatgacttctttggccaagacattgcacccatggggtacatcctattacccctaactattggagagaatccaacaaccaggcacatttcattataatcgacgtgccctcagctttcaatgccatgataggtcatctagacctatacaacctaaaggcagtgacatccatctaccacctttgcctaaagttcccaacaaggcatagggtaggatgtttgaggggaaaccaacagtctgcctgtcattgttacaacttggccttgtccaaagctaagaaagagaatatgcctgccaagagccctaatgaagagcccaacaaagggcaataaagtccaaccaaaagtggggatgcaaacatagatcctcactttggggatcccgtagatagctttggacctgtagaagaactggaagaagtggagattgatcccacttttccagctagaagactgaagattgggaaaggtttagtgccaaaaataaaatcaatactgataaaatttctaagggcaaacctggacctcttcgtatggtcacatagagacatggtcgggatagactgctctgtgatgacccatgctctcaacattgatctaaacttctgacttgtgcaatagaaaaggaggttgttagacaaagaacgtgcccaagcgctcaaagatgaagtcgaaaggcaacaggcccatgactttatcaccaaagcattctatccactttgggtatccaaccctgtgctggtgcccaaaccaaataaaaagtggagagtgtgcatatacttcaccagcctgaaaaaagcatgtccaaaggactactttccgcttccaagaatcgactagctggtggatgctactgttaggctaaaattagtctaagtttcgggtcatattttcggttagttttcactctttgtttctagt

SEQ ID NO: 220135 - DNA, 2098 bp, Cannabis indica
acatctagcattaatgttaattacactaatttctctgtggtaacatttaaccatcatttgtcttcaaaagctgagataattattactttcttcaaaacctttcaacaaaaattattgatttgtattttaaatggattaagcatccaacctctgaaagtgcatagtaataaagaagcaaaataaactcagaatttatcatgagaaataaagtatcttaatattttgtattgatcagaaagagtatacactaatctatgtgacattcatgtaaaattgtatgtgtaattgtatgactacataatctaattgttttaatctaattagtggttgaggaagttgagcatagcaactcttgttttgatcaaacgcctgtaaaggctctctagaccatcttcaagatcttgaatgcacaactccaagttttggagttggttttgcgccttatcttcgagcttgttatctgttgtctttactttctgactgatgagcaaattcaatgcaacatcagcgtttgcaaagtcattggattcgttggtagcctcgcaagagactctcttggtgttcatcatcttggaaactaatgaccaaccaattgatttgggttgagactttgatccagagatgaaggaaagcattgattcaaaaacagttagagtgattgattcgacttgtctcaacatgctaacaatctcaacggtgtcttgttcttttttaagggaactgaggctgcatctgttttccatggccttgaggactgttttcttcaccactttcctagaggctaagaatttcttgatctcgcttgtgagactcatttcgcctcctctctttctgcgcaaaattgattgtagttcatgtgtggattcctttgtctgttgtagggtatccttaacattgttgcacagatccaagagtctaagagatccatccaaaagtgcatcaactcgtttttgattctgctctttggacaatgcttgttgatttagaggcagtgaaagcaatgtatcaacacaatcatgaagatcttgaagagcacttagtttagaggctgatgatgaagaggcttcttcagaagacctcaatctgcgcaactgctcatcgaactcagaaatgacagggtgttgcctagagggaaaactgttggagcgaacatggtaagctgccatttttttctgtttcaaaggaaagaagaagaacttgatcgctttagaattagtttagaatttggttgctttcctttggcttatcctctacctatttatataccgaaaaaggtaaaagggacaagaggaatctcatcctcttcaatacacatgcaatgagcataacatgaatgtgatttggaactaaacaatactaatgtgaggttgttgatgttgtctcctcaccatcaactacctatctttttaaatcaatatttatctttcagagatagttccaattttcaagtaatatttataagttgcaataatgcacgagtggttccattcaaaccggatccgcatacctccataagggacaagagagattttcatgatatatatctcataactttacttggctatgtttccaataccaaataatactttgaaattggtaatcaagcgtgtagatgattccatttgcctcctaacgagagacagacagcctagtttcattgcataaaagcatatgcataatatgtaaagtcttctactatttgaaaaataatatagggatatcaaaattgaacagacaattcaatggttcaagttggcagacaatttgcactttaattcttttaatattatttaatttgttagttatttttcttcgttaactattatatatatgaattgtttaaagagcaaaaactattatatgtggattagttttaactgtcccaaattatatatctttcactcaagtaaatgcacgatcaaagtacgtagtaaaactcaacaataattgaatttttaaatagctagattaagtaatgtaaacaaagaagatatatgagaaaagtatttaataatttggtatacgcaaaaagtatgcgatgtatatgttgtaaacatgtacaattgtatgcctatttatgatacaaatctaagatatt

SEQ ID NO: 220136 - DNA, 2431 bp, Cannabis indica
tcttggagtagagctatgcagctctcaatctctgttaaaaataaactgggatttcttaatgggtctatcccaaaaccaccacctgctgattacattctgtataatgcgtggatcaggaataacaacatcgttatatcctggattttgaattcggtatctaaagaaatctcatccagtatacgatatgatgaatcagctgctaatatatgggctgatctcaaagtgcgtttccatcaaaggaatgggccacacatttataatcttaggaaaagcttaatgaatctcaagcaagaaagtctcaccattgggatgtattttactaagctgaaaaccatctgggaggaattggccaattacagaccaaattgcacttgtaatgggtgcacttgtggaggagttaagaaattgcaagaacatcatcatatggaatatattatgtccttcttgatgggtttatcggacaaattctcccaagttagaggaagcattctcttgatggatcctctcccggaagtcaatcgggtctttcatcttgttactcaagaagaaaatcaaaaagggaattttgctgcagaaaatgaccctaataccagccatgctttttccttccaaggtgacagaaacaaatctgataatcaatctcagaaatctcaaaatcccaagaaaggaagacccttttgcactaattgtaacatccacggacacaccatagaaagatattacaagatccatggatatcctccagggtacaataagtctaataaatccaaagatgctgttgccaaccaagttcaatcggctgatgaaaattgcaccaaaaatgaagaagcacacactatactgcctcagttaagtgcaactcagtaccaacaattgcttaacctccttgctaatcaacatggtaacttgcttgtgactgatcctagcacttctatagaaaattctggtaagatcttaacctattcttcatctaaaatttttgatacttcttggatcatagactcgggtgccactaggcacatttgtaacaacatgaagttgtttcaacatatcagtaatgtctcctctactagacttattctacctaataatgaaattcttttagttaataaaagtggtactattcctatctctaaaaatctcattcttgaaaatgttgtatatgttccaagtttcaagtttaatataatctctgttagcagcctgactaataatgatttaatagaagtaaaattcagtgctgatagttttgttatccaggaaaaatcactcaagaatgtgattggaagaggtaaagaacacaatggtttgtacatcttggatgacacacatttcgccactgctatctgcaacatcaccgtgacagccgatgtgtggcattctcgaatggggcatccttctcataaacgtttggctttaatttgcaacaatctcaactgtaaatttgatgatgttcataagagtaatccttgttttgtttgtcctttcgcaaaacaaagaaagctcccttttccaaagcattcaggttctgcaaaatgtatttttgatatgatacattgtgatacttgggggccttatcacattccctctcattctaatcacaaatactttcttactttggttgatgataaaactagattcacttggatttttctaatgaagcaaaaatctgatgctgttcaaattattcctaattttctatcctatgttcaaactcaatttcagtgtaccttcaaatgttttcgatccgataatgctcctgagttaacttttaagatctttttgctaaatatggcattttacatgaatttacatgcgttgaaacccctgaacaatatgctatagctgaaaggaaacaccaacacctcttaaatgttgctagagcactttattttcaggccaaagttcccattcagttctggagtgattgcattatgactcctgcctacctcatcaaccgcactcctacgcctaatctcaacaaatgtccttatgaattaatgtacaatgaaatgccaaaatatgaacatttaaggaattttggctgccttgcctttgctagtacactcacggctcacagaaataaattcactcctagagcccgaacttgtgttttcataggatacccgcaaggtatcaaagggtacaaattatatgatttaaataacaaagaaatttttgtttccaggaatgtcactttccatgaaaagatttatccttttcatcgacttaacactgctactgatttagcagaccctttttcaaatctggttttaccttctaaacacatatcacatacttatgttgatgattttcctactgttatggatcacattacacatactaacaatccttctcaggttgacatctcccaacaggaaacaaatcaacaagaagattgcctccctcaagaagatgctgctacagacaa

SEQ ID NO: 220137 - DNA, 2224 bp, Cannabis indica
tcaatattttagactccgactagtctcgaactctgactcggatacagacccagacttgaacgctgaccccaaacgccaaccccgaccctggccccagacctgaacctaaacccgaatttagaccccgattctagacacaggccgtaaacacggacgcagatccggaccccgacccttattcgaacttggataccaacctgaacgtggacccaagttaaataaaatttactaaaaatttactaaaaatacttttttcatgattttaaaattgaaaaacaaaagttgatatagaacacattttttatttttcaaaaataaaattttaaaaataaaaatattaccaaataccatctaatatatatataaatatataagtgtgataatttatattaaaatatttattaatgataatttatatattaaaaaatatattagaaggttactaaacactaatgataatttatatatgtgtgaattaaactattagaatctcacttaatgaaagacaatcacaaagtcgtacttggttcatcaggttcatgaatgttattggagtgttagtcaaccccaaggacatcgccagaaattcatagtgttcatattaagtacaaaaagtagtcttgggaatatcctcctcttgaatcatcaactggtgataaccagatcgtctatcattggcaaaggatcttcactgtcaatttattcaactctcggtaatcaatacacatccttagtggcccatttttttaacgaacaaaactaacgcaccccaaggcaaggtactcggcctagtaaactgcaaattcagcataccttgcaattgaaccttcagttcttttaattctgctggtgccatccaatacggggccttagaaataggctctacccccggtatcaattcaatctcaaaatcaatcttctattttggcagtaacccgggtaactcctctagaaagatatctaaaaattcccgtaccagtgggacgtgttcaagttccactggtatatcccttgtgatatccaccacgctagctaaatagacaatacatctatctcgtaataagtctcttgccttaagcatcaagatcattggaattcgagattcttgaacccttcccacaaacacagatgggtcctcaccatcgagtttaaatgttaccacctctttttacagtcaatggttgcattatactttgctagccaatccattccgagtattacatcaaaattttataagtctaatttgattatatccatcgacaattctctacccgccacatgcactggaagggacctaacccacctgttggagataactaactccccagtaggcaacaaagtacgtaccaaaattatttggtaaaacatcaatgggcttgttcaaactacagatcactctagtcaatatagagaattgcgtagcaccagaatcaataaaatatataacatactaccaccaataaaaatctgatctgtcaggatagaaggaccagcaacagcctctgcttgggtcaaagcaaataccatagcaagaataagagcatcctctttctattgttctggtttcaaaaattgtgagcaattcctcttcagatggcctactaccccacactggaagcaggcacaagcttgacagtcgccctaatggcgtctcttgcaccttgggcactcacgataagttctccaattcttgtttctacctcgattgaaaccttgattaccttgaaatttcttattgggacccgtggctggtggatcattgggtctttccttgcggtcattagggttaacacccctactcgaaccaacattagaagacaggctccaaaaatctcttctcatattgcacctcttttggatttgatcttcatcaccctcagctgtaaggactaactcaaccaattgagcataagttcgaacaaacccttgctgtttagcagctacaaccacatctcgagtaatatgttcttccaacccctaacaaacctggcctttctagcagcctcaatggccacttcatcaaaagaaaacttaaccaattggtcaaatttggtagctgtaatatccagtttaaaatagtatttaatttttttttttggatattaattgtgcgaggataattatctcatttattaatgttgttagtgagttaatattattgcttagagtagctgtaccaattttctaaagaaagttaaagttgtattaactacgaaagtaaaat

SEQ ID NO: 220138 - DNA, 2112 bp, Cannabis indica
ttgaaactatcaaagcagagttccatttgtttgagcaagtttttgctttttttttttttttgattttaaagctctaaaaacctgattaaaacttatctaattatcaccaaattttctagactagtctataattataattataactaaactagcaactaaaaatatgattaaatccacaacataaaacttaccattaaagctcccaagttttaaactttaaagctcaaaactaattttcaagcttaaactcagccactcaacatcaataattcaaaattacaaagaactaaccctaacttagtacaaatcaaaacaaattaataattttattatctacacaagccccacatctaactatctaattcctttacttaaaggattactaattaataaattatgaaagacttaccattactcctcactgtcttctattagaaatgcatcaacacctagctttgattcttgaattggaagaagaaaaaaacataaaaatggagaagggtttctaagaataaatttatgtgtttgtgtgtgtatacctttggtcagctaggaaaacccaacaatgagggtttttatttttgttttttttttttttttttttttttttttttttaaaaacttaatgataaataaatcttagttgatatgtgatcttcaaatctctaacaaattccactaaaatatgatgtttattatcatcttaataaaataattaccaaaaatgcctctatattctataatctccataattatgcaaaggacataattgttttttacaaattacccatcacaaataataatttctactcataaactaatttgctgtactgctaaaattattattgtgacttttcgttaatctattgactttttagtgttgcgcttatattctatatgtttatatatatttataattttattattagggaagataactttgcagtttagattaacaatcatctataatttttactgttgcgcttataatctatatgtttatatatgtataattttattaatcatcacctaaacgcataatcaaatcaattaaactttaaacaatcaaacaattagcaatgacaaaattaacaaatcatgacaaataatcagagaaaaacagggatgaacagagtataaaaccagaagtgaaaacaaagaaggaaataataaagtcaacacggagatatatactggtttaaatccaatacatcgatatgattaattgctctactccagttctggaacaccaccaaatgctctttattgattcagaaagaacaagtacaatacaattgagattgattctctgatgagttctctcaaagtgtttcaactttcacactcttccaaaagaatcttcttcatctatagaacattcttcataaaaaattcaaacccaatctctctcttttatctgtacctttctcactttacctctcaatcttctctctctatctcgaaactcaatctaattgttgtgtctaaaatgataagtgttggtggtatatataggctttaggatcaagatcctaaaattggttgctataagaagtgttggttaaatccccatactaactgtctcatggaaaatgctttaaacaagtacaaggaaaaataaaataagatcttttacaagcctcaacaaaccattataactcttagagtagtcgattctgttttcataggcttagatctttcatctctttacaatataaagaagtaaatgaatatctcatgactataactaacttttagctttacaaggaaaatatcaacaacagtttataactgttttcagctcaaaaaacaaacacatcacagtcaacaaacaacaatataaaagggagtagaacctgcccttttactccaagttattttcggccaagaaacaagagtggcagcagcctttttcctttgtaaaatcacctcagaaagagagagaaaaatagagagagttagtgagagatattgtaatacaaatcagaaaaataaagtgaagaatagagagaaaaacttgagattacctactgagctttgtggctaggaagctctaatcttgtaactgatatgttttgatagtgaagactcaagcaactttgagggtcgctt

SEQ ID NO: 220139 - DNA, 2621 bp, Cannabis indica
ttgggcggtttacgaaaatttctgtacagccctaccctctgttttaaatttcttgcctctaacaatgaagccaaacacgaggccatgctagcgagctgaagttatggctaagttgaaggaagtccaaaaccaagcgaaggtggtggattgccaagtcaaagagaggttgcaatctgttgtgaaagatgttgttgcttcttataaagaggacatccaaatgatgcagtaacatggtgatgagtataaagagcgttacagcatagccaaagcttgggttgagactttggaagcctgtgagttcagcttgacgaaaaaactcgagaccactgagtgtgacatgaacactactattcttgaagtggataggatgaaaaaggatgtcgctgaaaagaccttctagatccataacttggagcaagaacttaagatcatgaccaacttctaggactctgtaatgaaggctgagcctgaactctctaccaagctcgctaaggtggaaggtgacttggtaaaagttgaaaagaaagctaaggcaaacttggtggaagctcaaaagaaagctaaggaggagctggctacagctgaaaactagatgaagagagatttgggaaattccttcatggctgctctccatagtctttggtggaaggatcccaatgatgtgaagcttcttggagatgaggagaaagattttcttcctcaaattcttgaaatggaaagaatttcccttcccaatgatcaagaggcagaagaatctgaatcgaaaactaaccctccaactgaggtaccaactttagaacctccccttccagcttccataactattctggctgttgacggctctgcttccgaacccattataacaaatgcttccaatcagcctgagatggatttattatttttatcattactttttctttattttgtttaggggataagagtctccctttttattattgcggagacaatggtttgcccttgccgcggggctttttggatgtaaatatttttaagttttcatatctttgaagactgaatagttttaattcattaattattagaactaaatgacttcattaatttgctaagctagtttactttcaagttccctcaggttccagttcgaagtggctgaaccttagtaattcaactttcacacttggacttttactttaggtttctcattaaaggcctggaacttaggatttcaacaactctattttaaccttagactagaaagctttacaaaaaatacttactttcggcttcttaagtttttggtttcaaaggcatgaaccttttagactttagttttgctttttatattattgaagcctaaaattatttgtaatttgttaacctgagttaactggtgaattatttatcttaagtatggtaatataacaacttactcttggttccctgaggttctagttccaaaagcatgaaccttatgaactttagtttttgtttctactcccaaactaattaatgattattcatattatttttagaggcacatacatatactacccccaagtctgagattttggactcttggggattctttttcttattccctatctggatcgacattactttttggattttctatctcattgcatgtgcattcggccacaaaatctgctaaggcctgacattttattgttgtgcggggctggtagataatttcgtattgtcctaagtcaactgcccatttaagcagtcgactagatgcatctagcttttgtaagacttggtgtaagggttggtcattgtgcacctagattgaatgagcttggaagtaagaccttaatttcctcgaggctaggagtaatcaatatgtcaatttcttaattagggggtatcgacttttagcattaattaacctttcgctaacatagtagactggatgttgggcgttattttcttatctgatcagcacgacactacaacatattcagttactacgaggtagattcctagttcttctctatttagagaattttataagatgggaggctatgcaagttgcctttttagttcttggaaagaattttcacactcctctgtccattcaaatttcttgctgtcttagacgatgttgaagaaaggaacacacttgtctgttgattttaacatgaacctgctcagtgcggctatccgaccattaagactttgcacttatttcatctttttggtgacttcatatccagaagggtttaaattttctctatattggcttttattcctcgagcattaataataaatccaagaaacttacccgagctgaccccaaaggagaactttaagggattgagtttcatgttatattttctgtgggttttgaagcattcgtccaggtcctctatatgccctccaacttttttggatttgacgagtgtgtcattcacatgtacttccatgttatgtccaatctggtctttgaatatcttgttgactagcctttagtaggtagccccaacattcttgagtccaaatggcataactttataacagtacaaaccaacatatgtttggaagcttgtatgttattggtcgagtggatgaattcttatctaattatacccctagtaggcatccatgaagcttaggatttc

SEQ ID NO: 220140 - DNA, 2486 bp, Cannabis indica
gctatggcatctagttcaaactctaagaggaaaattctgatgctgaaggaaactgaacctctggttagggaagttgttcaggggatccctgctgcttttatttcttcaaagaagaaggttaggaagaggagtaaacctgttgatgtcactcctcctgcttaagacactaccagggagaatttaatacaactggtactgatgaaggatctacgatcaatatctttgcagacgaggctaagaatggtgtttcaaactcaggttcaaatttggtggagcagttacgtgcacagggatcctagcttcttacacatggtgatgtcttgattggttccaaggctaaaaatattccattgtagaagttagttagcaccaagcctccacatgttattgctcaaagatgcttcaccgacatctttggggaaactgttttttcttatctccttctagcttaactttcttttatttatcatcacatgcaatgttctcttatcttcaagcttgtgttggttatgcttacagcatggataacaaatacaagaaggtggttgagcttactaaaaagcttgaagttgtagaagatcatgttgttgctgcaaaagaccaggtgactgctttgaaggagaagatcaattctctagagagtgagttgactactcttcaagaagtggctagtggtgccaaagctcaagagagtagcttgaagaaaaacttggcagttgctcggaagaagaatttggatcttgaaaagtcttctcgtcttgcactcgatgaactaacttcaatagttgttgatcttaaagatcaagttaaggtcttgaaagagcaagtaactactcttaaaaatttaactcttcttgatgtcaccttctataatggcttatgttttgatgccatttataaagcatggtctaccaatggaggagcaaagtctttcagttggtcaggcttccctaacacacaggttttgaagtttgtcaagcgctgtgatcagcattttagtgaagaaactctcaaaaaatagacttcactttgaatggtggtgagtcagtggtcgaagaggttataggagttgaaggctgcaacctcgagcatcccaacttccctccttttgttgttgatgcactagttgcagaaagtgaggacaaggatgaaactattgttgatgtgataagcttaaaggatgttgtctgagtcctttcttcttttttgtttttagcatttagctttagtgcgttagttggtcgttctcagacggcctttcgatgtggataagccttagtaaaatattatcagaatttattttagttaaataagaaattatttctaacttaataaacttttattctattgtttgctttttcatttacattacccattaccgcttgaccgtttaacagttgtacagtacaccatgtcttaagaaactcgatcactgggagtaatgtcactacttcttaaagttatctttaccacagtagtcttaacatatatgtgcaaaaaaaattgaatgctcgtgcaacatatggctcccatataacataacataacatatgttcccctaagtgatgaaggaagtgccttcattggtcacttgtcatactgtatcccccttggccttcttgatcattgctcttgggtggtgttacacgtgtcagctttctccatttatccaaggatttgtgggtggaagtgttgaactcactaaagaaacaactgaagttatctcatgaccaaccctacaagctttactcagtgcttgagagtgtgtcaggtctgtgagatgtaattgattattttaaatgaagtactaagaaaaactttgttcaatgctttttctcatcaaagtaaatacaattatattactgtgagctaagttgaaagaaaaaagtacacttagggtagtagttgtagatttcattcttcacccaagcttagttgaagtgatcatccctatactaatgccctgttcgacatcttagtataggaaccataccttaacaatggacctcttaacctagagacaaatttgtcgcatctcgttattttaagaggcgattgattcacttgctcaagctagtaaatctcacagtgaagcgagttgttttgaggacatctacttttattggtagtaccatcatagatgcacccctttctagtaccttggtaccgacaatggattcaagttgtagtcatagcatgccaactttaaagtactaggttcaagtgctttagtgacgacataggtccttcccaattcggtcgaattacttctgctgatgcatctttcgtgttcaagaatactcatcgtaacaccatatctctaggcttcaatttcctatctttaaccttggagttgtagtgttttgcaaccctttgctgatatgtcgcctttctaagctcagacctttctctgatctcttcaattccatataatgaatcagccagcagctaatgattggtttccaagtcgtatgttagtcttcgat

SEQ ID NO: 220141 - DNA, 3409 bp, Cannabis indica
taaaaataactaaaatcctccattcagggctcccttcgaacatattccatgtacatcgcatcgaatcctagaactatgcgataactattccgggttaattggaagggagagacatcgtaacgtctaaggaaggattttatgaagggatgaaggtaaggagatcccacaacaaagaatagggacggaaacaaccacgtcctctgtagggatgatcgcggggttggtgaaagggagatgaggtctttgcgatgctaaaggacgcatggttctgagtcgcaataaattcaaccttataaatgtgtgcaggtttgatttggggacacgtgagaccaggtcctcgcatgaaaaaggttcattcagttgagcattgtcaacagaatctgtttcactcgccttagcgttctcttcctcttctgactcgcgatcaggaacctcgcagtcctctcccatctttttgacttcaatatcagggacgtgcctcgagtgggtaaggtgttctggggcggacactgtagattcactatcacaaatctcgattgtccctggtttagggagttcctgaaccatcctatctatctcgttagtagatagtgaacccagacgcgcatctctagcaacacgaacctcctccttggaaattgaggttcgtatgaagctggcgctcttattctattcgtcagcgaaagccccacctcctgagtcgagcatttgggtgcctgataggttgctcatctgaaatatagaagatctttttagtgtggtgcaagtgcgagaataatataagtgacctcacctgcataaaagaaccattaaaaataaagaggattaactagacatctcttgaaatggctgggagtgtcacagtaacataatgatcatgtcaccccatgaaaattaaggcaatgagacacacccaccatttcaagaactcacctaatcctcgcaaaggatacatcgcacatgtacaactaacggtgtatctcaagaaattgctgaggttccctagtatcccaaggggcatgcattcctcgcaagagcattgggttaatgggaaatcctcaccgtttcgagaaacttggtttgtcataacatgcgattaaaaagcaagaaaaaataaaaattggttgtatattgcaaatggctgggtgtatcacagtaacccaaggaacatgcatacacgcgcatgagcattaagttacggtggcacacccaccatttaaaagacccaaccaatattcataacaaaaacatgtataaatagaaaggcaaacataaacccgaagttctaaataagggttgaagcggctaaatcccagattcactaaaaatacatatgcgagtatgcatgtcatctcaatactcgcgagtattcaaaacactcaacaaaaagatgcggatactcgaggtgttcttcctgaaacccacggttactcaagtttcaggcccatattctctagaaaactacccagtttttaacaggaaaataagattctatatacacttccgattatgtcatgcatattatatctcctaaaaagacagaatgtagatcaattctcagaaataagggaaaatacttgcaaatagatttttgcaataaccttggatacatcgatcactccttggtcgattccgtgagattcagaaagttatgaggattgctttctggaagaaaggagaagaaatctagaagaggtttggaagtttcaaaaattcagagtaaagaaaagagagaggtgaaaatgggagggaaaaatgtgagaatcatttcgtatcaggaggcttgaataccattatccctcattaattgagattaatacacgtggcagaagaatacttaaggtcttccaatgtaacagttatccataaccacgcctgcacggatttcgaagagtttcgtgacgttgcaccccaaatgggttaaacagaataattaaagccgtcattttaaaaccctcgattggacacctaaaggtcaccgtctcacatcccttcgcctgcctctcgcttatagtttccctcatgacataatctgtcagtcgcgaaactagggacatgtcttatagtgagattttctcacctagaaactcgagaccagactcttatgaaaatgacacatgtactcactctcctcgtggaaagctaagatgtcagtgagagaccccttgagtacgaaccttgcctgaactagactcagcgagaagatgtgaccatgagagagtctagtcgcatttgtattgctcgcatagagtaggaccaaggaacggtttaagactcgcgtataccgagatatatgcgagtactttcgagatcctcctgcgaattgtaaagatcaattctttactcttcgagcaggtccaaatgacccaacaacctcgataacccgataaaggacttgcatgccttaagttgccgacttattacagggtgtctgtataagcgatttaaacaggacggagacatcctagactcgattaagtcttgtatgcatcttaagcctacgagcttatgcaagaatatgaacaggcaactcgcagtacagaagtcgcatacgttgtggtatttagtgaattaagctaaaactgtccttcatttattgtatttatattttttattaatttaattgttgtaattcaatgtacaaacagattgatactgaattcaatctctatgtaatcaaaggacacttgctctgtatataaaggagtgatccaacatgaaatggacaagacttagaaatccttgcaatagtggactaagcagaccgtgatctaactgaaccactatattcatttgtgttcttaatatttccagtttatttctagcatttttgttcttagttcgaatactcgccactctaggctgagtactcgcatacttttctgctcatcttattattgtatcatttattccgatgctgtctaaattccttcaacaacaaaaacaaaagattggaagatcagttttgctgtattttgaaataatgggttttctttatacatgaataagaggtattacctttggctagacaaattaatattttaagatttatttaggtgtttatggattgaatataacttccaaaggtataattgtttaatatttattttggtggttatagattgaatatgactttcagagattaccattttgttattatggctgacatattcataaaatttgattttatttaaaatttaattttgagaatttgataattggcttaattatcaaaaatagagcaattattagttttttcaactttaaataaggtagtaattttgaagatatgattgagtggtatatagctggataaatcttcaaaagttttgagggtatgttaattattagtataaaacgatagagtgacatgcactataataaaagaaatagtctgtatgtacagtat

SEQ ID NO: 220142 - DNA, 2450 bp, Cannabis indica
agatcctggtaaaataaattccaacagggcgttgcttggaactgtagagggttaggatagacctttatagttctgaaattaaagtccttggtgagactgcgatccctgttttttgtttttctgtctgagctcaaagtggacgctgctcctctggtacgcattctataatccttacattattactttcatatatttgtgtcgggtattggggcagctagtggtatcattttggcatgaaaaaatgactttatttttgtgtgtgtgtcttgttctcgtaatcatatctctggcattgtttattcggatcccccgtcctactcgtggcttctatcttgtgtgtatggccctccatccttccatgacaagaagaattttcgggctgagttcatgaaggttggagatagatttggcagcccttggttaattttgggtggtactaactttgtgctccgcgagtcggaacatgaaggtgccactgacagggaccagtttattcctttcatttttgatctggtcgagtcctggggcgtcattaacatgaatattcagggcgatatgttgacgtgggacaatcacaggtctagcaagaaccatgttaagtctgcgcttgataaatgattagttaacggagcttggctcaacttattcctgaaagttattatttgctcttatcaaacgagcaactctgatcatagacctttgtgtctcttttctggtgggttggaagccaagtttaaaagatgtttcaagttcgaagaatgttggatgcgagatgagcgtagtaatctagtggtggcccatgcttggaattccattgctcacccttgggcccctgcttgctttttcaaaaagattggagccactcgggttgctcttcttcactagcatagatctcagttcggtaaactggacgctggtattaaagagttggaaaaaagacttaatttgatgcagagtttacctgcgggttctcgcgactggaagactgaaagtaacatccgaagatcccttaacgagtccttagaaaggaaagctttgtactggaggcaaagggctaggatttcttagattaaagatggggataggtgttccaaattcttcttccttacggctgctattagaggaaggagaaatactattgagagtattttaaacaaagataacatttggatcacttcccgtgacttaattggccaagaattcatggatttcttcaaagggatcttctctgggtctatcggtgatcagaggatttactgtaatcatctttttcatgagaaaatatcttgtgcagatcaggaggtgctccttgcggcccttactcatgaggaaatccgaagtactctattcccaccataaagcccctgggcctgatggaatgtctgtattatttttcaaacactattgggagtcggtgggtgatgacttcagtgatgctatttctgacatctttaggtctggaaaaatgcacataggtattaattctacgaatatagttcttatccctaaagtctagaacccaaaaagaacaaaccactttcggcctatttctctttgcattgtgatgtataaggttatttccaagattattacaaatagaattaagccaatttgacctaatcttatttgccccactgaagctgcttttgtgcctggtcgaaatatacaagataataatgtgattattcatgagattatccacttgttcaaccgaaagagaggcaaagaagggtatttctccataaaaactgacctaatgaaagcttatgataggctggattggaagttcattgaccatgtgctttcttgttatgggatatcatggaagttctgcaattggatctctcagtgtatcacaaccaccaccctcaatatttgcctcaatgggggggtcagtgggtaagattaaaccctcttgtggccttcgacaaggggaccctctgtctccttacttgtttatttgggcagctgaagtcctgtctaggctgttataagaagccctgtgtaagaacactattaagggcatcagattgaggaggggaggcccaattctctcccatattttctttgatgatggcttaatttttgtgggcaaagcaaatttggatgaagtcaaaggttactggcagtgcctagagaggttctgttcttggtctggccaataagtcaacaaactcaaaacttccatttctttagtaaaaatacttccactggtttgaaacgtgagatcagggaggttttggaaattggttctcctgaaggaaatgttaagtatttgggccttcccttgttcagatcaagacaaaaggatgcagattttaacttcatcctggacaatcttacttctaagttacaagggtggaaagcgaaaactttgtccaaagcgggccgggctaccctaatcaaatttgtgggcttgtcgatgttgttgtatgctatgcaaaccacta

SEQ ID NO: 220143 - DNA, 8059 bp, Cannabis indica
gtttttcaaaatagtacaaaatactcttaactcaatttttgttatttttttttcaatataatcaacctaaaattagtttttagcacgagcaaatgcaaaataaataaataataagccaattgtagattgttgcatcattaattcaggtgtgattttattcaccacgtcgaaaaaagaaatataagcctaggatctataatataagcagaggtattcacgaattggtttgatccgaactttcatatttttttagatcaaaccagtataacggtttttcgaatattagaaaccaatccagactaatgaatttctcaaatcaaaccaaattcctaaccattaagaaaggtttggtttgatctgaaactacaatttaagtagaatttataattattcatattttttaagtaattgtactatttttactaagtttttaattttatttttcaaaatatatatttaacatgataagtaatagatatataacatataaataacaacataaaaaatattctcaaaagtcaaacataacataaaaatttaaaattcatgcaataaaaaacttcacacacaacaaagtatataattatacatatagtcatatataaaaaaaaatatataaattaattatttgttataaagagtccggtccagtttaactgttaactatctattatgaaccgcaatcgaaccaatacgcgataaacggtacagattaactggaccaccaaaaacgatttccccgattacggtatacaatgatttagattgtcgcgatacggatttaaaccgcagttttctagtttcgatgaacaaccctaaatataagagcattgctattagacgctactggtgtccatcaccttctatatgtagtattttataattggttagcgatatttcctaaaaactattttcttaaattatatgaaacttaatacttaattacaccaataataatatgacaccgaaaatactaaacacaaataatattttttaacatttctcattatataataacaaaataatactcattaataataaataaatagaaaaatgctaaagggcaccaatggtgctagcaccttcctatgtgttaatatcgctattagttcaattaagtatcgggcccacataatttaatataataactttaagagagtatcgctagccaatcgtaacgccacatgtcaagaaaaagctagacactagtggtacctagtagcaatgctcaaataaatatggttacctttattattttaacttcagttccccttttcccaaaaaaaaaaatctatttaaggcttgtccaactagttgagatttttcaattcatcatgaaatgaaaatcataccaaccaacctaatcattcatgttcattttaagtctagagagagagagagagagactataataaaactcccaacttgttcagcttttaataatgttttattaattgtctgttatttaagtaatatagaatagtagttattaacggtttataatccctatcattaaaccacacattaacccataacactaattttgaattttcaagagttctcttttttttttttaaacaaagaaaacaaaagacagctatgcttttacatatatatatttatagatttggagagaagtagtaggagggggaggaggaccataaattcaaagtcttgactttggatttagaatgaactaggtagaaagaagcagcagcagcagcacagaattcatccaaagattaaacctttttcaagttttcatcatcatcatcatcatcatcttcttcttcttcaatctcacatacaaattttcatttggtgagttatacttcttgaattttgacccagttctctaatctcttatatctaaaaaataaagttgtttgaacttggggtttgtttgatttttggtaatttcaaaatttggggttggcctttgaaatctgggtgttttgtttgttgggtttgttgaaagttttgatttttaatggttttctaggtatgagttttggctatacttttttgatatgaaaacaaacaagacaatcagacccagaactgaaattatttgatgatctgtgtgacttgtaatgcattgttatctcacttttcatattctaagttttaacatggaattgtcttttaatcacttgggattatagattttgttttacttttgacaggattcacaatcacaatcaatagaagaagctggtcatgagttgttgttctttcttcagtagaagaaaggaagattcctcagttaggcgaatagttgaaattgatgaaggtacatagctcaatctcttttgtcttcctttaattattatgaatatggagtatggagtatgaaccccttgatgggatatgaaaaagagcattgctagcactactataaagtggcaccttgtaattcgttggccaattgtaccaataacgatatacctcgtgagggtgttaggccccatggatgcccttaacatttctctatgaaaaaccatctcattttggattagggaagttaatttaccatggcaaggtaggtacctaagggtactttccttaatgggggcgagttcgggggttctttgttgggtagttaggaatgaatattcatactcgatgcagggttggggaactgggaaatgttaaggtattgataatactcatttggtaccctatgttttataaaatcagtaaaagggactagaatcttagactcggaatttgattaaactaatgtgcttggggaataaatcgtcttcgtgggtcatcttaacattgcgaatgtaagcaaaagaggaatgaatattgaaaatgtatatggtcaaattggagtttaaggtagggttttctactgttttgtaaaatgtaggggtagcaaatgaaaggttagaactaatattgttatatgaaatggtaccagaatggtttacaaaatgttaactcatgatttgtgttatgcagttttgtcaagcctccacaatgttagattgtacagttacaaggaattgcgaatggcaactgaaaatttcagttccgggaataaaattggtcagggcggtttcggttctgtctacaaggtataaacaaaacaaaatcacaacatgttgtcataacacttggattgcccaatgcatcatttctcatgatttattttttctctctttccttgaaatacttgtccattatttgatatttcaagtttgctatcgagttttcctgaaacattctaggtggattaggaacttgtttagatagatttgctccatcttttttgtacaatctttatttattttcatgatatgttcattattcgggaaaaaaaaacaataggcaagattgaaggacgggaccatggcagctttaaaggtattgtcagccgaatcaagccaaggtgtgaaggaatttttgacagaaatcaatgtgatcgcgaatatagaacacgaaaaccttgttaagctacatggttgttgtgttgaggaaaatcagagaattttagtctatggatatctagaaaataacagccttgaacaaacacttataggtaacttactgtacattcttactttgatcaattcttttactttcaaggatttgaagtaatggattctttccacactacattttttttttcaggtggaagtagaagcagcattcaatttgattggcaaacacggcgtagaatttgcattgacgtggcacgggggctagctttcctacacgaggaggtccaaccgcatataattcacagagacatcaaagctagcaatgtcctacttgacaagggtcttagggcaaagatatcagactttggccttgcaaagctcatcccagcaaatctcactcatattagtactcgtgtggccggaacagtgtaagttctcgaatttcagctctacattaactttagtagggattgaatcctggaaaatataccagttaaggttggctttatggtaaagatagtattgtattaaataatacagtacaacacaacacggtataccaaacagacccttagtttgttcttctttagacccttttaagttgcaaagacataatttcagttgcttggtgtgatacttttatttttcaagcaggagttgataattatcgatcggggtttccttttcgatctttggtcatgggttcggtacattttaaccgattatgtaagcaattttcgaatgagggttacatggtgtagtatgatttagcttgtagttggtttgaaactgaaggttttatcttaatgttcaaaaccaattaattagcaatttgaattgtgtgtgtagaggttacttagcacccgaatatgccataagaggtcaggttacaaggaaagcagacatatacagtttcggtgttttgctactcgaaattgttagtgggagatccaacacgaacaagcggttaccagccaaagaacagtatcttctcgaaagggtatgtcttgatcccagttcaacattaaacaagtccgaactaattgaatactagttccaaaaattcccaaaatggacgtaccatctttcaattgaaattttgttaatccatttagttactacataatgttgttaaaaatgtatctttcaattgtaggcatggagattgtacgagagcggggagctcgaggagttggtagactcgtcgttgaacgatgatcttgagctcgaggaagctaagaaatttctaaagattgctcttttatgcactcaagacatgccaaaactccggccactaatgtctaccgttgttgaaatgctaaccgggcaacttgaagtgaacaaaaaggaaatatctaaacccgggttgctatccgagttcatggacatgaaaggtcaaaagaataaagtcatcaactcaaaagacatgtcttccataggaactacaaactcaggttcttcttcagttgctacaatgacttttacttctatacttgatcgaagcaattaaggttgtcagtcagccttgttttaaaagtctctaccttttttcgttcatttcactaatgaatgaaagttttttactatcaaaattgggcaaaaagaaaagtcctctttctactaaaatgctaaccaaacaattcctttatacttttaacatattttgatctatattttgtgtaaattcttttataagaagaattttctttacctctaaggctaaatggtcttttgaggttttctatttattttttgttctttctttcttcaaatgttcatttacagttgtacagtgtaaaactcacctatatatatactatgatttattttcctgttgtgttccttgatatcatttcttttatgaagaaaatatcgatatcatttctattccatttacttaaattttcttttgatgttatattgtaaaataaaaataaaataaatcaaattatatatatataattcgttgttaagttgtctcttgcctgcttatgaattcagtagtagttcgaaagattaacctattcaggaatcataaccccgaaagagcttgattctgtaaacaccatagagaaagagcgaaaggaatatctcatcgagataatcgtatttttttcggttgatgtgtataatagattcctaaaagctatacctagataggttgcttgaagttgcagcttttcagccaagtatgaagtcctaagtttatttctctattactcatagtaattggagatgtcaaatataaatcaatgaagcattggttaacttattatcatctcaaatgaaaatttattattattattatattgtatatgataaaattatcattttacatgtggaaaaatgaataatacaaaagaaagattatacatatatagataagtagtaatagtagtaactagttactagtttctagttctatagcatctataccacaaaatcaaaaaacaaagaactctataaccaacaatgaaacccaacatcacagctagattactccatttttgagactcattcaaaccttgttgtctcaagaatccatctccataaagactgcaactttttccatcatcaaaatctaaacacctttcattactccttctctcatttccatactcatttatcaagaaacactcaaaagggtacttgaaaagactcaaatagtgcatgaaaatccaatagttaggcaacctatcttttgatataaagtaccccgaaaacagaaagaaagatcccattaagcctgcaatgaatgagtttcccatgatgaaatttggtactaaagcactaaaacatgctacaaatgagtttgacatcaacaaaaccatccaaaccacaagtgaaaagtagagaaaaccgtcgagttctcttcttaacccgacgagaaagtagactggtgtggcgaaaagaaagcctaccattagtagaaaaggaagaaagatcaagaaatttgacatgacataggaagaaactctataagcacctctttctgtttcactcattaagattcttctctcatttaagaagattggtaatccttctgttgatgaagataacaagaatgttaaactaaaggcgaaaaagcctgtttcggtttgtagaacaatctttccttgtttagctccaacatttaagaatatagttccaagtattaaaccagctactaaagcttgaacaactcttgtagtgaaaagttgttttgttctgaaaatgtttctgcagaatctttgtcctagtattacaacttcttcgatttgtgaattcgtgtaggtaagtgactcttcttcttccttgtcgcgacctttgttagatttaagccgatttctggactcttctgcagtttgtgttgtagtaactaagctctcaacatcatcaatcgcgaattctagtacattgacatgtttaggaacttttcggttaagtctttcttcaagatgattgagtgttccattatgagctaaattcccatttgagagaaggatgatttgatcaatgagctcgagtattcgaaaaccaggttgatgaattgttagaataactgtcttaccttgattaaccaccattgatttgagcaatgacatgacatgaaaagctgaggcagaatccaaaccagaagttggttcatcaatgaaaatcacagccgggtcatgaactagttcaacaccaatcgaaactctcctcctttcgccacctgaaatggcattgtttgaaccaccagaaatcattgaggctgcaacatgttctaaccccaactcactcaaaagctctgtaactctatctgcagcctcttttcggttactagatcgccttaaaagagcgctatacatgagtgtttcttcaactgtaagtaaagggaataatgtatcaacttgtttaacaaatgctgatattctcttgaaacttttaatctccataggtttgtcattaacaagaacttcaccagagatttcattagccgaaatctttccagctagagcctcgagcagcgtggttttccccgccccacttggacctgcaatcgcagtaagttctcctccttttgcttcacaatttatgctcttcaaaatcaactttggaagtgtttttgtattgaaaccaaaacaatcccatttcatgtcatcaaaaagggttctcaatttgtatgaaaggtttcgagtttgtattgaatatgaagctggttttcgggtaacaaaaactgggtttttagttggtaattccattgaagatagttaagagaatgaatgaatgaatgtgttgtgattgtttgatgaatttgagagtgaaaaaatggaagaaaaaaagaaagataaaccaacattaccaataactcaattgagtgttgaaactaagtttagacaaatatttcatgatgtgtttaatcataatgtgtttgtttgtttgaagagaaaatgtgggaaagtgtttaggaaaatcaagaaagacttttgagtttgcttatgaagttgtttttttgtttcagttgagctgattatttgaccatataatataagacttggtgtgttggttgccttaactatctgccttttactacttttgtttcacaaaactcaacaatttggtaagaaaaaaaataagaagaagaa

SEQ ID NO: 220144 - DNA, 2514 bp, Cannabis indica
agcgcggctaagttctctagttatatgataatgacaagaatgtccttaaagatttagtacttgctatgttaggaatttgcccctgtccacttaacgtcaagtgacgaactcttttttgcaagtcaatggtatgactaccaacctccacattacgacatttgtcacccattatggattgagctaaatcatgaatcttgatatttccttcaaaatcttcctccatgtcttggaaaaatgatctccaacataaattattaatcatctcatttccaacgtcttccacctcaagattgagttctggcttggaagaaatcaacccatttgccatccaaaggtgaactagtagtgtcctttctatttgatgatcctttggaaatatagcacaataagagaagcaacgtctctgctctactgaaagatgaagtagcttaacttcaaagcaggcaagatcgaaccttcctccgataaattccaaagctcactgtgcataacagaaagccactccttctcatcacttttgaaacacattaagcttcctaaagcttttgctgctaatggaactcctttgcacttcttcactatctcttttccaatttcgacaagcttaggctgctcttctctttggttaccaaatgcacgttgcttgaacaataaccagcagtcatcgtttgataaactagtcaactgatgcattggtaccgttcctatgatggatgcaacccttttcagacgagtagtcacaacaatcgaggcaccttttgatccacattccaatatgcattttaacttgtcccattcctcttgatcttcattccacacatcatccaaaacaatcaagaacctctttgttttaagcatgtcttgaagttgattctgtagaggatccaattccattgcttcacaagcttttctagttccagattctatgattactttgatcaatctacgcacatcaaagtcctcagaaacacaaacccacatcttcgacttaaaatgcgctttgaccctctcatcattgaagacacattgagcaagagttgtctttcccatgccccccaaaccaacaatacagtaaacagaagtatcattacaattgatggcatcattaacaagaaacctaacaactctctccttatcctcatctcttccatacacatgtggttgagtagtaacagaagagtttacattgctaaaaataaaatattgaataaagaaaatatttggaatatgtgttactacatgcatctttataccctaaactaaagactttcatgtttgaagtcatttatggtaaatgtaataccttataagaaagaataatatatataatgtgaatcaagatttcctgttaaaaattagtgtctcatactatgttaaactaattaatctaatttatattaaatatgtgaatcaatataacattgtaactacacaagacaattagtctgagttgtgagtccgtgcataccgtattgacccgacttatattgtacaatctttttaaaatatgaatcgtactgtattatgtcatgtaataaaaaaaatatagattgtatcttgttgtgccaatcttttaaaaggtagacccggcacgacctataggtctggtatatatttgtgtatagtgctggcttgacttatattgtacagtactttttaaaatatagattgtaccatattgtaccatatcataaaaaaaatacgagtcgtatcatgctgtaataatattttgaaaaagtagacccgacacggtctgtaggtccagtatttttgtttagtgttcgaatttgtgtcgtgttttactcctactgatctatttttcttaaaagggatagcccgttttcatatttgggctcgaatttcgtgctttattttttttacatttattgttaaaattaataatataattactaaattatatatatttttcataactttaattatatttatatactttttaataatattttacaaattattatataaattaaaaatttagaattattataatttaaatatttacttataaattataaatgcacaaatttttatatcaattgacaaatacatatctatttattattattaaatgatagagtgttttaatatatcgtgttgtgctttttatacttctctcgtgtcgtgccttttaggttagtcgattcgtgcttatgtgatgtgttattcgtgctcgttgtgtcgtgttgtgcttaagcacataatttttgtattatgtcgtgccaatgagcagtatcgtacctaagttcatattttttcttgtctggtcgtgctcgtgccacccggactcagtgctcgtttcaagccatgtcaaaaagcccaccacgtatttagagcactactccctactatacataattcatatatatataacatattttatcctttttctaaaactttataccctcatcacacagtaaaaactagaaggtcttgtctcaatttacaaaagacttaatgcattgatcataaagtaaaaatacaaggacaaaaatg

SEQ ID NO: 220145 - DNA, 2135 bp, Cannabis indica
ggagtgggtaaaccagaggccatgacccaaaaaacagacttccccatatccatgttgtaccaatccccatcctcaggccattctctaatgatcagaagctttccattgattatccatggtctatttctgagaatggctttacaatcctcttgtttatcaaagaaataccccacacccctggtttcattgatttgagtttccaaaacccttttagcttccaaatctgattgagaatatctctcaatctagacctggatacatcattaccacccaaaaagctcaccaatacaccagtgtttaccacttcagcagtgagttcaaagtcaggttcaagttctagtgacattgactccaagaaattgctgcgcaagacttcaatatctcctcttggctcattgacattattatttgtagtggaatccaccaactcctctgctgtgtcattaagagctccatccatatttacttcagaggattgaggtaggtgggaaggaccttccacaaccataccttcaggggccccagcattaacaattacttcctcaataatggggtcacgagacaaaccaccactatctcccatgcctttactgagaagagacaaaagactctgtaatggaatagtgcaagaatggaatattgcaaaaaggcgacaacctttagaacaggacaagagtaggcaaaactttaaaaaataagaacaaagcaaagctttttatgaaataagtggactgatacacgaaagaactagacctacccaaaagataagggattgaggagacaggaatgaaaagacaatactgtttaggatagacattcaagtcaagttggaaactccaacactctcacttgagagaaaaaatttaagatgatataataatgttacatgtttttgtttatataaataccttttagatacaaacttgctatatcagttttgattctgaatccaaattttagattatcaataactaatctcagtctcttattacaatgatgataatatatgtttctccatttgttgatttttttttcctctttctttggatgagataaagaaaggagttctttgatgagtaacaatccattttggcacttacaatgattcaatctatcttctctttttgtacaattctaatttttattatagttatttaagtgaagaactttattatattaattgtatcattaatttcatattattttttaataaagatgataacgaccttttgagctcgaattaatttttttgaaaattctagaaattgaaaaaagttgtatttaaaattacttaagaaatatagaattgaaacattgttcaaatatatatatatatttaaagaattgaaagataaaaagtaataatatttagtggggcaattatggcacaatccaaattggaggtcgtttccataccctatgaaatatggttgagtctaaattgaagtgaaatttacaagtttgagttgaaacattgtatactcccaaatcacatcttaagttggtttatttggaagtgaagtgatatctcatcatgagtaaaatatatgctatttggttgacatcccttgaaattagaagctactacacatatacatgaattatcaccaatgaacaaactattttcaccaagacatttaggaggcgtttaggttgggaggaatgaaaatataggaaggaaaatgggaatacgaataagaataggaatggaatggaataaaatttaaaatgcataaaaaaaaattgataagaaaatcattaaatttttttctttgttacattggaatggtcattcctttctttttaaaatagaatagccattccaccaaaatggtggaaagagcattccattggaatgctattccaatactttaaaatacaaccaaacaaaggaatggaataaaaattgtttcctttccattccattccatttcattacctccaaccaaacgccaccttaatctcaatccactttccttgctcaaaatctagtttgtaaatcttgaacaatgttgtcacacgctctaagtcataattcatcttgggataaaatcaaaacacctttcaactacaaaagttcccaccacttgattcacatatatagtttggattcatgtgttgcttctttagttgtc

SEQ ID NO: 220146 - DNA, 7741 bp, Cannabis indica
ttaaacaacatacttgttagtaaatctaagatcctggtaaaataaattccaacaacggtgtccctttcttctatttggattggtccatgtgaatctgttctctctgttttctcgcggtgcattttatattgttcctgccccatcacttaattagttcttataccattatcaaagtaaaattacttttatgcgttcaaggttatttttatcccttgcaattgcctctcaattctacaatttctaagctcgtgacttattcagtctgagcttgggtgctgtgaaactggttacccaaaatatttccatgtgtctttatgggtcatatttgttttgatgaagtaatcatttaatattttttttgggaaattgtctcccctttccaatttaccttaatttttgtatttcaaatttaaagcgataatatttaaccagcaagtgtattataatccaaaagcgataatagtgttatctctcaaaatcaatacaactaaaagaggagtaggtcattacctgctaactgaggggacaaaacctctataaaattctttgtgttcttttacttcctagttctaattatgtagcatgtggaaatcatcagtttaatatgactccactgtcggttggccaatttgtgaggtcaatagttcggtggtttcattgagagcaagttgatatcatgtttgattaaatgccatggttaacacgaggagaactgtggttgcaccatctgcatcattgggtcttcctcaaaaccctttgactgtagatcttgatctccatgttcaagccacgactagaattcccatgaacactacagatttggtcaatcctgccaccacgataggtgcctcgaatctagcaactacaactggccagagtgacacaaacatcccaatggatccgagcaattagcccctgcctttgagacaaaatcctccacaggcgcctcctactttaggaaggatccttgttgaacaacaactgaacctcgtccccagtactatgctctagagacttgaccaggaatcggcgagccccatgtggacttggtggaagatctcaagttagctagacttagagaggccgtctaccaagtcggcctaaatgaagaaccatgcgctgctgattgtgatgtattcactcaatagagacacaaattcctaagatggatggatgaccaagagtacatcctccaatcttaccagtttgagctggatcgccacaacaaagaagccaatgacctgataaggcagttcaatcaaaaaaccactagaagagactaggatctcatcagagagatccactccaaggaagactagttgacagatcggggaggttctatcagcatgctgacaaattagcttctttaggaaccaggacagacctttccctacccgaaggaggataggccatgccatgaaagtttaatggcaagaataactagatcccagcaactagcaacatggggggccggcaagggatctcatgctccacaatagcccccatcggctaacctttggccggccaaccacctactgatgcatctctggctgaccaagggattgtactcagtccctaaggggaacgagccacccaaaggttaatcttcaactagctcgggccagaaacgagtggaaacacccaaaataataatttgagaagtgagactgataacttcaagaatctagatccaccaaacacgagcaactaatgtgatctacctcctgtcaacacacaggcaacatcagccaaatggggagtcataggcagccaggctctacttggtgcagggctcactaaccatggacatatacctagtataggctttggctagcgagagccaacagccctacctggaggggctagccaaggcctgtagcacaacataggtctagccgacctccaccatacactctcttagattatggccagtgaaaccctggcacatctgagcctacaacccctccaaggagggcaagtcaatcaagtccctatagtaacagatcattctatgaaagcatagttagaccaattaagggacatgatcaagggcctagctggtccaaaaccttcagatcttaagctagatcaatcaaggggatcatcattctcggcatacatagatgcgttgcccttgcccaaattagagattccattatggaagatgtatatcgggcgagaagacccactggcgcacatcaaatactttgggatgcagcttgacttccaaaagattgctagtgatgtgaggtgtcgcatattcccgaaaactttgtcagaaatgacttaccaatggtactttaaacttgctctaggaagattcaattcttggactgagttttcttgagaattttactcaccattctcgtcctcaaggctcataccattgtagctaaaagaccttgtcgaagtcaaacaacgacaaggagaacctttgaaggattacactagaagttcatggtcgaggccaccaagttcaaaggccttacagaagagggccgatatacggccatactagggggcatccttccattgagtgtcttctataaaaatatccaaaggatctcaagaaacaacatgaaggagttcttcgacagagctaacaacttttttttttcttttttttttggtaaaacaacaagcgtattataatccaaaaaccatttttacaacctaacagtatcctccaattagagaaactaccacatctataatctttataatgtattaaaccaatactcttcactactagttaccttttttgtccaaatacaagcaattctatttttgattacacttttaattctacatacaattctatcactattttccatctcatgattccagaacatgttgttttggttgctccaaattgagtacacaaacgctgcaacagcagcagaaataaccttctttttgaaccttttccatttttgctttctttatccatttgctgattctcatcaaggacaccgaggtggttccccaatgaagccactgcttgatttgctctaaaaaatccatcgataatgaacactcaaaaaataagtgatcaatcatctcactgccaccattataaagtaagcaaatatcattgtcaatcacccctgagttgacaacttcatcaaactagaagaagctatccgacaagcccagatagggcaagtcaacaatagtcaattacaggcatcctacaacccatgacttgtcaggcgcacatgcaggtactaacaactctgcccaaacctctagtggcaagaacactaggagaaaacacaataacaacaactttgggggaaataattacaaaaggggaagtttaacacttctcccatgccaaaaaactagaaagaccatgaggagaagtatacatgtttcaccctcctaacagagaaacttgaggccatcttcatggccacttagggaacagtcctatacagaaagccctttcccatcaaaagggaactgtgcaagagggacatgttgatgttctgtcaatttcaaaatgactgcaaccgtgacaccaacgagtgtcaaaatttgaagagggagattaaattcctcataaggaaaaacattctccaatttcattgttatgtgcaggctgactagaatagggacaaggtgctcaaaacggagatccaatgccaccactagtggtaggtcatttaagggtcatcattatcaaatcccatattgtaggcgagaccagcaaagctaaggagctatatgcttggaaactccatcacgagcctaaaagtgacatcctgacggctgaagaaaggggctctaagcaaccaaagcttggagtgcccacgatctctttcacaaaaggtgatttgctcaagtcagtttcctgcacgatgaccccctggtcatcactgcacaaatcgagaatatgactgtggcaagatgtatggtggacaatggagcctcctccaacattctttttaaatcaacatatgaaaagatgggtgttcaactcactaatttggaaccatgtagtcaagtgatgtatcaggtatatcaaaaaatccagccaccagaactctaatggcaaagttcattgtaatcaaggtttcctcggctttcaatgccatgataggttgaccagctctatacgacctgaaggcggtaatatccatctaccacctctgccttaaattcccaacaaggcatggggtaggatgtttaaggggagacaaaaaatctgcccgttattgttataacttggccctgtccaaagccaagaaagagaagatgcccaccgagagctttgaagaagagtctagaaaaaagcaataaaatctagcccaaagtggggacgcaaacatagatcctcgctttggggatcctacaggaggcttcagacctgtagaagaattagaggaagtgaaggttgatcccacttctccgactagatgattgaagattgagaatgctagaaataaaatcattactgataatatttctaagggcaaacctggacctttttgcatggtcacatggagacatggtcggaatcaatccttccatgatgacccattctctcaacattgatccaaacattatacatgtataacaaaaaaagaggttgttggacaaataatgctcccaagttctcaaagatgaagtcgagaggctacgagcccatgacttcataatgaaagcattctatccactttggatatccaaccctgtgctggtacccaaacctaataaaaagtggagagtgtgcatcgactttaccaacctgaacaaagcatgtccaaaggactgctttctacttcatcgaattgaccaactagttgatgccactgttggccatgaaatcttcagtttcatagatccatattcaggttacaactagataaagatgcatccgccgaatcaggagcatacaagcttcaagacagacttaggtctgtacagtaacaaagtcatgccctttgggctaaaaatgtaggggccacttatcagaggcttctgaacaaaatgctcaaagatctcattggccgcaacatggaggtgtatgtggacgacatgcttgtcaagcccaaaaaggctgagggcatgtggacgatctagacaaattcttcaaaatcctccacaacagcaacatgaagcttaacccgctcaaatgttcttttggggtaggcttgggcaaattccttggcttcatagttaatgtcaagggaatagtagaaaacctagacaagatccaagccctttttgacatgaagttgcccacaatctttaaagaagtacatagcctgacaagacgtattgctgcacttagcagatttgtgccaagtctacaaacaagtgtgtacccttcttcaacattctcgtaagctacaaaaaaaatctagtggatagaggaatgtgaaaaagcattctaggagttgaagaaataattggctcaaccacctatgttgtcaaagcccctagacaatgaagagctatttgtgtacctaccagtcacaaaatatgatgtgagtgttgtcctaataagagaataagacgatgtataacacattgtatactacattaggaagagattaattaacagcaaaagtcggtacacattcatggaaaagctgacctacatcttgctcttggcctccaaaaagctaaggtcgtacttctaggcacactcaacaaaggtgtacaccggtcaaccattacagcaggcttcacataaacttgaagcattaggtcgactactcaagtgggccattgaacttggccaatttgatatcacatatcaaccaagaatggccatcaagggtcaaacccttccagacttcatggctgagtgcacaaactcatctcttgaaatctctaaaaattcagaagaaaagcaagagccagggaagcagcgagagcaagagcagtagaaaaaacctaaagagctagcatggaaactccatgttgatggaagcttcactaaccaattgttcggtgcaggcattatccttataacgcttagagggcaacaagtgcatggagtaatagaatttgacttcaaagcctcgaacaacgatgctaaatacgaagctctaaaagctggcctcaagctggcacatgaagtacatgatgaccacctagacataattagcgactcttaattaatcatgaatcaagtcctaggcgaatatacaactcgaggtgaaaaaatagttgcctacttgagcaagataaaagacttgctaagtcagctcaaaggctacataaccaggcagatccctagagaatagaatgctacagcagatgcacttgcctttctggcgagcagcaccacttctcataaggcaaacatggtgtcaatacagttcctaaaggaacccagcattaccatccctgaagaagtcaacatattagatgacagtccaacatggatgacacctattatagcttacctccaaacttgagccttgctaaaaagtaagaatgaggcaaaaaatataagaagaaaagcttctaggtatctaatcctagaaggtacaggtggagcttctcaatgtcgctcttaaggtgtgtcaccaaggctgaggtcgagcgactaatgatagaagtgcatgaaggctaatgcagcaactatgtcgtggggcaaagcctatccaaaattatactctaacaagggtacttttggccaataatgatcgtagactcaatggactacgtcaaaagatgtgataagtgccagagattctaaaaaattccaagagctccacccaatgagctcacgatgatgcagtctccttggcccttcgcaatatgggggatagacctgattggtcaactcccaaagggaaaaggaggggtacagtttgctatagtcacagtagactacttcaccaagtggacagaaactgaacccctggcaacaatcacctccaaaaattccttgaatttgttgtcaagaacaacatatgtgaattcagacatccacaaaagattttgtcagacaatggaaagcaatttgatagtgacatgttcattattttctacaatagacatggcatcatgaaaagcttctttgtcatgacccatcctcaaccaaatgggcaggtaaaatctgtcaacaaaaccttcaagaacatcttgaaaaagctccttgaggaagcaaaaggtaactagcctgagttactcttagaggtcatgttttcgcagaagactactgagaagacgaccactgggccaactccattctctctagctaatggctatgaggtgatgttacttgtagatctggcgccactatctcacaggaggacaatctatgaccaggagaaaaacaacctcctgttcacagaatccattgaccaaatagatgaaagaaaagatcaagccaacctaaagctccaggcctactagaaaaaggtagcaaggcacttaaccaaacaagtcaaggacatcatattcttcataggagacctgctgctttgaagagttttcctaaacactaaagatccagcagcaggagtgtttgaacccaactaggaaggcccttatcaagttacagagataactagtaagggagcctgtaatctagcaaggtacaatgagaacatggaacttgttctcctaccaagatattggtatggagagaacctttccaaatactatcagtaactagcttacaacacactactctacagtagcagttctatgaaagagctagtacccatggcctcccactgttgtcgagcgaatttcgacaacactagttttgtgc

SEQ ID NO: 220147 - DNA, 2049 bp, Cannabis indica
aagaaggattacagaaggatccttttaatgaggagctgcaacacaaagtgaaagaaaccacgaaagcttatatcaaaactcagaaagaaatgtttgcttttttgcagcaaaaagctaagctcacctggattaatgaaggggatgaaaacacttctttatttcacaatagaatcaaagtaaggagaagacagaaccgaattctttctatagaaactaaagaaggaattagatgtgaagatgcagagaaagtgactgaagctttccttgattactacaagagcttattgggagggaagatgagtaatagaaggaaagtgcaaagaatagttatggctcaaggtcctttggttacagatgaacaagcagttatgctacttagggagtttacaaaggaagaagttagagaagccttatttgggattccaggaatcaaggcacctggcccagatagttactcaagctacttttttcaggagaattgggatatgctaagggatgatctctttggagcagtctcctcattttttcagtcaggctagctacttaaagaaattaattctactgttattacacttatccccaagattaagtgtccaaacacagaagtgacttcaaacctatagcatgctgcaatgtcatctataaagtagcaacaaagttgatatgctccagactcaaatgtatactgccagatcttattgctcagatccaaggggggtttgtctcaggtagattcattgcacacaatatcatgatatgtgaagacttaattagacattttgggaggaagacaaccaaaccaggatctgtgattaagcttgacattcagaaagcgtatgatactttagattgggactacttggaagaaatattatatgcttttaagttcctacacaagtttatccagctagttatgacttgtgtgagaactcctagatattctctcatgttcattaatgggacaacgcatggctactttgaagctagtagaggactaaggcaggtggaccccatgtcccctcttctgcttgttcttggaatggaatgtctgtcacggatcttgaagaaagtaagagataaggaggaattcaagttctttgagagatgtacaaatctgaaactgaatcacttatgttttgatgatgatgtgattttgtttttccatggagattttagaagtatctatagcatgttgcaggctctgaagctattctcttgctcttctggacttcacccgaatccttcgaagtcagcaatttattgttgtggcatggatgaaagagaaattcagagagtagtggatatttcagatttcagtaggaaaaaagttccattcaggtatcatggcataccaatttgtgctaagaggatatcaagtaatgagtgtgctaatctagttgagaagatgacagcaagaatcagagtatggagttccaggagcatctcatatgctggtagagcagtccttattaattcggttctgttgtccatacatttttattggagtcagataatgattttgccaaagaaggttataaagaacattgaagctatttgtagagcctttctttggaaaggccaacacttgatgcaaggtgcagggttaatagcatgggattcagtctatcaaaccaagaaaattggaggcattggcttcaggaaagtggaagaatagaatctggcagctataacaaagtacatttgggcaatagcaaataaagaagacaatttatggatcaagtggatacataatgtctatctcaaatgttcagattggtggagcaacaaaactccaccccaagcaagctggtattggaggaagcttattgcagctaaggaggcagccaaacactccttggactacgagcagctgatgcaggagaacaggtaccagatttccaaagcatacaaactgttcagacctgaaggagaaagagcaagatggtgccaaattgtgtggagtaggcagaatgttcccaaacacagcttttttctctgtttcattgggttaaatttgaatatctctatttatttcaatgtggtaaagtt

SEQ ID NO: 220148 - DNA, 2826 bp, Cannabis indica
ttttattttagattatttttttttataagtaagaatggaatatagtatatacatttgactactatgttttgaaatatatttgtatcatatatgtattagatttttaaactactattttttacattaaaatatttattgtatatatataaatatgtgtagcttggatttaatgggttaattttacatgtcaatcaacattcaatatgcacaagtgcagattttagattttccaatccaattcaatctgccaagtgcgaatattcacactttgcgaattgaattggattggatcgtgcagattaaattggattgggtattttatgaatacccctaaataaattttaatggtgcatgcctatatttttctcccataccaaacatactcatttttatagtatctttacttttctctcttaagttttctttccttccatttttcaccatacggtaaatgaaccgagaactaagaataatttacttatttattgtcataaattttatgtcatttttattattaaaattaattttaaatgagtttaattctattcaacaattaaaagttcataaatgattaatctataattaattttaacatgtgcaactaaatataatatttgatatgcgcggctgattatagattttttctaactagggcaccagctgtctctggccttggacgtggctctggttggaaagtccctatttgttggtgagtataatgtggttcgttcctttccttagttttctcatattctatggcgggttgttctttgggagtggggtgttaaggttttttggatatcgtcctaaactggttttttcggtgcaaaggttttggtatctcttccttcaaatttatggatcttggtcaagattggttttcgtagggttttggcttcggatctgggacatgggtgttgaaagtgtcatgtacggttttagatggctttagattgattttgggtgaggctaagggtgaccatttttggtggtgggggttgtccaagggatttgttatggaattggcgatggctggtggatttgggttggctttcaggctgtgctgactattttcttataatgtttttatttatttttttgcctttttgcattgttcatatttttaataatagtgttgatacactactttgctattggtttgatagtagggtttattcatggaaggagattttagtcatgtttatttttgagacgttgggggcatctcaattggctcaaagcacgtttgtattggtcgcatatctttgtccatggtcagatctgggggattctcaaatttttattgaccccatgatttataaggtgattttttattatgattgttattatcatggttggtcatttgattatctatttttattctaaatttaatagtatggttgctattacctaatttttattagatgatctttgactgatagtcattgatatgtgcacatatttattcgaattggagatctggcattcttcgcgcttctttaatgcttcaccactagctttggtcttttagttgaaggtgttattaaagttttctttcttatttttgtaaacaatattaatattgttgattcaactctttaaataatatatcatcatgtaatagactattatctaatttatttattaatagaactttttatttttcttcaaaatatatgtataatatttgatataatatatattatattattatgaatattttttagatatattcattcgtattaccccattgctagagctctgtgctataacaagtatgcaattttaaaaaaagtttacaacgaaccatcttaaaaggagtatattgatgcaatcctatctatttcagcatttaagaaaaaatttagtttatttttttatggtcgtgtacgttatagttatttaagatatactgtaaaattttgagaaatttaaaaatgtttaatacaaaatatgattcaaacagtctgttgcacacacaatttttcttattttataggcatgtaaaataaactatttgaatactattttttatattataaattattttgaatttctcaaaattttgaagaatattttaaataattataacatacacatctataaaaaatttaactgaaaatttttctaaatgtcaaaacaaatatgaatgcacttatatacttttgttttggagtgcattgtaaaaacactttatattataatttgaaaactaataaattgagaactcaataattgaatgccacgataaatagtataattatttattaattataaaaaataataaatttgttaaaaaaataataacgaaaatgataattagtgatatttttttttgtaggaatgattatatttggaagtatcgaataaattttgaaaggttgcattatatatagctggatgctcaaactactcttattaatttcaacgaatatgacaattcgtgaaaagaaaagataaaataaaaagtgtgaactagaaagatctatatgcgcttttcaaggaaataaagatctacatgcgtctaatttcttcttcttatctgctctcttcaattatttctataattaataatcttccaaaaatggcatatcaactattaattatcctttaaatagtttatacgatatgttttgttataaataaactccaactccatggatgtggaatttgacacttgaaaaatactacacatgacatctaatacgtgcaagaaaacactataggagatttaggagagtcgtatgcataactagccactctaattagctcaaagatgatataaaacttgaacttgaaatactttacaagaataacacaaaatcc

SEQ ID NO: 220149 - DNA, 10103 bp, Cannabis indica
acaatataaatgtacaactaacatactttcagcaatagattaaaaataaaacaaacacaaacttccaactctaaatttcaatacacatgtatgggcttgagtttgtttctaagaagaaagggtttgtgaagagttatggattttgccctaagatttgtgggcttgggttggactcatatgtatgggcttaattaaaagtttattttataaccgaccggtcggttacggtttttattttacgaaaactgtaaccgaccgtttaaaaattataaccgtataaaatcgaccgtacaatttttggcggttttagacggttttgggcaatttttggcaatttttggcggtttattgcgatttatggcggttttggtagttttttagtttaaccatatttttatttcaaaaaccgaaaccgaccgccaaattcgatgatgaagtaaaattttaacatttttacaattaaataatttttttaattactattttacaatttcctctaaaaacaacaagagaaagaaaaccaaacaacatcaaactaacaaaaaaaaaataataagaaataatataaaaatatcaatagttcgtactttttcgtaaataaaaaattataaactgtaaaaatatttaaaatttcatacaactatacttttatatattttcttttttgagttttttttgggtatttatgaacatatcccttttcaaactacactctatacattttttatattgtcttcttttatttttaccctctatcatttttaccactttttttaaacattatactaattttgcccctgtcactttcaagatactctctatgtgactctcttatgtcaggatattttgggtacaatacatatgaaaagaggtatgtttcaataaaatataaaattagaggtatatttgattaattgattaataaaaatggtatttttcaacttaccccgaaattaagcatagaaccagtcagttgggctttaatttgggcctatataacagcccataatctgaattgggcccatgaaaattcaaagtgttttactctttcttctccatttcctttatagttcgtttctatattttcttcataacaaagctattaagctacgacagacagatctcatctgtctgagaaaatggccggccggtacggattctcgtcatcttctcaggcgaccatgaaggtcaccaccactccatctccggatctcgctctcaccaatctcgcttacgtctgcccctccgatctccagaacttcgctgtccctagctccaagcttttcctcgctttgatcggaaactcattcgttctttctctttgatatcctttattaactcaattatcatcgatttaatcctttttgtgttcttgattgttctgattcttgcatttcgagctttacatttcctaatttcttgctacgatgataagaaaacatgtgtttattgcaaattatattgttattggatttttcttaactaagaagatactcctcatccaagcatacacagtggagaaatcgctctaaatgcaatccaacgtcggcatgcgaaagtttctactggcgatgctgtaccggtgatcaggttatcttcacattactgttgaaattttgatactatgcattggactatatatgcttaaatatgtaattatggttttattaaatcggtgtattgtgtgtgtgtgtgtagatttattccacctgatgaatttaacctggcattgctcactttagagttagaatttgtagaaaaagggtaactaaaagtgaacaggtacgctgtgctgtgcttattgagttttacatattcaattggttctaaataagcatcatgatcatgagtttctggttatgtgtttttaggttgatgctgttctcttggccaatcagctcagaaagaggtttatttaccaggtagattttttaccattttattttgttattgatcaaattgtagtttggactttggagtgtcatgatcagatgtttttgaactggaattatgattttgatcaatgtcataatttgtaaccctcacaagtgatggatttttttgatatccttcttctctatagctttgttcatttacacagttttgttgaatttcctaaagtgatatcttgttaaatcgttgattatgtttttatttttgttactcaggttatgacttcaggacaaaaggtatcatttgagtatcatggcaataattatatattcactgtcaatcaagctgctattgaaggacaagagaaatctagtggccctgaaagagggatgatatccaatgatacatacattgtttttgaaacctctaatcaaagtggaattaaggttagtattttttattttgatcattcgttcatccttatttcctgctttttgagagtgtttattgtagcattgttatgcttcgaacttgatagatcagttgcattgggtttagttttgtagatagctcagttgttgtctgttccttattgtcgtgaattaaattacggaatttagaatgaaagcatttactagttactggcaagtgttttcttaaagaacatgaatggctatattttctgaagtgtgaacctgctctttctgatatatacttaaggttaatggtgttgaagatttgcacttatggttatggatctttttagttctcaagtctttatttataagctgttgaacaggcttctgatcaattttactggataaatattaatagaaatcacagtcaacaaccaataaatagtcatttttgaaaaatggtgcatataatgtgtattcattattacaatttaacctttttgggtttccacagattgtcaatcagcgtgaagctgccagtagtaacatcttcaggcacaaggaattcaatcttcagtctctaggtattggtggattgggtgctgaattcgcagatatatttcgacgagcatttgcctcccgtgttttccctccacacgtgacaaataagtaatatatttggttcctcaagctatataattaactgttatttgtagaccaatctcttatgttgggaattttaatgatgtttagattggggataaagcatgtcaaaggtatgctgctttatggaccacctggtactggaaaaactctcatggctcgtcaaattggaaaaatgttggatggaagagaaccaaaggtttgaatggctcactcttttcttttcctaaaattaataaagacatcttgctttgtccttagagttttttctcaatggccgtttgtaagggaagttgagctctaatgagattcatacttttttgtttttggattcaaggttttaataatgataaaattgtgaaatcggtattttgaagtcatcattttaaactatcatttcatgattttttgggtacttttagtcatgagcaaataaaagaagccgcctgaagtgaatatccattatgtttttttttttaacaatgaatatcattatgttgatataacattatatgtgctctatttgaatctgtgagcttttctactttatacgggcaattgcctctttataccatctccatctcctatgttttgacactaagtaagcccttttcagttgctttagctggttttgaatatggaattcctcgtttttggcaaaatagttgctgctattatgttattagcattctattaggtttcagttacagtttagtgatttgctaaatgctcctgtttctattcttgatgatctggaccagattgttaatggacctgaagtcttgagcaaatttgttggtgaaacagaaaagaatgttagagatctatttgctgatgctgaaaatgatcagaggactcgcggtaagaggattttatgcccagaatatgatagacgttaacctgttgctgttggtatttactaatgctgttatgttcattactgtttaggtgatgaaagtgatttgcacgtcataatctttgatgaaattgatgctatttgcaaggtatgtactattatgagtctgtatcagattctttgtgtttttgaactggtctatcagttttattttaatttggtcatcaatatttcttttattgttttatgaatttttttttgacatcattattatctttttgcaaacctcactgcttaacttcattattagcactgatttgcttttaatttgtgattgcagtcgagaggatcaaccagagatggtactggagttcatgatagtatcgtgaatcagctacttacaaaggtacgctaatcgtttcaacttttcagtctgggataatatataaattttgtcctatattaatgtctatttaccagggatggcccaacttttctaatttggggggaattttatcaatgtaatcgagggctgaaagattatttgctttgcagatagatggtgtagaggctttgaataatgtcttgctcattggaatgaccaacagaaaggatttacttgatgaagccctactgaggtgctttcctttctcctttaccatttatagcctcatagcctatctttttacacacttaataccacacatatattgtgtaaattttcctttttaaaattcatttcaatactatgataggcccattctacatccaatagattagagccttgttatatttgattagatccagtctattttctattcttatttgtcaaggagtcgtatagtttcgagggtttcgaatcactcttcgattgaatcatgtgtataggtcttgcttagtttcaagagcatcaagtctatgtctgattgaatcacttctaggcccagttcgtgtttgactggatactttctaggcccagtctattttctatgggatcctgtctagtaatgacaaaaaaagaaaatattattttgggtatatttttcacaatgtagctcgtcattatttaagagggattatttcaaaaatacctcaaaactacaattgtttacgttttatgaaattttgagtttttttaacatttttactgactttttttcttacagaccgttgttttttagctgttctaaaaaagacggttgtttgcacatttttttcacattgcggagatgtagtatactgttgtggcagcaaaacaacgtataaaaaactttttgcataattggctaacttgccatgtacaaacatcctgatttttcttattacttttgacaaatggaaccatagtagctgtttaactctgaattaagtagggattatttctttttgatttttgttaaatgaagattgagaatgaaatgatggtgacaatatcaagaaaaacttcttggccaacaacttttaaatttcttttccatattacgcagaccgggacgattggaggttcaagttgagataagccttcctgatgagaatggtcgtctacagattcttcaaattcatacaaacaaaatgaaggaaaattcctttcttgctcctgatgtgaaccttgccgaacttggtacgtgcattggtgatgtattgtatatagtgagatctacatattaagtcttgtactttggttgaaattatcattgaattcttctgccttttaatgaaagaaattaaattagtctggctaggtaagacacaatttatgtatatgtataaaatgcagaaaaagaatattgaatacttgaaataccatgtgtccagtagctagctttttattatataatcttcacaaccccttttttgatagactattactagctttttctttattgaaattttgaattgtttgtcctgacatttattcagtgttgatattataaacttaaccatgtaatgtcgtatttacatgcttttctatgtgcagctgctcgtacaaagaattatagtggtgcagaacttgaaggtgttgtaaaaagtgcagtatcatatgctttgaatagacaactgagtatggacgatctcaccaaaccagtagatgaagaaaatatcaaagtgactatggatgatttcctgaatgcatgtcatgaaattgttccagcatttggagcttcgactgatgaccttaaacgatccaggtatgctatttgattttattatttatccaaagtagattgggtttgacagttgattcctgctcaatactattatatatcttaaggaccttattggaaaagttcactctctgacatgcacaatatcttctcttgagatgtctaactttttctgtatgaacaatggctaacttgttccttgtaacatgatttgtaggcttaacggtatggcagattgtggtgatcgacataagcacatttatcaaagagctatgctacttgtggaacaagttaaagtgagcaaaggaagcccgcttgtcacatgccttttggaaggacccagttggcaggttattgtttgtttctaattagtaaatggttattttttttttctttggtataagatatcattttattagtttattttattaaagatagcaaaatgaagtacaactaatgaaaagccacatagctttaatttttccaccctcatggacagcctcccagttggcaatatgttaagcaagaaaacttcaaaacgctttatttaagtattcattactcacaaaatattctcaacaactttctacagagagtgttgttaaaaaagtaaactattttaaaatattatagaaatgttttaattacctgtgataatgcttaaccttttataaccctttgacagtggtaaaactgcattagcggctactgttggcattgacagcgactttccctatgtcaagattgtaagcttccatcctttttttcccctctctcactctaattttcaatcgtcatatcaattcataggcttctttagtatctttcctctaatcaaatttatcccgattctccatttttgcattttggtttggataggtctcagctgagacaatgattggtcttcatgagagcaccaaatgtgcgcatattgtcaaggtttgttaattcccaattttttttgtatcttgaatgcttttacaaaaattagagtatttgataagtgctatatttggataattacctttattttctcaaatagttgtggtgtatatagtgcagcttcttgtgtttgaaattggttttcttttttaaaggtttttgaggatgcatataagtcaccgttgagcataattatccttgatgacattgagaggtaataactgctcattgttcttgaggaaatcagaactgaattactttgtttctaatcttaatccaattgtttatttgttgtgaaggcttctggagtatgttgctattgggcctcgattctctaatgtgatatctcaaacacttttggttcttctcaaacgacttcccccagaggtgttcatctttctctttgttttctcagttaaatgggatatattttctacaagtgtttgctataattcctttcctcataacaaccgtacatgcatattttgtatattgcatacggtccatatttcataatgcctttttagatgttttactcaagaataaatttgaagcattatttttattttattttgtatgttctagattatgaacagtgcttctttttttagacatggaatattacgttctgaacatgtttttcttccatctgattctttccaaacgggaccttttgtttatgtaggggaagaagcttatggtcattgggacaacaagtgaactaaactttctggattcagttggtctttgttatgcattttctgtgacttaccatgtacctactttgaaggctaatgacgcaaagagggtaagtgatcctcgctctttttcattgttactattctattctagttttgtctcgaaattaccagagtatatttccttaaagaatgataaaagataccactaagggttcgttttttattttactaaataaatgtttataacaaagtggtacacgacatattcatcttagaattcgactcctctccccacacacacaccttaatttctattgaactagctgcaatttgttaaaatgaccaccaaattgttctgctttttttactcagaataactgtcaaaaataaaaatatgctcaatttattataatgttgtttgttagttgtacaatgttataacttatctgtgtcttactttttcttagattgttgaaacaatcaaacaactgtacaagtctcattatcttccttgataaactaattgcatatgaaaatatgacattgtacatctttatatacgtctggattaccattgtgctctctcttattgtaggtgctacaacaattgaatgtcttcgctgaggacgacatcgattcagctgcagaggcactggacgacgtgagttactttccccttttcttcttcgatgccattagggcgtgttttcttgttcattcacaacacttaataaacctatgcacattttgtgctgctgtatcttctcatctagttttggagttgttacccctctttagtataaatatagaaatagtatatatattattaaggtcacaccagagatatagctcgaatgctcaactatgtgtataaatatggtcacatggttatggtgagttgactgacccttgattgttttcaattggtactctcagatgcctatcaagaagctgtacatgttgatcgagatggcggctcaaggcgaatcaggtggatccgccgaggcaatctattccggcaaagagaaaatcaagatctctcacttctacgactgcattcaggatgtggtccggttttagtttctattcataaatttcatgagttttccaaaattatgaactaataatatctacctctgatattttttgctctccaaagtgttttgtatttatatgtataatttgatcctccatttttccccatttgttatatgttaagatccatttagctttgcctttgttgtatttttgcatattttaatttgtgtgtaattttaatgcttatcccttttgagataataagggcttagtttagtttactttatatattataatacatgaattaaagggtgttttgacttgagagacactttttactgcctaaacatatgactttttgtttttatttccttataaaagaaattgagaaaaaattatttgaatgatgaaacgatttatgttgagatgtgtctgtctatagtgattttagtctgtaaattttcactttcattttccctctctttctgtctcttcctcttcctcgcaccaccgagaccacccaagcccagacatcgagactaccaactaccaccaccgaacctcttcatctacataaaactcaacttaacaacctccaaattttatctactcaaatctttctctttctcctcctttatttctctcaaccaccattgccactgtaccacaccacgaagggagatcgagacataccaccaccaatcgatataatattgattgaaaatcaaatgggtagttgataattttagcttaattgttttttttgaacgttttttaatgtttatcgatagtaaatcgacattttatttatggtttgttgatggtttaatggctgttaattaattttttgaatgtttcgagtttatcaattagatatcgatattttatcaatggtttattgataatttttttgttaagttttaaaattgaagacaaagactaatcaacttacataatggctaaaaaataaataaaatttacaaaataaattagtactttaaaaaaataattataaataaattgatacaattgatacatttacaaaataaattaaaatgatttgcctctatctaataaaaaattgattaattaagtattaatacataaaataaaataagaatataaaaattaaattaggtaattaataaaaataaatataactaaaaaaggtaagaaaaattgaaaaaattaaatgtaatttgattaccaattaaaaattaattaatacaattatagaaatttaattaataccatatttatttttacattaattaaggtaaaattggccgagttaatccatccaaacctactagtagtgttcttttatttttacatttaattgtcatattttagttaattgtgataatgagataaatatatataatagtttgaattttatatattttttttaaatatgtatgtaaattat

SEQ ID NO: 220150 - DNA, 5260 bp, Cannabis indica
tgacgtacccatgtataagagccattcattccgtgggtgtaagggcccaatggaggcttgaagcggggacgttacagtttcacttctaaatacgttagaagttatagattctatatttatgattagcgctcccactcaattatactaccatgtccttaatttgtatgtcacgagaagatctaattggtcgactttaaaaagcaaattgaagaacataaataatacaattaagatcgaacttaaccatctcaggattaagatctattgaactaagattaaccagtgatattgacttagaaagatataacggtaagtttatgatatcttatccaagttcaatatcgatccaatccgatgtatactgcatacatccgatactagcatacttttattaatgccctgaaaagggcataacccatatctaaggtgtaagtataatttatcgctgattatcatgttagtctaaatctattttactggcaaattatgggacttaaactttgtaacatatattcataattatatcccacaatattgacaacactataatcatgaataacatttatgatctggacttaatagaatttatacattaaacatatataatcatgaaataaatcatgtgaaccatgcagcataaaataatttttgatcttttattaattagtaaatcagattatattgaaatgaattttatttagggcacaaaacccaacaaacaacagtatagacaaacaccttccttaggggaacaaaaacaaagatgtctttaggccagtctatactcttttagtgttgaccaataatggaggtcgtatgttacattgacatgtactccttctcccactctctattttaggttaatgtatttattttattaatttacggaactaatacatattaactgttttaataattattattaattttactataataaaagcctcaaattataaataagtttcccatgataattattaaatctaaattaactctttaattcataaattaaaactattttaaataataggttaattttaaattaccaaattaattctaaattaatcttagccaatttacatgctttaagtttcaaaaacggtaaacacataaacacataggacaatcctaatatatcatatttctactattagatgcatgataataaaaccgtgtgggatttttatatatggcatgttattcactaatgcatgagcatgttattaatcaactataaatgaaattttatttaaaaacaataaataaataatgatgatgaaccgggtaataattaggtatttttaatttacaacctaaaaataaaaaaaaatagaaaacaaatcttcatcgctgcaagggcatttttgtaattttataggatcgtcgtaagcctcaaaattaattaaaataattttaattaattattcttaaataaaccttttatttatgacatcttttaaaccctataaattaattaaagtaatttatttaaaacatgtattaagataactttattattaaattagttttgtctaacatttattattttaattagggttaagacaatctttgtcttattatggttatagatttgaatttaaattttaaatctaaaacaacttatatttatttaattcaaatatgaatctgaaaaaataaatatcccacaaaattatattattttgccttaattattaaaaaaataataaaacaattttattatttaacataaaataattaatatagttattaacttgaattttaattttaaatttataactataatatttatttgaattcaaaattaaataaatattcaaaataataattaattaattatattaaaaaattatataataatttatagtgtataaacactgtatattcactatatatattatatacaacaatatataaataacatatattatatatacatatatacatccaaatgtatatacatatatatacatatatcttaggtagggttcaatggggaggatcggccaccgacatgtgctcaccgtggccgatagctccgaggagccaccatggccacggtggccatggaggccacgagaattaccagctgcacgcacacgggtcaaaagacccgagaaccaaacaagcaccaggcagatgggattcaaaatcccttgaggcttcttgaggagcaccgacgtcgaccaggcataacggaggactaaggtttatagccagcccttggtcgggactagtcagcctggtacattcgaatgtctaggtccattttgtaatgcatgggtaggatgttgtatatccattatggccacatgcatgcatgcatgcacgagtataagggcacgaaactcgaagtggagcatggccagagaaaaattcctgagctcgcatgcatgtgattttgtcgtgcatggacgggtttcatgtttagaaattgagctaagatacaatgtacattacacagaatataatttacataaaaattaattttcataaaattataattacataaaaaatttctctgccccataatggcttacattattttctaggaaaaataataacgaaacctacactcacttttactatataattaaagatttatcacctctcatagattcataataatataaccatccattcacatacatatcacatatatataaatgtataaaacccacacatcaattaatatttatacattcatggaactactcttcatactaagtgttgatttactcagggaaagaattcgtatatctgaatatcattgtaccatagtcccaatagatcaccagatgtataaacattaaatcaaaatataaattatagaaaaggaattaatatatacattttgatgactatcagggtatcctcaaaaatacttgtaagttgaatccttttggttgattaaaaactcacattgtagtctttcaaatcgatcaaccacacacaaagaatattgtgggctattatgataaagtgtataatctttttttgattaattctcaacacttaagcaagaactgagaaaaacaatttttcttttctcctctatattttgaaaataatagtaaaaaatcatctcttcattttcaaatcaggcttctatttatagtagttaatttctcattaattaaattatatttaattatttaaataaatatttataaccaaattcggttactgatatctcaaatgagagaatctttcaactaactttgagggaatatctcaactaacttgaaatatctttaactactttaaatttaaatattaatctaattgaatcaattaacccaaaaagataaaactaataaggacaccctactatagggtaggcgactaccttgtcctatttaggacaagaatagtgtctttcatcctgataacttttgtctcaacaaattttgtcttaacaacttttgtctttttccctatttaattaatttgaaaaattatttatttattacaaaaataaataattaatattttccaatttaaaataattttttctgaacattatacaactctttatccctttaattcaacattatacaacattatacaatttaaaataattaatagtgttcaaggtgacgattcaaggaccatggacctataattctaagctccaataaactagattatttattgagtctcatcaaccatataatctttgtttattaattctataattactccactataaatatcgaattgagttcttagtaattatagaattatatttactgagttttactgcagtgtccattgatataatcaattctagtgaatagccctccttgtgtcagtttgtagttagttttggtcaaaatactgttttaccattctattatccgcaaatctggcattggacacgtggactccaaatcaacattcaggacccatcagtgggaccatcattaaagaaaaaatgggtcaagcccatctggatgttaccttcctgaaacatgcaacggttctatactcgtaaagtcttctgccttcgacaaaccgagccccaaaaacatttccagtatcacgagaccggaaggacaagacaccacgttcccagaagacccttccagtttccctttatattcgtgtacttaaataaggaaactctagttggcagatcgcaacagtgcactgaatcaagattaaaggggaaactttctacaacaaatattatgcaattaatttagattaatatcccacaattaccgtacgcggtgttgaccaattcaattacaattcgctctgcctagtcaacagatcgtcttctccatggacttgacttcatgagaaagcccatgaatattctttattgtaaactccctagtaggggaaagggaaaacctaatgtaattctcaaactactataaatatcatattaatctcatggattaagggttgaattctttgatatactttgctcaggcaaactcgagaacatacattttgtgtaattcctaaggcaattgcaagcacaagcttactgaataagattgactcatgaactaaggctagttaacgtcccaactgcattaaaaattgtttgtctcattttatactttctctattgattatttattcttcagttcatattatttttattctatttccaaaaatcttgataaatactttggagctttcattaagagctgaagaaagcaatgagacaacttaaaacccaatttggcctttgttacactaatcctaatactagagctggaggttctagtgaccctcaagtagtcgctagcaaggccatcaagacgaagatcaaaatctagacgctcccatcatagaggatgcaaaatctagagaaagtagttttgaagatgtcgagattgatatcaacgacacactagaggacatgaatgaagacgaccctcaggacaacgtcgctgaagactaggcatgggaggaaagccaacctaattagtcagacctcgtggtcatcaaggcacgataacttcaactggcagaaagcatgttgactcgctaggatcaattcaacgagttgttaattggcaagatgactaagatgctgttgggattttatgccctaaataaaacccatttcaatacaatctgatttgttatcaataaaagattagaagtcatttatgtttacatgtgttttttaatgtttatggtttaatgtgtacaaaatctgttaagtccagaagatataattattcacaattacaatgatgtcaacacagtggaatgtaattgtgattatatgctt

SEQ ID NO: 220151 - DNA, 2936 bp, Cannabis indica
caaaaactgatgcttccaatcaacttgagtgttgcccaaagttgccagccattgcatacctaagatcacatctgtgcttcccaatccaaaggtaaaaaatcatcaatgatggtcaacccttgtaattccagcaccacttccttacaaactccttcactcttaattgatttccccgatccctgagtcactccgtactcccctgttttagttaacggtaacttgttcttttctactaattctttggaaaagaagttgtgggtagctcccgaatcgataagtaccgtaactccatgattccccactgctcctttgatttcatagtgcgtggggctgctattcccgttgctgaatttagcgagacttctaccgtctctgtaatctcagctttatcaagggctaattcatcctcctcctgtaccgggctttcgtcctcgtcacaagtgattaccacacttaattctttccttgcacatcgatgtcctggagcccatttgttatcgcagcgataacaaatgccctttcttcatttttcttgcacctcagaatcagtcaaccgccgaaattgaccaatgggtttttagtctttattatataagttggttcctctcctgtccccattgttgcctggccccttaaaattgttccaatttgaatgaataccaaataaagaatggtccttgttctcgatcttagcagcaaaatccatggccttgttcaaagtagtgggttcaaatagccttagctcttccttaatattctttttcaacccagacaagaattggctgagcgccaccacctcggagacatcatctaagggtgccaatagttctagaaacccttcacaataatcttccacggaaccttcttgacagaacaagcaaaactattcgtggcgtgaacccttggaagtgttgtgaaatttattcaagactagcaaccgcaggtcttcccacaagacgattggacggcaccgcaactcccaccggtaccatgtaagcgccttcccttcaaaactgattgttgctgcctccaacatctcctcattgctgaatctttgaagggtgaaatacctatcagcccgtagcaaccacccgtcggggtcggtaccatcaaagatgggcaattcaagtcgtcgtaagcggcagtcccatcgatgctcgtaagcgtagcttgtatttcccacgtccggcactgttgaaaaccccatggctggttgctgaacccattttccagatttttttggagttcttgaatggggttgttccgttaatggctccttgttttggtttgacccactctcatcagcttgcttccctaataactttccaagcgtggctgtaatttccttcttgaattgtcgcatttcatccctgaccgattcgattttagcgtcgacgtgtttctccgtctccggcaactcctaggtacgttcttggcagctttcttggtgggtgccatgactctcccatcgactgctctgataccaatttgatacacaattactcactttccaataggttcaaattagaaatggccaagccatagagaagaagaagaaaatctggtattattaatgataaaaaaaaacaattacaaaatatctttcctagcttttcgagacagccaggtatcttccaagagtaatattcaccctatacaattttctctatatctcaataaaagaatatgactttctatttatacccaacccactaaaattgactcctaaagataacacttcccacctcaacaaatacatgtacacttatttttttttttaattttctttttgtctttattccttctagaatacactttaagtggcagtggcagtggtgtaacaaaaattatatacacaatattctcagctctactgctaccccaactgctccagtagaaaattgtaaagttatattaagaaccatatgttttgaatgttttgaattgattaaaattaaaagaaaaaattatattaagaagatgatgcttatcataaataataattaaatattaattaccttgattattgagaaaaaacccaattgactatactcaacagcccaaaaacaagaatccaaccgcctatactcagtagcccaaaaacgagagagagccttgggataaatcaaccatgaaccatcaaatttttgcaacaggctaaatcaaaagacaaaacaccatctaaatctaaatcaaggtggctacacttctgctactatttaacatgcatcacaataccaaatattgatgagaagaattttcaaacagattcatacctgggcatcatacataataaggccagcataaacaactgttgcaccaaacagtgaatccgagaatcccctgcagataaacaaacattgtgtttcctttaaatttcaacatctaactaatgtagtcaggtttcaaatgaatcagcacaaccaaattgaaaattgttagagctaaaactaaagagaaaatagtaagatattaacactacatacctttcaagaccaaggcatgttgcagcagccacaactgcctatccatcaagaattgcatcaaacattacattacaaccccacttgaaaaatcaaactacacgagtgaaacgaagaaagaagaaaaaaaaaaaggcttacagaggaatgagttgaaggaaagcccccagcctgaatagcagacttgatatcaaattctttcccatacagaatcacagatgtaaaaggcttagagagttgcccaattaccgcaaaaacaccagctgctatcaaaacctttagaaagaaaaaaaataaataaatggattaagtacagagccaccagctgataatcaattgatgctctgttcagatgagagagaattttagacgagagagagagagttagaacgagagagagagagagagagagagagagagagagagagagagagagagagagacgtacgtacg

SEQ ID NO: 220152 - DNA, 2789 bp, Cannabis indica
ccttttgaacatcgagcaatctccaagccaaaggaaaaaacgaagagggcctaagttcttaagtttaaacctggtgtcaagggtggtaatgaaagtgttcatggcagggatgttgttggtggcaatgactatgtcatcaacatatatgaggagagccatgaatataccaaattggtttcgaatgaatagagaatgatcgtttggagattggatgaagttatgttgaagtaattaatgtggtactcaattttgcataccattggcgagatgagggtgttttggttgataaccttgggaaagtttcatgtaaacttcctcattgagatccccatgtaaaaacgcattgtttatgtctaagtgatgtaaatgccaattacgaatggttgctaatgcaaaaatgagttttaaagtgttgaatttggccacgggggcgtaggtgtcgaagtaatcgataccaggtaattgagtgtaacctttagctactaaacgtgctttgcaacgttgaagagtgccatctggatttagtttctttttgtatacccatttattgtcaattacatgttggttaggtgggagtggaacaacgatccatgtatgattcttttcgagagcatctatttctacatccattgcattgttccaaactttgaatttggaggcttgtttgtaggatgtaggttctggtgtaaggctgagagataggatagctgctcgaaactcaggagagaatttgtgatatgaaatgtaattaagtaaaggatggtatgtgctggtgtttgtgacagaatcacattgataatcctttaagtaattggggagatggtgtacacgacctgatttggtgcgtgttttgttgtgcctgggaggtgaaactagtgtagatggttcagaatttggtgatgcatcctcgaggataggtgaagatgttggaatttcgtggttttgttgctgagatggactgttctcaggaaagtttaatggacttgagtcaaattgaggagaatgaatctcagaattttgagagaaaaaattatctatgtgttcagtttgggacacacggccaaaagggtaagtgtgctcatagaagaggacatatcttgactaaaatatcttctttgtttggagatctaatagagtgtatgccttcatattgggagggtagcccagaaaagcacaagctctagctcgaggagagagttttgtggctattttgacatgtgatgcatatgcaaggcagccgaaattcctcaagtatgaatattgagggagtttgttgtgtaatttctgaaatgatgtttggtcttttaaaagaacagaaggggttctatttaaaagatatacagcagtagcaatgataaaggaccagtattgcagtggtacatttgattggaaagctagagctcgagcaacgtttagtatatgctgatgttttctttcgaccacagcgttttgttgtggtctgcctacacatgaagtgtagtgtattgtgcctttaatagcatagaaattagtaagtgtgagctctttggcattgtctgtacgcacggctttaatatttgttttaaattgtgtatgtatgagttcaaaaaaggtaggaatggccaaagtggcacccgattttgaatgtagaaaatatagccaagtgtgtcttgagtgatcatccactatggttaaaaaatatttgtagccttctattgaaggaagggaatatggtccccaaatgtccatatggacaagatcaaaatttgccaaagtaatgttattattggattggaagggtaatttcttttgtttggcaatatgacaagtaggacaattaaatgaacttagaatatggggaatttgaaattgtttatcgattttgttagaaatcattacagaagggtgtccaaggcgtgtatgccattggatattattcaactgagtattacatgtttggactggatatttgtcctcattgtccgattgttgaaggtagtagaggttgccaattctcttagctattccaatcttcgatgtcattgtagattcctgtatagagcagctgttagatttaaaaatagcagcaagatgtgtgttgtgtgtgagggcactaacagaaatcaagttatatttaaaatcgggtacaaacaacacatttttaagagtggtatgagagttgagaaccacggtaccaattttatggatcttggcttttgaaccagtaggtaaatggacagagagatcagtgggaatggattcaatagaagaaaaacattctaggtggcaacatacatggtgtgttgcaccactatccattatccacaagaaagggtcaataatacctgagatgtttttgatcacggctttgtcaaatgtagatgcatctgttggttgaagttgttgtgctaacatcgatattaattgttggcattgtgctggtgtaagctgtgtgttgagatcaggtgttgaagaggtgacttgagaagcttgtgggttgttggtaggagtggtgttcatatcagattttcttgtagtggtggaatctaatttcttgttgccatagccagggggaagccgattaagaagtagcatttgtctttatagtggcctggcttttggcaatttgtacaatgtgggcgtggccttttgttctttgaaaccgcattggctgcaggagcagtatcttgaggattcgatgaactggaagcggcagccaagggaggaagtaatcgatggcctagagacctttgtctttcttggttgattaccatagaaaagaccttattcaaggcaggacaaggatcaag

SEQ ID NO: 220153 - DNA, 2527 bp, Cannabis indica
tagcaaatatagctttctttatttcttcatttgttacagcagctacaagtccatctgcttgttgtcgagtgattgtggggccgtttttaaggactcgtccgttgactgttgttctgttgtgtttgttggtgccaagtagggactgataatatgacaaaaaaatatcaattattttgctcgggtcatcaactcttaccccttgtgcatcttctattgagagtattttattttggtttcttctggccttgatactcaagtgaaaagctgatgtgttgtcatctccatcacgaagccaagtgagcttggctttctgatgaagaaaagagagatagttattatgagcatcagaataatcttatctcaagtatttttcatgttcctgtaacccagagttgaaagggtcctggtgcaatcgattctgacattcatctagtgcttctttggctttgatcactgcagcatgaagatctgaaaacccctgcttgtttattcctttgaaaatggtctttagagctttgagttttgacaccacttcatacatcttggtgccttcataattctgttgccacactcttttaacttgctctgcataactaggatgtgatgaccacattcgaaagtatcgaaatggtttttttcccgtttgcacattctggtgaaaagtgagtaacgctggtgaatggtcaaagataccttcatttaagaatatagtttcagccccaggaaaagtgtcaatccatctgccattagctagaactcgatctatttttgaatagattctagatgaatcttgttgtttgttgcaccatgtgaagaagttccccgtatatttgatatcctctaattggcaataagctacacaattcgggaaatctgttgcaagattgtgtctaactttagaaccaaccctctcatcttttgcgagtatgtcattaaagtcccccatcacaatccagggatcaagaatggccatatccattagatctttccagagagttttccttccttctacctcattaaaaccatacacaaaagtagtaaagaacttcttaccatctgaagtagagatgtcgaggtggataagttgacttgtacatttgagtatgttgatggaaaaagaattatgattccaagctactattattctccctcctttgtgccaagctatattactagtaaagcaccatcttgggaacatatttgagtacaaggttccaagcttggaagccttgactcttgtctcgaggaggccaactaaaccaacattttgggaatagatcaattgcttgaccatgttttgcttttgttggttgttgactcctcggacattccaacttagtagcctatccattttgtagaggaggctctccccctcctccactcttctctatttctgtctgaccatttgtctgctcctcatctggtattatcactgcttcattgttgttgttcccttgttgatcgtctaaaacatggaaagaattcccagtctttgcaccagcaacagggggtttaatttttggtttccaccctttagtaacaagcttaaaatcttcagtagccttatttgtatttgtagcctctgttggggttgggtgctttttttccttgactatccattgttgctttttctatcctagttttttcctgcattcttcagtaatatggccgagaccattgcaatttttacacaccaggggtttccattcatacttgatgcccactgtgacattgaacccatgttcatcctcaaaacagatggatccaggttggtcttgctgcagtgttacttcaataagaattcggagataggatagtttatacctcatttttgtgttgtcatccaccattatagggtttcccaattgccctacaattttgaagagagtattttggcccaagtacttcaagtccagattttcgagttggatccagattggaacagctcgaatatcttcctttttaaagttagtgtcggggtcccaagaattcattatcactggtctgttattgaagaatgtgtaccctccattaaggatggtgtccctgtcctcaatagtagtaaaccgaattataaagatgccaaaggatagcaatccgactttatcaactttgtctttccaaatttgacgagcaaatccttccaatattgatagaggcaggttagccccaagaacatagcaaacgatagatgaattccaaaaaaagatttcctcttctttgtcatccatggttatcttaactttccctttttcagcattatctctcttatcaacaccagaactttcagcattgttaaaggaatcagttaagtttcttaggatagaaccagatctcaagatagggggaactgaatgattaccttcctcaagatctttgatgcactggatattagcttccaggaaataagcaaaatcgtcacaaacatcctcttgttgctgcagagctcgaagtgatgatcgaggtgataaaatctggaattggtcgtccagtgcagtattctcttccacaggtaactcctcttcat

SEQ ID NO: 220154 - DNA, 4238 bp, Cannabis indica
tgcacagtatgtttaaaaattacgtaatacgcttatgctagttagggtgttacaattattctctaaaaatatggtcaaacgtggctaatcatttttaaaataaaattttctatttttaaaaataaaaataaatattgatgtcaaacatgcatataatttgtcatgtcaaaatggaatttggatatatgtgcttgtattttttttttttgtgcataaaattatctattttgaattataaattattttttcacataaaaaaataatttattataatttttaaaataagatagaaacaccctcacctataagagagaaaatagttagaacttattttactaggatcttaatttactaacatatttgattatcacataataatctaacatcttaaaatatgaaaaaagaaaaaacataagacgatcaattaatagatataagattaagaaattttatattggttgcagcataaattaatgactcctgttcaattactccaacccttttattcatgttctgtagtagagtattgccaagtaatgagcctggatcccttatgaatttccaatcacttttttttacacagtctttcatagagatctgagtaccacattgaatagagtgggttggtactcaacacactataaggacgatttctagagagtggagagacaattcaaaaattaaatggagagatatttgagtactctaaccttttattctcgttcaattaactactccttctattcaattactctagccctttattctcgtttgtagcagaatattgtcaaataatgagcctggatctctttcttgaatttccaaatatttcttttacacagtgtttcactagaaatttgagtgtaccaccttgaataaaatgggttggtactcaacattttaaaaaaaaaatacaatttatctaatcattttatttagatattaattttttatttaataattatattatctatttaatttaatatttattaaaatattcacttaggctgattgaaaataaataatttattttccatctttagtatatgttttaaataaatattataaaaattacttaatttaaattagtctaaaattatttaaaaattaatttttaacttaaattttatactctataaatatattaatatatttttaaaattctatgtatttagaaattaaatacattttttgaaaaaatatattaaataaaataattaaaattaattttcaacacaaatataatttcttatttaagtaaatgtcacaaaaaattatccaatattgaagtatcttgaataaaaacttaaatattaattttccatttaattgtatactaattagaaaaaattcaaaatagttaacttaaaaattaattatctaatatttatttgtagattttctaaattaattcaaaaataatctattaaaaaattaatttcaaatatttttataattaattatattgctatgtaattttaattgagttaaaactaatataattagtctaatacaattatttaaacaaggtaaatgagtcttcacaattaggattgttcaagtgagagaagattgggttccatatgacgtattcactactaatggcccctaactctcacacaagacccaaaaaaggaaaatttaacctttatttaggctatgtttggtgggagggagggagagtaggatggatggagaggttagagaggatggagagtaagagggatagagaggattgttaagtttctttgtattgtttggtattaagtgtgaggtgggaaggatggagaaaaaattgattagtaaaattacaaaattgtcattttaaaaataaaatatttttttaaggatagttattatattttgcaaaatatatttttgtcttttcctacaatccttttaaatttggagggattaaattttgaaggtttaaagggagaatgcctccctccatctcttttctccctcttgccaaacaagtgatttagtctatccttccatcactctccctccacccctctccatccatccatctctccctcctaccaaacatagtgttaaataattgttattcattgaataggctcaacaccaattgagcctgctaaataaaattatcaataatgtgattattttatttagcaatgtagtttattttattatctaaaatatatgaaccactatatgtatctaagcccataagtaaatacatagtccatgtaacaagtttatgtggatggaccctatcatatttctaagtttatgacaaagataaaaaaaatagaaagatgtacctttgttacaaattatttgattgatttatcatcaattaacttatgataaatttggattgattggatccataatcaagttaaccatagccacttaaatcaattaaataatacgttttatcaaaataattaatgttatggtaaaagtatgtcatcgagttaattatggttaatttagatctaaataatccatcatcaatttaaccatagtcaattaagatatattttaccgataaattatttctttccaaaaataataaaataaacacaaatgtaataaaattggttgagatatttcatttttaataaaataaatattattaaaaatataactatttttttttaaaaaaaaaaattaggttgttgaaacaatcaaaatatctattcaaaaatacaattatctaacaaatttttaggctacttaataattatatgtattaaataactaaataataaattaaaaaatattaaatttaaccaaaatgtgataattttaatattatttttctaatcttataatttaatacaaaatgaaataataatagaaaataaaaaaaaaattgaaaatggaatctttatgattaggatattatcattatttaacaaaagaatattaaataacactaatattaattttcaaaaattacagggttgtaacaacccttaaatatctctattttaagtattttttaaatatttataaaaatatataagttattcaaatatcttttaatgttttgaatagccaataaattaaaaaaaaaaaatagtataatacctaaatttaaaaaattaagatatccttaatataatattttaatatataattcaaacaataaaataataataaaataaactaattttgaatttgaactacaatggtgttatcctaatttctgcacagggtgacgttacacttacctgtatgacatgtggagaacaatttattatctggatgggcagtacactttatgatgtgtcgtcaaaggtgatttatcattcataaatatataactcgtttaacaaataagttggaacatccaaacatggtatattacaccatcctactagcatcaactttgtagtcatctcgcatataccgcctagggtaaatgcgatattggaatatcttcaaagaaattatccataaatgttcaagcattcaagtcacgatcacgtccctaattttgtgggaaaggttcacatcagcaaggaataagaggaatcttttatagtttctctttttgtttcacctgatttgggaagtaactagtttccctttttatttcttaattcttttagaaagcctaattgatgtagttctttcctataaatagtgaagtcatttcactattcagtgatccaaaaatcattcattcaatgagcatttacactgttaaaatcttagtaaaagctttcgagaaagatcaagagttcctgcttcttttctcacaagttaatacaagcaaaaggagagtaagctattaccactatcaccgaaccgaacctttataaaaaaatttgaactatttataatcgtttcaattgacccagtgtcgtttgcaaaaagtaaggtcaatattttggtgttttcattgagagcaaaagaacacattcgttgttttgattcccttcaaaacacacgaagatggttgtgactacaaggggtaatcccattgaaagaacagatcctacaaatcccaatgtgtaaactccagcgaataggagagatccactgaaagaaggatcctgatccaaccattcctcaaccaccaatatgtccccaatcagcaggacatggggtgataacccctctgactagattcattctgggcacacaggaagctggaacaactagtactcataccgacccaacaggcccaggtactaaaaaaccattagttggaaatcctcgaggggtgattggtgtgttggaaatattttacc

SEQ ID NO: 220155 - DNA, 1906 bp, Cannabis indica
ttaaatttaaatttataactcacaaatttaaacatactttgattatattgaaaaattgaatagatatatatgatttcaaaaatctaagatatcattattaaaaatacagtgtactattttttattttatttcaaaatacatggtactaattaaatgagtacataccttaataaattagttcaatttgaaaatttgattgaaatacttttatttatttgttgtttttataatatgaatttaaaattttttaacaaaaaattatatcttgtcaaatattgtttagtttctagaattatcatttttattgaaaatgatttagtttatttatttttgaaaatttagttttatcatattatctaacattatttttagataacaacaaaatttaaatatatatatatatatatatatttaaaagaaacatactctatttagctatatcttataccaagcataatataatattgatgtggacactattttttacatgtggcacgaaataaacaatctcagggctccacatcccaagatagggcagtgttacctgcatactaggggcttctaagtaaacaccaagatccaagaaatttgtttcttagtattatccttcaacaaacaggttgccatgaccctaaaatgaagaaccatggagttgaggatatcacgtggacatcccaggactcaacttgggaccaacattagtgttgggtggggcgcctaggttgacatcttgtgcgtcgtcttgcattagtcttggttcctatcaacttctgggtaatctactcagccattgtcctaagatgcatgagagacatgcaccagctaagtttcagactttgcagatgagtctgcatgaaacgacacccaagcatttggaagccctaactgttgggattattttaccaggatctagatttactaacatgtatgtttcattataccctaaatatgaattctctaatacgataaaattaaacacataagagtttagaaaaccttacattgatgcagcgaaataataataactccttccgctcagatctcaaatttttgttcctttttgtcgtagagtaataacaaaatctgagcctagatctccttctcttcttcgagctggttaccaccatctttcgcactatgattgagtacttgacttgctatgtgtgggcatggcactctatcaatatggacgaattggtgaaaaacaatgaatgagggtttaaaatcagtatagaaagagtttctcatctactagttgtcggacaaagttagaaaactaaatttggtaggttgaatgggttggatgagaatgagtgcatcattgtaatatcctaagattagttaagcggattagcaaaccctaactagttaaatgtgtattattatggaattatattatcatataatttattatatgtgaattagtttgataaatgtgatgttaagaccccgttggtaagccagggacatttttataattttgacccaagagaggtaaaactgtaaattgaatttaattgtgtgcttatggactatatcattatatagtatacttgttgtgtccttttgcatgtattttctgacaagttggcgcggtatagtcacaatcagatatttcggaccgaaccgggtttggggtcgaaatacatttttaagatttttttattagcattttattaatatatgagtatgttgaaaattattgaagtaatgtgtgtatgttagattgacattattgcccttgagttaagtatgtgctatgttttggccctaggggcatctttgtcattatacctatttggattatcttcaacaaatgaaatttcaagtaaggaaaatgatatttttctaagtttgtattcccaggcctaagaaccgacccccccccctccctcctctctcttct

SEQ ID NO: 220156 - DNA, 2724 bp, Cannabis indica
ttttttttcccttaattataatcatattcatgcaagaaaataaaatatttaaatgaattaacttattaaaaataataaagaaaaaatcatcatggaagtggccaaagtttttctttaatttaaaataaaaaataaaaaaaaatcaaaagaaacctatttagaagaaaaaagaaatatccctaaaaaatatcattaaaagattacgtctcaatattttaagttaaaataagaaataaataagtttaaatttaagttgaattccgcttttatttggaaaatctatacctatcaatattataatataagacaaattctaaattcaatgtaaaaagtaaaatataaatacaaatccgatattttacggaatttcgaaacgataactaattaattagttaccttccaaattttgaaataattaaattaagttcaatttaaaattagttttctactataaataggaaaagagattccaaaacttataaataagctttccattagttccaaactatcggctaacctatctccttccatcaaaatttgctaatttctttcttctccacaaaaattttctctcactctctctaatgtctccattttcatcatgttcaaaggccataggatccttaatttctcgaagaaacagcataaggcatctggttaaattcggtgaaaaaagtggcccaatttcataccatcctaaccctactagtgttcaaggaatttctcagttcccaaccgacgcaaatagtactttttgtagcagtggaagaagaaatttttttggttgtaacgatagtgttctatccaaaatttacgaggagaagcgcgttttagggtactcacccgaacaattatacaatgttgttgctgctgttgatttgtatcaagattttctcccatggtgtcaacgttctcaaatactcaaacaacatcctcataatgatgagaatgatgaatcttttgatgctgaattagaaataggctttaatttttttgttgaaagttatgtgtctcgtgtagaattaatcaagccaaaaagggtaaagacaacagctttagatactacactttttcaccacttgattaacatatgggaattcaatcctgggccagttcaaggatcttgtaacgtttactttttggtggattttaagtttcaatcaccactttatgggaaggtagcatctatgttctttaaggatgtggtttctaggttggttggttcattcaatgagcgatgtcgaataatatatggaccggctacccgagttcttgaataataagctgtactcatgctcggtggcggatctaactcaatatttttcataacttttgctttagtatgtaaattttctgagtccgtcgctgctaatgttgttttactaatttaattggagtcatttttagtccatctattttgaaatgtttggttctattttctgaaaatattgtttagtaattgcattgtatgtttttggattgatataagaattctgaaaaatgtctttcactttaagatcttagcttgtatgaaaataattataattaaacaacatcgtaattatacttaattttgaaattaacatgaacattattgcaactaagaatgatgtctttcaatacgagacctaaagacaaaacaagtcacactcgctcattagtctaacgaacaatacaatcaatttcaaaatagcaatctctcaagattgagattaattgatctaagatcaattaagtggcattgacttagaaaagatataatgataagtttatggtatctttatcattttcaatataggtacagtctgatttatagttgatacttgattatcatgtcagtgtaaatttagtgtactgataaatcgtaagactaaatagtgaatcatataactatgattaagtgtactgataaatcgtaagactaaatagtgaatcatataactatgattattttttactgtgttgacaacactataattatgagtaactatatattcgcgatttaatagaatttataaattaaacatataataatgaaagtaatatgtgaacccaataatataaaataatttattcggatcttttatttagtagcaaataagttttgagttctcaagtaatgggctaccagaaaacaaaatggtacttgttgatataggtagtcaatttaagtccttcaattgtgtagtctcattcctacacagcgtcagaatcatcatagttttcctttcccgtataatgtgggatgacacaacttatccatatttgtccttacggatcacaggactactgactatcacggatacctagttaccctatatatatatatattatttggatggttacccaatatatagggtgcttagttagccttatttaccttctattgggtacctggttatcttaattaggcgcacaccttttatattttgcatattatggtttcttttgaattttttaatacctagttaccttatttatttttcaaacgaaaactagctatacctaattcattgttaaaatagattgtatcttgttcccagctccagtcaccatcttttcaagttagccttttagtagaagaagaatatttctttgagtttggcctggtttaatattattataacatctcaggttccattgatgttaaaatgtttagatgtaattaactataaatgtttggaataatgtcacatgagcacaaactcaccagagaaacaacag

SEQ ID NO: 220157 - DNA, 2173 bp, Cannabis indica
attcaacactagtgttgtgtctctttcccaagattccaatgtttcagtcagagagattgaatatctttgacactggatttagtgagattagttacgagtatgttggacacgtataactcaattcatcaggaaagtagcatttttggctccctttaggagacatgtgatcaaattcacaacatgctaatatggattctcctacttataagggcacatcaaaacgaagggtctagatagataaacaagcacaaattaaaaacacttgtaataaatctcagcattaattcagttggtatttcttttttcttcttttcaaagatattgataatgacttgaattatacatcactagtagaatttctaattctcgaatctaaaacttataatgaccaaattacccatgtacaacagttgtactagtaattctcgaaaagctcattagatattacagcagcaaacaacacgtgaatcttcttgtaaactccaaactcccttactcttttttaaccttacattcctctcttttccgcgttgcaatctaaagaaagatttttactttctttgttgttttttaaatttaaaaattgaaaaaaaaaaagaagtaaaataaaaaaaggagggaaagagattttcctcttcctcactaccaaatcaagcgcacccgcgaggggaaaacccgacccgagaacccgccaagtcatacacaacccgaaaaccttgctgctggatatttccgatgatggacaatccacccattgtcccggcgaaggcgaaacagaacgtcccactactgtcaacaggaatcaagtagttcgccgccggcaaagacacatcagctcccctgaaatggagcaccaccgtcggaaccttaacctccgatttcccagacaaatcgaagcaagtatcgaagagagagaactcgggagcacgcttcaagttaggcgctccactacggaaagcgtcacggagagcaatgtaagcgggtcgagtcaagcgagtcactgacgtgcctgagtcaattatgacacctccgttaccggctccatcgagctggaagagtgaggcggagatgcctcggacacgtgtcccgcccacgctgattcctaggagctcgaggtagtagaacgtgtccaacttcgggttggagagcaaaggggtgaaccgggcggtgcgggaaacggccgcttcaccaaagacgatggaagaagattgtttggacgaggctgaccggtccaccaagcagtaagagaatttccggttgaacctgtaacctgtctgagaagggaacgacaacctccctcgccccaggcccaaaagtccagcagcacccacgaacaaaccctcgtcgtcgtggccacaacccagagctacacgcgccacgcgcgtacgcctgaacgtcaaagtttcggtggagaactctcccgtggtgaaggagccgtcgccgtaggatacctggtagaggcaggactttcgttgattgcaacctggggaatcgagcttgcggcagagcggagatccgcatgcgatccgaccatatgtggtggatttaaccgggtcgaatatcgggtcagcctgtgtgtagcatttcttacacggggaacactggagccaaacgacgtcgcttccggtatccagaaccatataaaggtacctgggaggcgtacccactccgagccgagtgaaatactcaccgctcccttgtgttagccccgagatgatggagctgctgaacccggatccggatcccgatcctgccccgactccacttccgttccttgctgcgactaacgaggcaagagacctgacccgggttgcatcgcggtggagcctgaggtggaatagctgctccggggtcaggtcagtggtcaaagcgtcgatgtgatgtaactgaagggtggtttcggattcggattctgggtccggatccgaagccgttaactcggtttcgggccatgagagcgttggcggagttgagagggtgtttacgagcaaggtctggtagtgtgttgggtcagtgagagcagaggagaaagctacgaaaatggcggtggtgaaggaaaagaagagaagggcatttctcgctttcccttgcattgtagagagagaaagcgaaatttatggcagaagccagaggagatgacagagattataaataagtaaaataagaaggcggt

SEQ ID NO: 220158 - DNA, 1872 bp, Cannabis indica
ctcacctgctccataacctgctgagagaaacagcagtcaaaaaacaaatgggagttgctctctgttgctgcttcacacaccggacagttgaggctgtgaagagtgatatgaaattgcacaaacttgtctcgagttagaagctgagagttgattacttgcaaaaaatgaatctgtgcttcggcatgttaagggagcaccaaatgtacttggtgaactcaaattgagtttgaggaatgcagctgttgtataatagagcagctttgaaccggtttacactagccccagcttttgcaatgtcttcacgagtgaacttatcccatagatgacataatttcctccaataccaactagtatcactcttaagcacatagttccacaaagacttgctcttgagataaatattattgacccatttcacccaaaggatgtcccttttagaggaaatggcccaaacatatttagcaaggatggcttgattctatttaattccatctttgaagcctaagctaccatacgcattaggaaggcacactttttcccaagacgccatatggagtttacttctattcccattccagccccataagaacactcgacaaagttcttcaacctcctttgtaacactatgaggtaatataaaaatgctcatccaatagtttctaagcccaagcaaaaaagagtgaatgagttgagccgtaccgacaaatgagagattcctagtagcccaagtatggagtctttgcttgattttcttgattatcacaccacaatcttttgctttccactttgttggtcttaggggcactcccaaatgtttgagaggataagttccttcttgaagagccaattttgtcagcattgcttgcttttcttcctctttcaacccccaaagtagagatgagatttgttggtgttgattgcaagaccagatgttgcactaaattcatccaaaatctccttgaccacctgaattgagcctaagtcccctttgcaaaataacatcaagtcatccgtgaagctcagattaataatcttaagattcttgcacaacgaatgatgtctgaacttagattgattggctcctagaagtaatctcctggtcaagtactccattatcatgccaaataagagaggtgataaaggatcacctgtcgcaaacccttcttgcctttgaaactcccttgcactcttccattcatcaaaaccgagtaagaagtagcttttaaacaagtcataatccacgatataaatcttcctagaagtttaaagtcattcagaagcgcctccaagaactcccaattaactgtgtcatatgctttactaatatccaccttgagagtacatcttggtgatatgttcttccttttgtaattcttcaagaggtcttgaagaatcatgacattatgagctattcatctcccttgcacaaacgctccttgattttgattgatcaacccagaaagcacttgagaaagtctcgaacacaacaacttagagatgcatttatacacagttgagcagcaggctgtaggtctaaactccgctgccttggtagggttttctgtctttggaatgagcgttatcatagttgcatgaaactcctaaggcattaaacctgtcatgaaaaaattctccacaactttagtgaattcagctcctacttcaggccacattgtcttgaaaaatccaactccatatccgtctggtccaggggatttagaatctggaatactgaaaaaatccttcttaatttccttccttgtaaacggtttgatcatactcagttgctgctccatattaagtctgctccccagctccatacaatccgatcttcgggattaagtaggacttgaactagttcccatatagccc

SEQ ID NO: 220159 - DNA, 2658 bp, Cannabis indica
tttttcctctcgtaatgccgaactagatcttggcatattagaatgttgtaggcaataaatctcccttgtacaaagcctctctgattttacgcaatgataggggaagaatatcccttaagcgaaaacatatcatctttgtttcaattttataaactacattacaacaagagataggtctgacatcacttacattttcaggacagttagactttggaatcattattattgtggtagcattgatctccttgagtagcttccctgtgttaaataaagatagtacaactttggataaatcacttcccacaatgttccaattatcttgaaagaaatggttgttgaaaccatctagacccggtgctttctgccaaggtattgagaacgctgccatcttcacttcctcattcgaatatagtttgctgagtagagctttttgatcagcatttaaaataggtccagccgagatgccacttttcaacacagtcctcctattctccattttagtccccaacaactttgtgtaaaaatcgagaaaagtatcactaactttggatggatcactaatccaatttctagccatatctttaatgaagagaattctattctcttgtcttcttgctctgatgttggcatggaagattgaagtattagcgtcgccatcttctagccaatgtgccttagctttttgagcaagaaaggaaagatatttactatgagtttccttatatcgctcattagccattctctcatcatgaatgagtttactgtgaagaggatccctttgcaagctttcttaccaggtttttaaaagactttgtgctttgatgtctttggctgcaatgtccccagcatccaaccaattaaagactctaatctctttcttcaaaattttaagcttagcaattagcttaaacatgggtgtcccttgtactctttctttccaagccttgaaaattagctctagaatgccttttgattgctgccaaaatctaaaaaatctgaaaggtttttttccaatattcaggtgaggatagactgacaaaaccgcaggacaatgatcaaattggccttccgttaaaaagtatcttctacatctatgtagtagtctatccatgcttgattcggcataattctgtctattttagagtagattctgtcaccttccccttgcttattattccaagtaatatagttgcccaagtacttaacatcttccacctcgcattcggttatacaatctttgaaacctgtcaacttgttgtttttgactctttcttctagactcagtatgtcgttaaagtcttcaaacacttaccaagggccatgtatacccttgtctaacgataacatgtctgcccacaaaatctctcttcccttttcttcattaaaagcatacacaaatgaggcaaaaattgatattccctcttactgtcccaacttcaaggtgtatcatttggctagtacaatagaggatattcgcattaaacatcaatggattttagcttatgatgattcgtcccttaggatgccacatattattcgtagttagacaccaagccaaaaacatattcgtataaagagctcccaagctttggagcttttatttttgtttcaaggagaccaaccaaacctacttgtagagaagagattaatttcttaatctctttctgtttattcaggttgttgatcccccctgacattccaactcatgattctatccatggatgttaaggggtcctccctccccctcttctttagcaacttcttcaactatttcctcatgacttccctcttcctcatggagtgcttgaaatgcattcggggatgttacatttactattggtatctcattggccttctcagatctcctcccattcctcactaactgaaagccttcctcatccatttccttcagtggagctacagggggtttatcggctttcttaggcctccactcttgctgttctttttttcatgtcttcttacattctaaagtggaatggcctattcccaaacaattgcgtcattgcgatggaatcattcatacaccatcggaatctcaaccctgtgatcaagttcattcgtaaaagaaatttcctcagggaaatgttgatcaatttttacctcaattaacactcgggcatcagagagcatttccttattttgagtaatctgatcaatctgtaagggctctcctatttggctaactattttaaacaaggcttttctcccccaatatttaagctctagctcatgtagttgtatccatgtcggggctgaagagacattctcttttctgaagtctgtagttggattccaaagcttcatgatgatcagtttcttatcaaaaaataagtagcctcctgctaacacctggtccctgtattcaagagcatgaaatctaataataaagactccatgacttagaaatccaactttatccactttgtctttccataaccttcaagcaaaaccagtaaaggggccaattggtggattatcacctaacacatagcataccaaagatgagtttcaataggaaacctcttcctcaatatcctctgcatcaatttttattccccctgtgttgatatcagccttgtctcccaccaccccaaatttcaaacccatgttctgaattaagtgattagagtgcaacaa

SEQ ID NO: 220160 - DNA, 2277 bp, Cannabis indica
caaacaaacacactttcattacttttctcacaataattttagtttaaggacactaaaataactctattctatggagttatcaggtgcaaacatctcgggagctagatgcacaagaggcttagtgcctaggtcccaatttaggacccaccacctcagaccctttaatgatgtgagtagcttgggtggagctggtggtgtggagtgttgagaagctcacgaggaagggagttggggagcctcttgcgccttggcaactaggcaagtacttttgaggaactaggcacctcgattgctagagagctccatacgccttgggcttccttagatgcactaggagcatcgggtcctttggacctcgtcctctcaacaccagatgcacgtggtggagcacctagatccatttaggcaaacttggtggctcttcaacatcttgaacaaaaatttatgcacatccacatcaaattttttgagggataataatatcaaactgtataaaatgacttagtatataaattatatgattgatattagtgtataggataagtaaattgtatattattttgttaatgcagatttttgttaacaaattaacaagcctttttcgtaacaaagttgacacagaaattataagaaatttgagaaagaataataaaaacgataatggcaacaaatttttacgtggttttgctgttaattctgcattgtccataagtctatcttattcaaatatttgcggatatggtgtattacaattagtgatccttttttccaaggattttctgtccctttttttttttgtatattctgctcctatttatagtaatataggttggcagttaattacatttgaattcaaatgacataacaatatgtcccgaaatttatgggctttaattacgtcccatttaaacacgtataaataatagaattaaatcacacaactatgatttaaactatcttcaaagcggtcaacgcttaacaggaatagaaactcccttccaagggatctcgcttgaggcatcttgccttgtacatagatgagtgacttagtttattcatatgccttccagtaatggcataagcactagtgtactgggcaaacttaagaactgctctttgaccataaggccttgtagactggacaatcatgtcctacatgttcctaagttatcacacttagttattaattgtaatatgaattatacgctaagtgtttcaactgccattcacctcgtcaatactttcttaacgagatagatacctcactatttattatatgtaactccttcgtgttgcgaggtggatggctcgctatacatcatccgtaatgacctcggtatcatgctttctgagacaaaatggtttctcatcaatacaagaattgatagtttgtgtatccttgtcttgctcaagactatgtagtcaacgagttatgaatatactctattaatctcatatttgaaaagttattacattttgtattgaatgacataattatcattaaatctattggttcgtattcccttgattaacacgtgtcacttcctaaagtacagccaaatttcaggtataacaattgcctcttaaaaagtcattttttaataaaaaatgttttttaaatgattatcatgggtatattcatcatagttcaatttgaaaatatacatgcttttgaaattggcggtgttatggttccaatgcacatcattagcattaatgagccatcttttccaattctctcccatacctatctgttggatctctattcttttaatctgacggtgaccaatcttaaagtataaaactggaaaggaaccattttttcaccatttctgccttttcaaaaaaaattcgagctttgccttgcgaaaaaaccattctgatttctcgaagctttgcatgccctctttgtcattgatgtgtttcttgcaaatttccttggatttaaccttcaatctcaatcattcccagaactcgcacaatcgttcgtctcaaacccaaatacagaatcccccactgcacagacacacttttttaactagtaagtattcatccccttatttttctagtctttttcaattattctattatttgcatcttgccactccatttggttttggcgattctggtttaagttttctgggtaatttttagggtttgggcataatataaatttagttttatcatattcttaagcccctggtttaaaaaatttcatccaggaatcaggattgttcttttttgaaaatgtcctaatctggttcagaagtttattct

SEQ ID NO: 220161 - DNA, 3496 bp, Cannabis indica
ctagatccatatctgcgagataaagaactgtgttaacaattgtttaaaaacagataaaggcgaaaatgaaaaatgattttccacttaaggaaatttaccataatcataagatgacaaagaaaaaggactatagtattcactaaattccatagatcttgtgatcttaaatatgtcgtaagggtttagtggctctaaatcccaacttgaatctatatcatctgatctatccaacatagtctcatagtgctcggccatcacgtagtatgaactagtacagctaatcgaaacgtggaattcagggtcctaactatcgaacctatgcgttatgcgatctatgagaaagggattccaagtgtaaaaattgtattgactatctcggaaagacactaatgttttatgctcagccttaagcactgtgggtgaccatccacattgattacctcgggatgcttcttcttcatcttcctaagggactgtattttggagataaagcaatcgagctacgtattcttgagttttctcgtcagctaggactggaacctgctgccacgacgtatacttgggatacctataatcacaagtatagtcattttcagtgagtaggccaacagatctcagattggccttgttcaagagaaaatttgtagatcgaaggccaaaaggatgacctaacaggagcctgcgtcgctcagccatctcgggagtaggagttggccttttgagaccgctgtcaaaaggataaaattacaagtcaacgaggccaaaattaaaaacatggaataatttaaaaccaagtttggagcggatagctacttacgtattatgtgagaggcggttgtaattattggagagaggcatgtcgtccagaagaagtcttctttgaaaagggtcttgttcgataacccaacaataatcttgcaatcacctgtgtgagtcccaagatactaaaagcctcctgtagcatttttcctcacacggactgccttgaccgagtaaaggtagactatttcaagaggagtggggcactcccatcctaaaattttatacggaacccttaagcttgtaaggattctgtaggaaatgggaaccaactggaatggagctattccgagatggttgatgaactccttaaaataatctcgcagggggagaattgctccagccctgatatgctcgaggctccaagcacctatccctgccgaggcactagtactcgctccgccattggtgtcaccactggtcccctcgcgtgcctcgcgagtaagtcattctggtgggtaggagctaaactcaccaggggctacagatctaacacaatatttccatttctggtcaatgccacaagtccttaagataccacctacatagtctccaatggctcttatccttgactcattaagtttggcctcgaatgtgacattgggatcttgcggactctttgagttacaaggcttggaagtctttatttcaaagtccaggtcacctggtgaaaaagcaattgtgactttgggtaaaaataagggcttagccaaaggaatagatgataaatttgggggttcaggccaggtagcatctcgtaagaaacaacatttaccctccgttatttattgtaggaaacgactataatgactagcaatatcatcttggtgggtttcaattaagttgtccctaatttttgcatcatttatctctaatttggactggggttttgaagctctgggtttgtacgggatggcaagttcactaggatactctgtttctatggattctgaagaataaacttctgaaccagattgggacatttttacaaaaaaaaaatagagcaatcccaattcctggatgaaatttatcaaaccagaagcttaaagatatgagaaaactaaaaatttgtactatgcctaaaccctaaaaattacccaaaaaaatttaaaccaaaatcactaaaaccaaatggaatggtaaaaatgcagactatcaaaatagtgatcgaaacccagaaatgtaaaaagaaggaacaaagaaggatgggtcacttaccgtttgaagtcgagttgttgtgcgatgaatagttctgcaactggagatggagtgaacagcgtgatgatctttttgaattcttgaggttgaatagtaaatctgaatatacgtgcaagaagaatgtaagtgacagtgagggcatccaaagcttcgtaaaattaggatggagtttttcgtagaaaggctcaagaaattttgaaatggtgaaaaattatgaaaaggtggttctttttccagttttataccattgggtttgatctctgtcagattaaaaaaaaaggatccaacggataaaaatgagagagaagtggaaaagatggttaattaatgctcatgatgtgcctcgaaaccacaaaaccgccaaaatcaaaggcatgcattttttcaaaatagattatgacaaatataccctcaataattatttaaaaagcacttttcattgaaaagaacattttaaggggaaattgttatacccgaaatttggctgtactttataaggagacacgtgtcaatctcatggaatatgaatcaacaaatatattgataattatatcattaaatacaaaatagaattacttattaaatgcaaaattaatagagtatatttacaacttgctgactcgacggtcttaagcgaaatcagaatgtacaaactattgattcacgtattgacgagaaaccatttcggatcagaaggcataatcccgatcccgatggagacatagacaacgcataacgaggcatctacctcgctgtatgtgaagaagtattgatgaggtgaaatggttattagaacacttagcgtataatacgcattataataactaagtataataatttgaaggacatgattgtccagtctgcaaggccttatagtcaaagagcagttcttaagtttgctcagtacactgatgcacatgacattgctggaaggcttatcagtcaaccaagttgttcatgtactaggcgagatgcctcagccagatacattttgcagcgtgtcctaatccacgtcatcgttgacctccttaaaaatagtttaaatcacaattgtgtgatttccaaatattaactgcatttatttacgtggatcgtaattaaagcccaaaatttcgggaaatattgttatgagatttgaatttaaatgtaattaactcccaacctatgttggtataaataggggcaaattatacagaaaagggggacgaaaagtcttagagaaaaaaaaaggagtataatgattgtaaaaacctagttaatgtatcagaaatatcagaataagatagactcgtggactatgcatagttaactgcaaaactacgtaaaaacctagtgttatttttatttcaattagttttctcaaatttcttataatttttatgtcaaatatatttcaaaaataggctcataatcgttaacaaaaatatgcgttaacaggtagatacatagaagatggaca

SEQ ID NO: 220162 - DNA, 9694 bp, Cannabis indica
gatgttaatgaaacatacttgttagtaaatctagatcctagtaaaatatttccagcagagaggccccgtgttttttcgtcattaactttccttcttgtttttgcttgacaaaaaacttcttccaacttcatgaagccatcagctcgctcaaggaactcttccatgttgttcatcgagatcctcttgatatctttctaggagtcactcaatggtaggatgcctacgagtatggtcgtatatcgaccttcttctatcaggcctttgaccttggtggcgtcagccatgaaccgttaaatgtagtcctttacctcacttttagccaacgacagtaagtcaaataataagcgattgaataatgtaattaaaagagaacaaaatataataaagtaaaatgaacacctgattttaaagaggttcggccctgtgagtgtggtaatagcctacttcccttgtattgtattgacttaagagaaggaataaagtgttcttcccccttgaaagctcttacaactgatctctgagtaattctcttagataactattttctctctagaatctctctctctctgaagcaattctcttgatccccttcatagtgaggctaggtcactatttatagggccttaatgcgtgaggaatggtttcccttttgcttaaaatgcataaaataggaaattacaatgattacataattacgatatatgaaataggaaactagaataggttgccatatttttctgactcaatcccatgattgtagggattctcttcgtctagacataacaagattattttgacataataggcttctacctagtcggatctcttctctatagctctgctcaggtgatcgacaattatggatactgacgaattgtgtgcaggctgctagggatacttccttccgcccaggtgtcagagatataggacatgtgtcgctcagttctatctccacgttaatgtgaaaaaaatctggataacatttgccccccaagtctacgcaggaccttcctggttgcacgtggacttcactcaacctagagtcttgtccggacgggtgatgcatgtcctaggaatcgaatggcgaaccaacgtgaccctaaccaagggtctcttcaatttcgagtcattaatgttgatagatagttttcccttgaattgcaacttgatggccgcgcgtgaagacgattactttgacatcaatgaatacataacgtataatttttgggggaattcgagaaatttaaattttgaaatgattacttccttttttgaactacttataaataggattgaaaaccctaattaatccttttagtcatttttattctcgaaaaaactagagcaaagaaattgttaggcaatttctctctcaaattcttcgaagaattcacaggaaactcttttcaacacaatccaagcagaacaaaaagcttcaaaccagtgagtaagttctttatttctttcttttatacacttgcatgcttaattttctgggtttttgtctgcgaatcttgactattcttgaacatgttctaggataaccatataattcataggtttacgatttagaacttttgattatgtttaaccacaacgtttgattctatttgggctttgattttaatcccacgatatccattttcacttattcattaggggttttgtgagaataaaactccaattcgaagttttgaacttctgggttgaaaattccatttctgagttaaatttctatttttgattcctcaatctgacctggttagtacattcaacctatttttattcattgccccgaccaattctcatcttattgtttgctaccttttgtagatgacccctggtgaattttaaggaggccaataacatatcaaccaagatatccttcaacctctatacgaggatcatcctcgtctccgtgctagcccatctccgtccagtgataacctctctaactctagccttgaagactggaaaataagtagtgaacacgcaccttccccaaaacccgaggtgcaacatcacttctatcctgaccagatccaaggtcagggatacagtcgcttcatttgggaacttaagaagaggtggagacgctatcttccaactaactggacgtacatagtctgcctggacgtagtcgacactctgctcgagcgccgcccaaatcctgctatgacgagtaaacctgttgctacttttgtagtgactattgctaggcacacaaacaaaactccatccaaatatagaatgatggtgcgaactaagcaaactatacaaaaatcttcactgtctgacccacacattgcctatcttgccaccttacctggggcagaacatgtccaacttgctacaaagaggagggtatggctagggacattgaagtccaagagctggaggaccaaggcgaggtccgtcctgctaccaattttgatactcaaggagatgaagaagagggagtagctcgggtgctaccattcagtggctacaatgaagaaggaaaacctgtgtctgaggctggcgatgttttggaggtcggcaaagactatgttgttgaagaatacactgaggctatcccccttaggaggcaatgtgcattaggagatcgatggatttctccaccatccgtggtgaccatgggaaagatgaaaatttttctcaatcgtggttacctagggaatgcttccttccctcccccaaccatctggtaactaaaccaagggaaggttactgcacttggtcggcagttcataccaagcagggtgtgatgttacccttacttccatacatcaagaagatcgcaaactattatcacataagtctgaccaagttcacccccaaaggcctcaattacttgtctgcgttgttcatcctctacaccatacaaggatggggtgagttatccacgcatgacaccaattggctctttgatttgaagtcaagtcccaaacagaataggtcaggatacttctatttttctcaaatcgaggagaaatggttaacgggcaccatggccaccgaggtgacgaagataggaggctttttggacgaatactactttgtcaaaggaatgggcaccatccacaccagtttccagcaagtgccatcctacccgccctttgttcacactggagctccagaagaggatgtaaaagattcttcaacttcctcttgttgcacgaaacatctccctctttgccaccgaggctaattttgtcaagtacaaactttttccggcagattttttaccaacggctgtgaaagaagcaaaagacaccgtgcccgaacaggagactctaagtaagaagaggaaaaggaaggcttctccaagcatccaagtacatgttgagtggtctatcaatatcagggaagaacctaaaagagttgctcggccatccaccctagtggcaggaaagggaaaggtcgtcctaatagagtaggaacaggaagattcctcagacaatgagcctcctcctctgcttgttcgagagaatgctcctgcctacgtgtatggtattttaacttacattttaatttttatctgtattggcttacatcgtacttgtctttaacctccttgtgttgttcacatgcagctatgtcttaaaaggtgttctaggccctaaagaagaggttgagtgacagctccggctagactcctctggccaaacagtcaaagggtgatgagataccgctaaaggaaaggagcttagttgagtcacccatcgatgtctatgaggagatggcgtcggaggtggagctaataaccaagaagacctctaagtccaagggtgtcaaggtaggaagcacagatgggtctggttcgtccaggccctcaaatacttctatcgtgctgaaccctgagaccaaaaagggcaaagagatgcttcaacattaccaggaccagctactccccaaggtaaatgatcagctgttcagaggggatgagatgtctgtggagcttttgatgggaagaatcctaaggaggtaactcgagtaagtatttttttccttgggttttatcttgtccttttctttgtgcaagttttaaccttttcttatgagctaaacttgaagatggcctacacttactcccaagccaagtctagtgccttaaaaactataaccaccaccaacaatctgcagaaggaggtggtgtagccgaaatggaggctgaggtcacaagggcagagctgggcaaggtgaacaagcaactcttgactgccaacaagagagtcgaggagctacaaaaggagattcaagacatgccatctattgcccaacatgaggcggatgtggatgctctatccggggaggtcaatggtttgagggatgagagggaaagtctccagaatcttcttgctacattaacccaggagaagacaagcttggaagaggacgtcaaatccaagcagacaagggaggaagtgcttctgaaggagattgaaagtttggagtcggtcgacttggaggttttctatgaattttgaaaggccaaccaagaggggaactttgattacctcggtgaaaccaaggaggcatatcttagttactgtgtggcccaaaaagacaaggaaaaccgtgaagtagccaaccccacagctctgactgaccaaagcattgagaccccgaccaccaatgaccaaactgattcgtataaagaacccgggactcatgccatgtgaacccttcttttctttttttctcttttttttagttcgacccatgggccttttttaatacaatatggccgaccaagcggccttaaaacttagtaatacttcattttattttaagacgactagctgatcggccagccttaaatctcgggtttatgttgtgcttttgtcatcattttaaaatgaatatttcccttgttttagtaattacacatgaaaactgctatattttttctgagcttgttatttacctatgctttgtacgggtatagttgcccccaagggatcgagcagacttatgactcttggtcacttgcatttcacctgtttagtttttgtcttttcagcttttgggtttgagcgaaccttttgtacacattttaatggtaaattcttaacttgctatataaaaaatataattgacgcaattagaatgataattaatatctttattcatttattggtcggaataattttgttaccgtagtaacttagatttatttattatgaaagctattataagatctaattgatccttagctaattaaaacataaaacaattgcatatgtagtttttttaaattgtactttaaagatggtcatccgacctgagtactagttattttattcaaacctttgagtgggatccacccagagggccatctacttaagattaaatgttctagcattgtgtacttgagagggtcatcaaaccttgtacacttactggtagtatttcctcaaatgttctctattctaatatcttactagaacgagctccatattttcattatactgtcccagcttgtatgctccagagtctatgacttcaaccacttggtatggtccttctcaattaggtctgagtataccagccgcgctgtcttttgttttcaggaatactcttctaaggaccatatctcccacaaagaattttcttgccctcacttgcttattgaagtaccaagccaccttttgttgatcaaccactagctttaggtttattgaggttcgtttttcttcaatcttgtcaagtgattctgcaacgagggcatgattagtttcttgatcgtaggttaatctcttgtgggatgaaggttctaattccacgggcagcatggctttataaccataggccatagcaaatggtgtttgcccagttgttgttttctccgttttttgatatgaccacaatacttctggtagttcctctggccagttccctttagcctcttcgagtcgttttttcataatatctttgagtatcttgttgattgcctcgacctgactatttgtttttgggtgtgccactgcggggaaattttttatgatttcatgtgtcacaaagaaatctgtaaacatctggctgtcaaattgcttgccattatccaaaacaatcttgtgtagaagtccatagcgacatatcatgtttctcatcacgagtttcaacacttttttagatgtgattgttgctaaaggctcgacctctatccattttgtaaaataatccactacgaccaccgtatattgtactccgcccttgccctttggcaattgtccaattagatcttttcccaatatggaaataggctaaggactttgcatcagtataagctcattaggcgttgcacaggggatgttcgaaaatctctggcatttataacatttcttcacgtaggcctttgaatcttccattatttccagaaatatccttgccttagtgttttcttcgatagactttatcctactgcgtgtatcctcttattttgttacacatctaagtaatggcatacagaaacctcttctatacatcacaccttcaactatgatatatcgtgtaacttttctcatcaacttctgagcttcgttcctatcatatgcaagttctccagtgttgaggtaagctactatgagtgtcatccagtttggtgctatgtctatcattttgatttcttccgcacaagtgatgctagattcttctaagaattggatcgggactagaatgcccttatctattactgtggtactcgcaaatcgtgctagggcatcagcaattgcattctcttctcttggaatctgcctgagggtataacccttaaattgagcgagcatgtcttgtatcttccttagataggccatcattttctctcccaggctacatactctcccgaaacatgattcactacgaactgggaatcactacagacctcattgcacttgttatgtacttctcaagcaagttttaatccagatatgagtgcttcatactctgtttttttgttggaggccttcaacccaaatttgattgctctgtgcaggtgttgcccccaagtgtgacgacggcgattctcgcaccaaaaagctggtctgtagctgattcatccacatgaaattccaagtaggtctgtcttcattattttttgttagggactcttgtacttgctccaggttgtcccttatgtttgtttcttctttacttgtgcactcaactacaaagtctgccaaggcctgtcctttaactattgtacgcggttggaagattattttgtactgaccgaaccctattgcccatttaagtaattgcccagaggcatcagaccgttgtaataattggcacaatggttggtcggtatatacccgaatagggtgagcttggaaatagggatttaacttccttattcctaagattaggcagtaagtgagcatttctattaaaggatatcaaccctctgctttaacaagtcttttgttgatatagtagactggatgttggacgttgttttcttctcttatcagtatgacgcttacagcatattcggtgagagccaagtatattcctaattcttctttgtctaggggttttgagagtacaggaggctttgcaagttgtcttttaatttcttggaaagcattctcgcattcctccgtccattcaaactttttattacctcggagaatgttgaagaaagcaacacacttgtttgttgattttgaaatgaatctgctgagtgcggctatccaaccagccaagctttggagttcctttgtctttgttggcgatttcatatccaagagggcttgtattttctctggattaacctctattccccgagcattgtcaataaaaccaagaaacttactagagctgtccttgaaggaacaatttaagggatttagtttcatgttgtattttttgaggattttgaagcattcatccagattctctatgtgccccccaaccttcctaaatttgtcgagcatatcatccacatatacctccatatttgatctgatctggtctttaaacattttgtttactagaatctggtaggtggctctagcattctttagatcgaacgacattactttgtaacaatacaaacacatatgttttcgaaaacatgtatgttcttggtctggtgcatgcattctgatttgattataccccgaataggcatccataaagctcagaatttcatgtccgactgtttgcatccacgagctaatcaattcttggaagtggaaaatagtccttgggacacaccttgttgaggttggtgaaatcaatacatacttgccattttttgttcagcttgggcactagtatggggttagccacccaagccgagtagaaagcttcaatgatgaacttgttctcgatcagtctctctaaatcttctttcagtgcttttgcctgttctttgtccaatagtgttctcttttgctggatgggacaaaagtttggatcaatattcaaggtgtgagacatcagagtggggtcaatactgaccatatccttatgtgaccaggaaaaaatatctaggtttgctctcaaaatttttattgaagctaatttattttcgagcaacaaacccttaccaattttgagtttcctggccgtgatatttgggttgatttcaacttttttcagttcttccactggccctacatttgtgtttttttccccaagtcagggatccatgtcttcaaccccgccttggatggcttcctattgggcaatgctttttcccttgcatgaactctagccaaaggtattttccttcttgactttagttagagcaaggttgtggcattcccgtgcaattttttgatttcctttgagacatcccaccccattccttgttgggaacttgatgcataggtggaaagctgatgtaacaacttttaagtcatatagggctggtcagcctaacatgacattaaacgctaaagggacatcaattatcaggaattgtgccatcacagttatgctcctcaaagcttgtacaatagtgaggggtagggggatttgtcccggaggtgcaatgctttggctaaagaaaccgtatacgagctgggtgcaggggatcagatctttaagttagagtcctatcttttcataagttgttttaaatagaatgttcgaggaagctccattgtctatcatagtccatgccactatcttatttacaattttcacttctgcaaccagggggtcgttgtgcaggaaatggacatggctggaatctgcttcagtgaacgttattattggctccccctacacgtggtattttttgttttctctcttcaacaaccaagaatgtttcattttattcatactgtaaggctcgggcataattttctcaagctttgtttgagtctctagcaagatgttgacccccaataatgaccagtaaatgtctgtccactagtggaggcatcaactgttacatggactatgattattatccagtttggcggtcctttggttcttgtcggacttgacatacttctgtaaatgcgggttattctttctgatcaaaaactcaatttcttgcttcagattattacattcgtttgtgtcgtgggcgtattccacatgaaaatagtagaacttggatgtgtctctcttacttacatactttttcatgggagatggtttcttatatgacatcataggctgagttgtcacatagactgtctctaggtcacctgttaggactgagaaggcagta

SEQ ID NO: 220163 - DNA, 5691 bp, Cannabis indica
ttgccttgtgcctcgacgagaaaccatgtaaattcaggtgtacaagatgaggcactaacctcgttacgtgaaggagatataataataatggagatacttagcgtataatgtacggtacacaatctaagtataattgattggtgaaccaaagcaagggatagcgaggaatctaccttgccgtaggaaggcatgcacgtaaaagaggtcatctcgccaccagaaatgcagttgtcaaatttaaagtaagagtattatcaaccatggaaagatatatgacgagctttagctcagtattaggattacttctatactatccccagcaagacattccaatatgatatggcatacaacatatttaatacacgttcattttgaccaagtaaaagcgggatatttacagctgtgtgaaatttaaattaaaattacatttatttaacatgatatctaatcagatcccatgattttagagggataatcgttgtgaaaagattacagtcaactctgtaattaacttcctactacgtgattataaatagtggcaagtaagattataaagggggacgacgaaaaaatcatacaaaagaggccctgaaaaactgaaaaaccttgttaaaaatcccttttgttcatatctcttactttactgctttcattttctctttgtgaaattatcactgtcaggctcacattttggttaacgaaaatctacgttaacagtttggtgctttcattgagagccttcttgaaaaaagctcagaaaaagcctcctgacataaaagtaatggatgacaacaaagaagataatcctcatgaaggaatcagtcatcatcctggccgaaaaagagccactgagtcctcaaggatcttttgattcatcacctgaacacgccactacctccgggataacctagtattagggactcagactcgaagggtctaggataaacaacagtcggtctcttcccaaccaggttgacaaggatgccgcctacgacccaacaaggtacataccaatcgttgagttagaaaacttccatcttaggcaccgattggaggaagcaaactagcataatgccgaattagagcgtgaaatagccgcagttaggggggcacaggagaataattcccaaaatcaacctaacctttgagatagagatccacgaggcaaaccttgtaactcacaaaccaaggggcaggagacagcccaaagatattcccaaaactctcaggagaggcaacttgaggaaacaaagggaaatttggggacacaacctgggacatctggaacgtcagtcatagatccccaaccctctctccatgttcataagaaaggagctcgcgcaaacccctagagggggaacgatgtgaatcaaaccttaagaggaagagtagcacgagaagaggtgagaaatatcgcgaggcgtacaatatgtcataatcgatcaatgcgaggaggagaggacactcttcgtagaaatgttcaaaaaggcataatgcaatgtatgggtagagcaagatccaacagttgtcacgactcgtgggacctacaagaacacttaaacttgaataaacctgatctttgtcaacgacttggtccaaagcaaagagatttacttcagtttccaatagaggagttggagaataagttcaaaagacatcaagtcagggaacccagaaggcaatcagggtatgattttgttgaagaatttgagtcggaagctttaggatcaaagaggaaagacgattccaaaaggttgtccaaggataagaaatagaagaaacacaacaaacatatacccctttatgctgaatataccgagatgaatgaaactcggaaaaatatttacctcgcacatgtacaggaagtcgtttttagcgagccaaaacctatgagacacgcgagacgtaaaagggacccaacaaaatggtgtgaataccatgaagatattggacatgccaaggaagagtgttgtcagttgaaggatgagatagaaggtcttatagcgcaaggacactttcaacaatacgtaaagggacaggacaatgctcatgatcaacccggtctgcccactaactcaagcgaccagggaccataacctgcctttgtaggaggaatggataccttggttatctcaagagggaattctttgcaagaagacaaggggcagttaatttggtaaagcaattacataaaattattgcgaagtaaataccgactcgctatggttgtcgtatcaagctaccatagggatatggcagttaaagttggtcgtcaacctgaagcagttaaaggcaaacaattaaaaccctggatatggcagggattgaccctggatattgaaacaattgtggaaatgtgtaagggattgacctggaacatcaaaacccgttctatcaaaatgagatgcttttggaagattgataaaataaacaattgaactggggaaatccttatgagattagtgattgtaaatcacatcgctgatgtaatattttgaacttcagatgtgaataaaataatcatttctttgaaaaagtaatcgtaaagcttaactcttttaaattacttgaggggcatatatgtatgatcaaccagaatttatctggaaatacataatacaatgccaaccaatcacttcaaaaaattaaaatttttgaaaactttttaaaaggtcctcgaccaaaccttttcgacgaaaaaggggtcgaactgttataactccctgaccaaacctttttgacgaggaggggtcgaatctttataactccttgttcaaacctttctgatgagaaagggatcaaacaactataatttttgatttaaaacctgtttgacgagaaagaaaaatcaaaagttataaatgagacataactcataacacacgcataaagctgaatactaacggctcaggctaaaggaaagagttaaacgagacattaaagtgtcttgaaaaagtacgtaaatctaacacgtgggtagaagatgtaactactcatgtatgcaataaagatatatacgaagtgacaaggtcactaaaatatatttaagttttcttgaaataagatcacttctgatgagcgcgaggcggaatgaatgactactcgcaaatcgagggtagggtagaagataagctgctcgcgcgtaaagtaggttattaactgcttaacgttagagagaaatacgagcaatgaaaacctctaataaattttatgcacatgattgcttaaattgggaatgaaacgcaagcaaacaaccaaatgttgaagtttaaacttaaaagtatgaggcattaaaagttggccatccaactacgcaaatttgtgtttacaaaaagtgccacaaggggaaaactgttgtctaagccaaagggccattttcaaaaaaaaaaacaaaagggagataaataagaaccaagtttacatggtgggcgacttggatagatattcttcttcttcttctgcctcgacctcttcctcctctttcatggacttcttccagaaagccagagtttcctcttccttctcctccatgaagcttgtgtccatgttcgtattcgccatccaggctccatatacaatacaaaggacaaccttgttgcatccttctgtggttttgacttccttctcagcgagcttcttctcaaattcatcagctcgggccttgatggtcttctcggcttcttcaaggtcgttttttgacttctcagcttcttgtttgaggcgggtgatatcctactgggcgttgtgtcctgtttcttaatcacaaccctgcattgggatagtcatttctagacctcgccctcaaggtatttgagccgctccaagagtcgtcgattaaaagcaaaagagaggaaagaagcctagagaatcacgaataaatgaatatgagaaagaagagaaaaaataataataataatactgccaacttaccatgaagttatagtctaagttcttcaaaagcgtctcttctggactagcaagattgattagatcccaattagggggaaggagagccttatgtttgtgctagcaagaaatcccgtacgcctggtgaaattcagatccagcctcccccactgcagccggcaaggtctcaatggccttgctcgtggaggcagaagcatgagctgtctcaggaggaggagcattggtgttgggagcaactggaggaggaacttgttcttgggtctcgatatcaaagaccttgaggttaataggctcggacaatgacttgtttttgtcgacagtggttttcctttgccttttgggaggtccaacctcggcatttgttccttttccgatcaatgatatcttcaaaacctcccaagtctgcaatacaaaataaagtgttacaattaataaaaaggcaaatgaaagaggagcagggagaagtacaattttccacctaagggatttagcgaagtcactagaagccaaactatcactagacgagggggtagaaggaccataatagccactaaaattcctttagcctgtaatcttgaatatatcaaaaggcttgattggttctaaatcctagctcgcgtctatatgacatgccctatcttccatagtgtcgtatttctcagctatacaataatatgactcgtgacagttaatctggacgtggaatctagggtaccagctgtcaaacttatgagcaccttgctttactagaagggaatcccaaatataaaaattaaggggggtgtcttggaaggtgattaatgtgttacgttcagccctaagtactgtgagagaccaaccatattgattacctcgggacactccttcaccggcttcccgagcagcagtgttttgaagatactgtgctagagccacgtgattccaagtcttatcctcctctagaactgtcacctactgccaagaagaatacttgggaaagttataatcacaagtatactccttgtcaataagaaggcccaccaatctcaaattcgcctcgttcaaaaggaagttgcatgacctaaggccttttctagaaaaatcaaagcaaaaaaaaaacatattatatttattaaggtatatagttaaaggtaataatttaatttaactaatttttagattataatttaatttttatatatatatttctcaacaattttataatttgttttaaaatataaaataataatttatattacatgtaaaaattgaataatattttcctgatattattattattatagggaaagagtctattattataataatatttttcttatattttataaacattaatgaattagtttgggtggaccactttttatttattttatgctggtatgatatgtgttaaagcctatattattgccacgaatggtgtgccaattgagagaaattagttgccaaatttatgtgtggacaaaaatatttacacacacatatttgagttggtatagactaaattatttatttttagagggataagtaccaaatattaataaaagtgtaatttttcttcagttttgtaagtataaactttgttagtgacttaaatagtagagaatagcagatattttaaatcattgaattctgacagaaatatgtaatatgagctacgttcaaagctgcttttaataaatttaaaacagatctagtctgtttaggcgaaaattacatttttataaatattgagaatttatgcatgcagctaaagaaacatttgat

SEQ ID NO: 220164 - DNA, 5757 bp, Cannabis indica
aattaatatttatcgttaaatttatttggtaactattaataggtaatacttattgaaaagtgttatagatataatttttcccaaactataatccttgaaaggcttgctcctgaactatttttgtttgaacttttttcacccacaaaaaaaaaacctttacaattacattttcttaaacagtttgttgatgtagcactaatgcgacactaatctagcataaacaaaaatacatacataaataataatgacgagttatgtgaatatatacattcttcaaactaatgtttgtatatttagtgtcaataaattaaatttcgactagctaagttaattaaaaagaccactatactccaaagcttatacctataatccataaccacataacaaaaattatttatatataaaaaaagaagagcaaaatacattaaaaaagaaaaaaaaaaaatttgctatgatctatatagttccggattcttttttttttttttttttttttttgattaatcttaaaataagcaattgatttagcaaaagccacaaagaacaatttaacggaaaaatattgtacgaggaaaggtggacttgaaactacgggggaacaaaagtctcttttctattcaatttttcttacaatcattattgagttcttcaaggtacaaaaatgggccccaaaaacctaggaaacctgtctttactttaatcttccaaaacttactcgcatacaagtttatattaagtgttgagtgtataaacctgagagaagcaaaatctttgagatgagtcaatggatctcatcatgttcagctattgtagatgataattatgaataaaagaaatcttctaccaaatagaagagaatctaaataactaactatagtatatgcccgaaaagaaacacttttagtgtcagcattcaattcgaacagcaccactctctgaagaaatgaacttaggctttcttactacttgctccaaacactgaatgacgtctccaacctgaaaatcatcccagtcccggatcacgagcccgcattcattccccttcttcactgtatcaacatcctgcttttctcgcttgagagatgtgcaggacccttcaaacaaaatttccccacttctcagaagccgcatgattgatgatctggttacataaccatccagcactcggcatccagcaattctcacatctgctcccttagccttgctccttcctttgagctcaaagatattcagcacctcagcctccccagcaacatgggtttcagaagttccaggggccttttctactatcaaatttccaacatcctccaaaaggcgataaattacacggtgcagaaatatctaatcaacagaaatgatacaaacacatgatcaaatatttatgatttatgtagaacaaattatttactccaacactagcagataactgtaactgacagcaatgagatattagtaccttaatgctggcttgagtagcttccaacgttatagagctagctggacttttaacattgaaaccaactatgcaagcaccacatgcttttgccaagtctaaatctgactgagaaatagggccaacgcctacatgtactacattcacaaaaacctggagaatgaagatgaagaataagcaagtgcataatttaatctcaatgacaaaggaatcttcatatttgaaaacttaaagggcacacaggacatggtgttatgattatatcccatacctgaggactattcaggctccttaatgcatctgtaacagcctggacagtcccctgaacatctgcttttactattactggcatctcaacccacttaggtgcctcttctgatgaatcaggaatttctgctctcccctcactaatcttcataagcctatctttctcaaattttcttttcctcccagcactaagcattctagctcgctcctcacactccacaacgacaatatcatcgccagccattggcagtcccttcagtccttcaatttcaactggcattgcaggttttgccttctcagtcaacatcccggacatatctctaatagctctaatcctaccccactctgagcccacaaccacatgctggccacaaagcaaagtccccgctttcactatggcagtggccaatggaccccttcctctgtccagtcttgcctctaccacataagcttgagcaggtccatcaacacgggcttttagatccatcatctctgcctgaagaagaagacactcctccaagtcatctaatccagttttcttcgctgctgaaacttgaaccacctgaacatctccccccatatcctctagtagcaggccctctgaggctagctggagtttaactctctctgggtctgcagctggtttatcacacttattaatagcaacaacaattggtaccttggctgcctttgcatgggccacagcttcaagagtttgaggcatcaccccatcatcagcagctacaactagcacaactatatctgtgactgcagcacctcttgctctcattgcactaaatgctgcatgaccaggcgtgtcaaggaacgtaatggctgctcctgattgcatggccaccacaaaagcacctagatgctgagttatgcccccagcttccctagcagccacagaagtttgacgtaaagaatctaaaagagaagttttcccatggtcaacatgacccataacagtaacaactggaggccgaggaagaatttcttcaccttcagtagaatgaagcctcctcacattgatcccaacttcctgaaaaattaaaacacaagattccttaaggattaagtggcccacacaaaatttgcaataaataaatatctttcaacgtaatgaaaataaaacattagatcccaaataaccatccagaaccagctcaagtacactaggagcaatttggtcgtgcttaatgtagtacaatactacactgtggttcagcaagttaggcaaggataaacctactcaattaaataaccgttttttctgttttcaaaactacttataagatccccctccccaacacacgattaaaataagggtggtatgcaattctgtcactattatccgatttaaatgcccagaatgaataaaaagttatctttttaatagaatagactcagattttactcgctattaaccttaagagagtaataattgtgtcattgttatttatagaaaatgctatccaaaatgtataaaacaaactataaaaactgaatgagaacaagcatcctatttcataaaggaatatttgtattctgcatctttgacaatagaaaaagttttccacaaccctttatttacacacacccagcccagtgcagcttctcctctttcgattttgttccctgagcaacgagaaaaaaataactcctttgcaagtaacattccccatttatataggttttacctatgagatttacctggcacatgatattcaatgctaatttcaattttaagcacgtttgaggatatggtaatggtaaaactagaatcaccaaaatattaaaccatttttttagtacaaaagtttccagagctgaaagttaaaataccattgctaccagctccgctacatcaacgctgagtggatcaaactctgagtcaaccttctccccaacatttacaaggataccttgcagagtggataatgactctccagtacgcttggaaagctccagaattgtcatgccctcaaatatatctattgttttatccagcaaagctttggtgggtttttgcaatcgtggaggtacatacggagcttcaacaggaggttggcttttattttccttttttacaaacttctctcttttgggagtcttcaaacctaaaagcccttcacttttcattcttgcactaaggattgtgcttacatgatagcacctaggcagtgcagaatcaaatgtcaataaaagaaagaatcagaattaaaatgtttccttcacatttaaaatttacaagaatgtcaaatttgtcaattcaaaaaagtgaaaaatttccttagtccaccctcatcctccctccttcctcataatgttttcttgcttatacatggacacatatcagctttctaccaagtaccatagtacaaatttggtgctaaatcccagtaggttccccgacacaattttttatttataaagccagacaatatgtgttcaattttccacctttagacatctcaaagagtcaaaagaacagactttatcaaaatctaaaatacagcttccaaatacttggggtcatcgtactgataattaggcatgactcaacaaactaaaaaagaccagtcaggttagggcttcaaagttatgcctcctgacgattgtagtgttcaacaaagagacaagaaaacatgagaactcaccttagttggggttctttagccaacacttgatagtaaccagagtctgggttgaaagaggtctctggtaagcaaatgttgagaaacaaattactcatctttatacatttcaaatctcttacaatatgtaaaagcaaatatgaattttatagattggaattggagtagacactgaagaacatatgtgaaaatagagaattaaatgtacctggtacacatctcccagaggcagaagaagaaattggcagcactgcttgctttaatagcgttgaagttagagctctagaaagagtagcatgacttccctaaggataggaaatacaagttcagattaagggttgaatgaagattagtgttgggcaaataaggccatgtttcaatattaatagtgacaaacagtatcataaatgatcaacttttatcatataaatttgaaaataattttataaatgaaaatgttttgggtaaagattctaaagaagaacagacctttctatgaagcaccctccacgccattcataagtattacaaaatctgcagacaatcccacaaaaggaggaaggaataagcaggagtagattgtgtttaagttgtttgatttacatataagaggatgaattgattttgtattcctatagataatgccaaccagtatttcatacgtacttagcttacaaaaatctagtcggagcataacattgaaaataaggagtacctaaaatgaaaaaacctgatagcgataaatggtagagaagttgcagagtgggctgggcagaggacccaaatggagaaggggaccgaggcagagagatataatttagggtttttgtgtgaatttgagaaagctgagtttagcagaggagatgtttcaaaggggaagagaaggaaaccagcttgggtgtaccgaaggaggtaggaatagaatgccccttccttaccgcgtcgggtcttaagcctgggtattggggctttattaatttaagatttaactaactttttttttttagagaactgaaccttaggcttacttactaatgagtttgaatgtagagagaccataccaaccaatgctgcactacaccgactcttaatttcaattaaattatttattcataccaattatagtttaatattgaaaaaggtaaatattattttccaccccgtgttttgtaaaagttattaattagactttctgttttgttaaatggtaaaaataggatctcgaatttaatttttgacaaatttctttaatacaaccaactcgaagataattcctaacacgaacagatacagaaaatataaacagtgttttcataacacctttatatcagattattattaaattttattttgacaaaaaattaattcagggtcttattt

SEQ ID NO: 220165 - DNA, 2442 bp, Cannabis indica
ttttaataacaaaatccacaacctttttagaggtgacaatattaattagtttggcctcaacccatatggtgaagtagtcaactgcgacaatcacatacttgactcctcttttgatagtgggagggatcctactaggtcaatttccgaaatgttgaaaggccacgagctacgtatgagcgcaatctcaatgggtggtgctctgcgtaccgttggcattggtcacacttccttacgtactccacataatccttcttcattatgggccaaaagtatccttgtcaaaggattttctaggaaagactgggccgggaagtttgatatctgcaaaaacctccatgtacatcatggattatagcgctaacttccattctggcaatgcaccttaaaaatggcatcgatagtcctcgacagtataactttcatccaccttatccgtagggagctccccagtactcaagaacttgtaaatgagcacccatccaggagtgtgagttatccactatagcatttacctcttgatttcaatgttgggtctctccaaatggcaaaccagaactaccccgtgctcgatgatctcaagatccgttgccaacttaggcaacatatcaaggaatgaattttgttatctcagaacttagcagatgttgcaacttttaaacccttgcaacaactcccgagacatcaggatgtatgcagccattcgttcaccctttgtctggtatttaccagagatttgattcaccaccagatgcgaataactataaatatcaacttgctaggcccccactttcttagccaacttcaatcctgggaacatggcttcatgctctacttaattatttgaggggtgagatccaaagtgtaaggcactttgaagctggtgcccctatggggaaattaagatcaccccggctctggctcccttttcattggaggctccgtccatgtagaccttcctaatgggtaactcagggaatggatcttctagtaggttgttgaagctagtacagtctaccacaaagtttgcaagatcctgtccttttattgacacccgcagctagtaatgaatatcaaattggctaagttccatagcccactttaacaatttgcaagaggactctagcttttaaagcacctagcgtaggggatgatttgtaagtactcttaaggcatgggcttagaagtatggtctctgtttttgcgatgcagtcagtaaggaaaaggtcaatttctctatcataggttatttagattttgtacccagcagtcttttgctcacataatacaccagatactggactttgtcttcctctcgcataagtctggcgctaatagcatgatcggacactacaaagtacaaaaataaatttcctcctccacaagttttgataaaatgggagccttagttaaatgctcctttaacttctgaaaactggattaacactgctcaatccacacaaacttcttattgcctcgcaacacattgaaaaatggtatacaattgtcaatagattttgaaatgaattggctaagagcagctatgcacccagtgacactttagacatctttattctttttgggagaagacatgtcgaaaaaggccttcatcttttcaggattggcctcaattcctctagagctgacaatataccccaggaatttcctagaggaaaccccaagggtgcctttttagggattcaacttcatcccatactttcttattactgaaaaggcctcttcaaggtcctggccatgctattcaaaggttttggattttactagcatggcatccacatacacctccatgttcctccctaactgtcctttaaacatctgattcaccatccgttggtacgtggcacctacatttttgagatcgaacgaaatcaccttgtagtagtaaatacccttctcagtctggaaactagtatgttcctcatctgcggtatgcatcttgatctgattatacccagaataggcatccatgaggtgaacaacttgtacctagatgtgacatctaccgtttgatcgatctgtgggagcataaaacaatattttgggcaggccttgtttaggtctgtaaagtctatgcataatttccatatgcctttgggttttggtaccaatactggatttccaagccacaccgaatgcaatgattctttgagaaaattgttagtggtaaacttgtcgatttatatctttactactttgactctaacagggtctaaggtctccttttttgacaaactggggtctcatctttgcaaatattaaaagcatgaaaaattgtgtttcgatcaatcccagacatgtcaaaatggctccaagccagtatatcttgatatttattgactgtattgatgacatcctctcttatagtcaaaggtatattctttcccactctgatagttctagcgggatcttcttcactgataccca

SEQ ID NO: 220166 - DNA, 3262 bp, Cannabis indica
tgatatattggatttgccaattggaggagaaaatattcttccagctttgaggttaagttattattatcttcctttatacttaaagcgttgctttgtttattgttctatgtttcccaaaggttatgcatttacaaaggatgagttagtctcgttgtggatggtagataatttattggagtactcgagtacaagagaagaggtaggatgtgagtattttaatgatttagtgtcaagatcattttttcaacctttggatcataaaaaagatcattttgtgatgcatgatcttatggttgatttagctaatgttgtctctagaaaaaagtttattcacttagagataaacaagtcgtatgaaattgaattgataaagcgatcacgacacattgccatagatgggcataaagatttccatgagatattcaagtcagtttctaaaccaattcctttgcgtacatttctgcctattgtctcattgttatacgaagcgagcaaattgcagcaatttgtgttggaagatttgttgaagttgaagcgtttgagatttttatctctaaagggatatatacatgtcagtgaattgcctaagtcagtaggtgaattaaagcaccttcgctacgtggatgtctcgtacacttcaatcaaagagttgcccaaatctttttccaagctgttcaatttacagacattaaagttacttggctgcaaggatctcaccaagctccccaaaaatttccatcatctcattagtttgagatatcttgacatcaactgtcctagactttgtagtttgccaccacttgggcagttacctgctcttgaaactctttggattgaacactgtgatgcaatggggactgtaggtcttgagttttatgggacaacttctacaccatttccatcattggaaatcttggaattgagaggaatgtcaaagtggaaggaatggtcaatgccaaaagaaaatgttcaagctttcccaaagctaaaatcacttgtaataagcatgtgtcaaagcctcacaggagatttgccttacctcttaccgtctttaatagaacttgatatttttaaatgcccagagcttggttcttcgcttccaatgatgccgaatgtaagtacagtgaaaatcgacatgtgtgagaagcttgcaggattcaaatcatgctatggtcttcaaaattttgataaaaggtgtgttcctaccaacttgagaagcctatttatcagagattgtgacaatatagaatttttaccaccctacaaatatgaatccctccaacaactttcaattgaaaatttttccagctccttcgaattgcttcatatagattcctttcccaacatcaagaaggttgaaattgagaactgtgaaaatgtggagtctttctcacaatttcatagccctgtaacttctctatcaactctctctatctatggctgccccaacttcacattattacctgatagcaacctccattgtccaattctgactcaattggagctctcagattgcagcaaactaaggtttctccctgagaaactgtccactctcctcccttctctacaagaactagttatctatgattgtccagagttggagtctcttccgaggtttgggctgcctcttagtttgcgtgagctcaccgttaaacactgtgacaaggtgattcatctcgaaagaattggaatttgcaagcacttcccaatctgataagctttgattttggatggtataaaggtgaagatatggtgtcctttctagagcaaggattgctgcccacaagtcttaacttccttaaaattgacggtgttgcttgtcttgaaaccttagacgacaaagggtttcaagagctcacatccttgaaagaactgcacatctatggctcccccaacttgcaggaacttccagtaaaagggctgccgccctcttttgaaagttcattgccaccttcttttgaaagttttatcatatgtggttgctctttgttggaagcaaactatgaatggaaggaagaagagtactacaagaagatttgttgcatccctcagcagtcagcctcaagttcatattagatggaatggactctagcggtacgtctttgcacttttattgctttgaaatctgcattttttatttccattcgtatgttctttgattgatatttataatggtgacagaaatgcattagtaaatgataatatcaatgtcatggtcctttaaaattttttatgcaagttaatgtgcttcaattccaagatggatcttctcatgactttttgttggttattggatctttgacagtaattgcacaattgagatttgagcaataggttgatctgaacttgcttaatcttataatcatttgaagccatagttatatgttttagaatctagagttatattatagtccaaaacctgtttccttcatactgattttgtgaagtttggtttgactcttgctgaactatatcttgtttggtagtctaaggacaatgagaagattgggaaatgttggaaaaagctgaaacattttgaattctgattctttaactgaaatttgataccctgagcattatcttgtattaggcatattaataaacacaatattattatttatgagcatcataatatatatacagacattagtgagatgaaaatacttgtttcttttgtgattttttttcctttctaaaagggaagcaatctgttatttgggactcattatatgatatggtattgcttgcagagatgtacaagaacacaagttcaatttaaaagttgagcaatgaaacgacatgtcgtctacaatatcttctgcttggcaaattgcatcttgtccagtacttaagttgggcaagtttatacagaaactcataatcgtccgaacccaacattagcctaatgtgaaacgcctctagacgcaaacaggccatatcttaaggctcctcaaactttgtttctgtgatttttgttggagaacagaattaatagctaaagatgaagagtttgatatacactctgtattggtttttgagtaagtattgctttactctttggaccaagcagtacaagtttttgcttggcattgatttttagtatattactagtggctgttgcagtgttgcttgctttaattaagtcaagtttttgttttttcttctttttttttttcttttttaagaatgggaacatttttttggaatgtgcttttcttattctaaaaacatcttttttaaaagataattatgttaattaagt

SEQ ID NO: 220167 - DNA, 3042 bp, Cannabis indica
aatcaagatcaaggatttatttgaggtgcaaaatccaaagcgcagagcactttgaagttagtgcccttgtgggaagattaaaattaccctagctccgacccctttctcgttggacgcgccgtcaacatagatcgccaagtaagtaactcgggaactggctcttctagaaggacattgaagcttgtgattctaccacaaagtcagtgatgacctatgcttttatcgacacttgtggctagtagtggatgttgaactggctaagctccatagcccactttaataacttgccagatgactctagcttttgaagcaccaggcgtaggggatgattcatgagtactcttatggcgtgagcttcgaagtacggtctcagcttgcatgatgcaatcattaagcaaaagctcagcttctcaatcatgggatatctagactctgcgcccagcaatcttttgctcacataatacactggatactgactttatcttcttctcgcatgagtgtggcgctgatagcatgatctgacactgccaagtacaagaaaaaatcctccccctccacaggttttgataaaataggagccttagttagatactcttccagcttctaaaaattgtcctcacattcttcagtccacacaaactttttgttgcctcgcaacacattaaaaaatgggatacactttccaaaagattttgaaatgaaccgactaagagcagtaatgggccctgtcacactctggacatccttattcttcttaggagagggcatgtcgatgaaggccttcattttctttttgttagcctcgattccctagaaactgacaatatatcttaggaacttcccaaaagagaccctgaaagtgcattttttaggattcaacttcatctcatacttctttatcactgaataggccttttctaggtcacgaccatactcttcagaggttttgaacttcaccagcatgtcatccacatatactaccatgttcctttccactttgaacattcgattaaccatttgctgatatgttggtcctacatttttgagtttgaatggtattaccttgttgcaatagatgcctttgtcagtttgaaaactggtgtgctcctcatcggtggtgtgcattttgatctgattatacctagagtaggggatccataaaggtgagcaatttgtacaaaaatgtggcacctacactctaatcgatctgggagaaagggaaacaatctttcaagcagaccttgtttaggtccgtaaagtctatgcacatcctccatgtgccattgggctttgggaccaacatcggattttccacaaaaccaggtacaatgattcccgaaggaaatcattggtagtcaacttttcaacttttgcctttactgcatcggctcttacaggatccaaaggtcttcttttttaacaaactaggatcgcatcctcaaggatatttaaagcatgaaaaatagtgttctgatcaatcccggtcatgttggaatgactccaagccagtacgtcctgattttctctaactgtgttaataatattctctctaacgactagagggagactctttttcaccctaattgttcgggtgggatcatcctcgctgatactcacttcctctatatcttccagtagttctaaatttctttcaattctgactctaggatctaactcatcctcacagtcttcccaaacagcctctgtgtccatctgatcttccatttcgagttccacgtgcgcttccttcctaaccatgaatacaggtcatgtagacacattatagcaattccttgcgctccgctgatcacctttaatggtgttaatgcacccattgttgcatgggaacttcatagacaagtgtcaattggcagtcacgacactaaagtccactagagtcggtcaacctagtatggcattataggctgtgggacaatcacctaccatgagttgaatgtttgaacgtacttgcttttttatctcccttgaggttgattggcaatttaatttcacccatgggcatcagaacgtcaccgttgaaaccttgtaactggataggacatgggattaaatcttctttagtaagtctaatcgcttggaatgcgaactaaacaaaatgttaactgaactttcgttgtcgtccaattgtggaaacttggttgttggcgatttgtgcatcaattactaaagtattattgtgagggaaattcacattcttagcatcttcctcagtgaaggtaattaggaggttcatcatccttggacgttgtgcaggagactgtaccagcacacacatttctccctcctctacaccctttagatatctcttctatgtattatgggtacttccagcaaggtggggtccacctaaaattgttgtgacttgcctgtctacaagaggcggagcaattctagtaggatatagagttcctcatcctagagcaagcaaagccaccccagctagagctggtagagtaggaagagcaagtaatgatgtttcaggaacttgagggcgcccaaccccctcctggggaatttacggcaccctattgtctgtgaagcatcatgtgccccaaaactactctctatttgggatgaataattagaatgcagacccactacctcagatgccctacttgaaccaacatttcaatctcatctttcaaatattcatattaatttgttgtgtggcccttctctccatggtattcgtgttgtttgttttggtcttgcctgttcctcctgccatttgacaagcatgggggcttccaataatggaccatgttacacgtcaccttgtaaacattctcccaagtatctatcagacttgtgtactcggtgtactttggatcgtactcctttctttgtttcttcactaaatcattacgactgtgattcttacttcccctgttaccccacaaatgtcttgcactagaatttggcatctcaaacttggattttctgggagcaaggttgcacccagtctgtgtcgccccgtacctggaaaaatgggtttgtgtaggaacaaggccggatgcagta

SEQ ID NO: 220168 - DNA, 2070 bp, Cannabis indica
aaacttatatttagataaaacacaggatgtcaaatatctagacacccgataaaaaaaataaataatataataaaaaaaaaaaacttgtaaatatcgtgagtgttccatgtacgcgtcgacgtacccagatcacacttatgaaatggtccaacttccaacacgggagaggtccttacacactaaactctcccacatgtataactctcataaaactagaataatgaatatagacggaaacgattttataaactttgagggaatgtatttctcaatacattaaattgatctcagagtacattattagatagatctcagagtacgttaccatttttaaccttaattacctctaaattaatttcagcccttagatcaaataactccttctatctaatggctgccgtacatcacgaaatacattccataaaagtacatcacaagacaaaatggtatctctctatatatatatatatattaaacatttcttttctattagaacaacaataaggtttattctaaaaatatgtaattttcttacagcaaaaatattatataatatattgggagcttttatgacacactttaaaaaaaaaaaatgtactaatacatcttcactattttggtatttaaaactatatttttatttatttttttaattgtatacgttgtaattattaaaaatatttaaaaaatttaaaatatttaatacatgtataaaatatagtaagcaagtgtgcaacaaattttttaaaccttatattctttgaattaaattttttaaaattttacaaatattttaaataaatacaacatatatcacaaaacaaatatagataaaattttagagaaaattacgctctataccctttttatattgttctcttttatttttaccttcttttttaaagtctatcatttttactttttctttaaacattgtaccaattttgtccctctcactttaagatactcactatgtgactctcttatgtcagagtattttgaatacaatacatataaaaagatgtatgttgtatgtttcaattaaatataaatttagagataataagtttgattaattgattaataaaagtggtatttttcaatttacctcaaaattttactcaaatgcaaaaacaaatatgggtatatgggtgcatagaatttcctatattaatattttgatgtgtgtggaaaaatttacgtccacataattaaccttatcctttttacacacgccctttctccacttataaatatccaaagatctggagccgttggatcctgcgaaagtttaaaggttttctcttaagccctctactagttcattagagtagttttcattattttttcaagcgttcttacgtttatagttcattaatcttgacactttttcttattagatacaaaatgctttttatatatagttttgtacttttgtttttgtaggtggtataggtatatagtgtgtagttcatagatctcccatattccttaaaatggacgatgttggtagaaggcagtactccataatattggtcacatattttctctttgtaaacactttgagcaatgtcaatggtgggatcacaagcacctttgtacgctcagagtttccagccactgatatccctcttgaccatgaagtctttgcagttccacctggttacaatgcaccacaacaagtaataataactaataactatatttaattatgtatacataggaagattataagtttagttagaagaatcacttttgtcctgtccttgctgtaagaatgttattattatcataacacagcgtgtactgtatagttatataagcctagttctaggactgtaaaatattaattaagtccattattgatgactataaatgatgattattattaatgtaggttcacatcactcaaggtgattatgatggtaaagctgtaataatctcatggattacaccagatgaaccaggatccagtgaagtgcagtatggaaaatctaacaaaaattatgagtttacagcactaggaactgctcccacaaaatacactttctaccaatataagtcaggcta

SEQ ID NO: 220169 - DNA, 1634 bp, Cannabis indica
ttttttttgaataaaaaatttcataggaatacaaaagagtatgaagctctattggagcagtatgtactagaaagctacaatctaaaaaaaaccaagagcttctagcaacatagtagagataagaattgaacattacataaaagagataaaaatactcagtttttaactaaaagccgaaatatgtgaacattactacggatagtttgaacaagactatcaattttaatgaccagttgctaattagaagacaatgctcaaaaaagagattcattcacacccataactttgaccattttggcagtatactgcccactgtagcataaacttttagcctcagttaaagactcagtatcatctcttgcaacaattctaaaaccaaatttcttcttcgaatcaaatattgttgcacttatatttaccttgattgtgtttgaaacaagtgaagcccgaaactcaatactatcatcatttgatcctattaaggttgatgataaagacaatttacactaggttcagtgccggccttgaaataaagtaggtcataggaaaaaaaaatttgggcccttatgttaaaaaaaaatataatatttttcaaaatcagtaaaaacaaattatataattttaaaagaggaaaaaaaaaatttggactctggacttggtgggccctagacacaggcctagcctgcctatacccatggccgggcctgactgggctttaaataacatcataaattgagggagatattttatattattccaaactagtttatttctagatttccaaagagcccaacataacatagtgaccgtgcaaatctcatcttcgtctgaattgttaaaaaaagaattcagccaagtccaactttatttgagcaagcacaagcaaagggacaagaaactagcacataaaaagtcgattaaatatcacttttacacacaggacatatagaagacacttcgatactctttctatgtagttgagtggttgttggaagacaaccaaaagcgggttcttaactttgggaggtattttgagatgccagagtttgtgccagaaaccagaattattactcttgaatcaccttgcttttgtaacaatgtgtaagcactttttatagaaaagccatcagaatgttcaccaacccagaccaataatcgcaagaagcagaggagcacaaatgaacagaaataagatcaacatcgtgcaaattaaacaggtcatgcacaagatcaacatcccaacaattagagctaggatgaaacagagattggatattttgattgaccaagcctgaatgagaagatgagacatgacgattagtattattagggagccatggatgctctaaaatactaaccttacaaccggtaccaacaattcttctaacacccacctgaacaagactttgagcactccatatacttctccaaataaaactgggattctcttccaactcagcagtgagaaggtcacctcttgaaaaataacgagctttgtagaactttccaacaagggaatgaagattagttaagaacctccatccttgttttgctaaaatagcaagattggatattttgattgaccaagcctgaatgagaagatgagacataacgattagtattattagggagcc

SEQ ID NO: 220170 - DNA, 1448 bp, Cannabis indica
agtaggttgattgtaaaattgcctttttttggacctttacttggtataggatagttgtgattgctatgacctgtggatttattgaaaaaaaataatgtgttagaaactggttttggaacattataaagaaacatgttttctaattattgatctttttttattttagttttattacctagcatttcattgccttaaccaaattttctctaagtagtgcttcagcttctgatgatacttaaatattctatatgcttcactgccttttttccacacccatttttgcataaggcttctaaatcactcattattgtaataggtaatgatcttccagctaggatcactgaatttattgattctactatgtttgaagtcatcatagtgtaccttcttgtagggcagtggctcctggtccaaacctcatgtctaattttctctaggtatggtcttatacttttgtcaattttatctatttctgtcatgtaatgctcaaatgaggtcaacttgtatgtctttgctgcttttacgaagtttattgtcagatcatctccatgcactccaaagtttgttttgatgttgtttagtaggtggaatatgcatgctccgtggaagcggtttgggtagacattgttcactgccttttcaatacttttatgcctctctgatatgaatgtcaaccttgctcctggaaacccgttttaatgagatcagtaggtaagtgtatgataaataattatttttcaaagcatcatcatttatttttatttagtggaaaccagtttctaatttttttctttatttgttattagataacacctatttcctatcattgatgtttgtaattgtaacaaaatgcatgcaatttattacatgttttatatataaagttaaaattttagcttgaatttagatcaaacgaaattagtttttttaatagtgtacctttcctatctccgtatgtttcctttagttttgtgaagaatcattcccaagagcagtcattttcagagtctcttatctcaaatgctagaatgaatatgtagttgtttgcatccatggtagaagcagtgaatagagttcctccaaatgatgtttttaaaaacattacatcaattacaatgattggcttgcaatgtttccaaccttttattgagtttgaaaatgctggatacaaatatttgaaatgatccttcttatctgtttctaattgtgcaattgttccaagatttgctacttttagcatgtgtaggtattttggtaattgctgataagattcatcttgccttcctcttgctaactccaaagctttttctcttgctctccaggctttatgatatcccattgaaactccaaaatcatcaaccatgtctatcataatgtcatttggtttatgatctctcttgattggcataaatttctttttttatcatttctgcaatcatgttgcagtt

SEQ ID NO: 220171 - DNA, 1652 bp, Cannabis indica
agtgaaaaaaaggttttccataattaatactcagcataatataactagaaaatcagatttataaactctaaataaaatccacaaaagacaaggcacatatggcaaaatgacctttttgccctcacacaataaaatgacctaaaaggagtacaaagggtattttgagaaactctaaattcccgaccaattccgacattcccaatggctaactaaaccgtcccactaaactaaaatactaaactgttattctactgagccatacaccacgttccatgttgtcgggcactgaaaatataaaattatgaaatttcactatatgacataaaaatacattatgaattcaaataaatcaacataaataattatttaaatatcaataaataattttcataattaaaccctaattatctgctaattttcaaatttaaactaagcggtctttacatatgttgccaacccgcctaacgcaccagctgcgactactagagtggttatcccgagaaacatagctgctgttgcaactacacctgcaacgactcagaacaacgctatactgccagggggtgttgatcagagcattttactacaagagctaaagataatcgagcagcagagaaagcccttttgcaagcttcacgggacttctccttttaccacggaagtgcgacaagctcgattgcctaaaggatttagactatccgagtcgttgaaatataaaggtaccactaatcccgtagactatttagaaaattttaatacaattatggaggtagaccaggcacctcagctggcaaaatgtcgtatccttgcggcaaccttggaggataatgctcacgattggtttatccagttgtcaaaagcatccatatcgacttgggaaaccttcttggacctcttcttatcacatttccaaatcacgatgacgtatagaccaccttacacaaccctagcgaacatcaaacaagaggtcgatgagtcattgcaggattattttaagcgtttcaatgtcgaagtaactaaagttgagaaggcccccgagtctttgttagtttgtatgttgattacaggggtctttccgagaaccaatttgtggaaggagttgtaggcttgaagacccaaatcactggtcgaattcttcgctatggctgagccgcataagaggatcgaaaattctctggctgagttagagaagagaaggataaacatgagtcaactgtatcgcgatcacgatctcgtagtcccagaggaaagaattccagagcaagaagccctagaagacgcagccccaaaaagcagcgaagtcaaaagttggctaagtcccctccaaagaaagaaacgtccccaaaaaggaaaggaggatcgcggttcatcaactatatagaattggcggtcccatgtgaccatatctacgcgattgaagaaaagaacagagttttcaagaaacctcccccaatcaggggtaatcgcgacaaaagggacccaaataatttctgtaagtatcacaaggatattggccacaccactctagaatgctggttccttcaagacgagatcgaggaactaattagacgaggaaaatttggcaagtataaaaatcatgagggtccccaagcggatgacaatgaagaaacaaacaatgcgagtggttcgag

SEQ ID NO: 220172 - DNA, 2847 bp, Cannabis indica
tgtttaccaagacagcagacattgcaaaaatcaacatgagttttattatctatagagatgttacaagatttcaaagcctgttttacaactcttacagtagggtggccaagcctactgtgccataaagaaaatttagaatctacactagacacatgattggtaaaacatgagtgagtaggttctttagtggaaatggcagtaggaggtagatgagagagttgtgtagatgagaatttgtatagcccattctcaagcttcccaaccaacaagatcttcttggaatcctgttctttgacataacagatagtcgggtgaaattcaaagaaaacagaattgtcattagcaaattgagaaacactaagaagatttttggtaattgagggaacatgaagaagattagtaagagataaggctctggatgtaaaaggagagataagttttgagttaccaatgctgtcaatgcctaggccagtaccatttcccacaaagacttgctcttgcccattatagttgctgctagatgcaatattggctgcatcgggtgtgaggtgatgagatgcaccagaatcaggataccaactatcatcttggacagtttcagaagtagcaaaataggcttgactttctgcaatgttagctgtagcaggaaactgaccaaaacactcaggaccagtgaaagatttgtcaaacttgtaaaagcattgtttgactgtgtgccccaatttgtgacatagctggcactgaggtttttgtgtccaagattgtgaagcaccacggccagaattaaagttacctctgccactgtaaggagcttgaccacgaccatagttatttctgggcatagattgcatttgatgaggtgattcattaggtctgtagggtgtgccacgattgaaaccagatcccatctgtgagttggaatgaaagtttctattgccaaagttcccttgagttggctttgtgtgagctaagttggcttcactcttgttgatatccagggctttggtgttcttctctatacgaaccgattgtgccatcagtagagcttctatttctgcaactgagtaggagtcctttcttgttgttacagatgtaacaaatacatcatattcaggaggtaagccattaaaaatggcttcaatgtgatcttgggaagattgtttgtgcccaatggtggcaagaagatcaattatgcctttgatctttaacaggtaatcatttaaagaaccggtcatcttggtattcctgagttgagtcttgtaaagaccaatatttgcagaattcagggcagtgtaatactcactcagggcttcccagatttgcgcagtggtttcacaaccgatcatacgattggttctcttctccgacatagaagagagtaaccaagaaaccaatagattgtcttgttgctcccagccgtcgtaggcagagttgacattgttgttgatttcatcatcagaactgagaaatttggggggagttcttgttgcatccaggtacatttgcaaacgacttcctttaattgatgtgaggacttgatgtttccacggtaagtaattgtgttcgtcgagtttgattgacagagaatgtgaaaacgagacagggttggatcgagggaggtagtcatggttcaatcttgatgctcctccattaccggttgctgaagcttccattgttgaacgattcatagctctgataccatgttatgtttcatagagagagagagagaaagagagaacgattgtaagaattgaagtctgttattattgttgagtgttgtacagagagaatatatacatgagtcataagctatacactagtcataacagaaaataacaacctcaactaacaaactgtacaaactaactgtcatttcccttaacaatatgtttcaaaaaatatataaagcgccatacgtagtaccaatatattattaattattgaaacatataattttataaattataattttacaaaatataattttatattatgaatcgtaaaaatatagttatatattatattcagtactactacataaattatttttaaaggcggtttttaagggctttcagcgttaattttggtgaaattcactaccgacactgatcaaggcaacgttgtagagtttaatttaatcgacgccatatatactcctatggcgtcagttattagctaggaaccgacaccatatgggtatatatggcgtcagttcctagctaataaccgacgctatatatggcgtaagaactgacaccacatatacccgaatttctattttttaattttatttaatttatttaaattatatattaattaatttatatattattttatttaatttaaatttaaattaaatatttatttttttaaaggtaaattaaatattatttaaattaattttagaattggccaaaatacctaatttcatttcatagaagtaactaaatattacacaaatattgtaaaattagtccaagtattaacaagttaataaatctaactacaagttaacctaaaaaaataatatggaagaaaaattcttgggcctttcagcatcaatcgtcattgtgaatcaccgccatcaaccgttctatccactgtcgatgtattggtaacaattcagtttttgaattgtattatcgcttatctccaaactgttaaaaaagtaaaaatttatattagtttatatatgttgtttgttattataataaataccataatcaataattaaaatttgcagctttttgatcttgtatgtaacggttggggtttgcatgtgcgacgatgtcagtcatgtatttcaaaacataaaaaccatatttttagtttttaggttatcttgga

SEQ ID NO: 220173 - DNA, 2585 bp, Cannabis indica
tccatggacttatgataggatacgattggtcatagaacggttacccatgggtggggaccccaaagctttggtgttaaacactcttgatatctgggttcaaattcatgatattaaatccgggtgtatgacagagtcgactgtccaaggagtaggcaatacaataggaaaattcttagaatttgatcctaagaattttattggagtttggagggattatcttcgtaggagaattactcttgatataaggaaacctttaaggaggaggttgaagttgacgaaggaggatggcagttggttctgggtcactttcaaatatgaaagaacgcccacgttttgctttatttgtggtataattgggcataaagaaaagttttgcagtaggctttttcatcaatcgcccgatcaagttgtgaaaccttatggtgaatttatgagagctcaaccagtgcgtaatcataagaatattagagctaggtggctccgcactagaggttggatcccagcagtggcggccgacgtcagttcacttggtatgggagaaccaatgtacccgaatatgaaaagttctactggagttgattttgtcgataataatgataggtatgatttgttcaatcatagaaaagataccatgagtaatgttggcaatcagggtattaatgggcacaacaataatacaataagaaatgttgaaggtaatcagtgcaagaatctgggaaaggagatttgtggtcaaggtgacaacttggctatttatgataataaaaaaagaaagtgggagaagagagcagcagtggtcacgtggatatggaccaagggattagtggacttccataaaacttaactttcgcgggccttgacaatggggctcgccaacaattatgaaaatgttgagttggatctgttgtgggcttggaccgacacggaatgttcagttcctcaaagagcttgttgctcataaaaaaaagcccagtgtaatattcttgtgtgaaactttaagtaataaggtgaaaattaattcaatatgtagaagtttaaaatttgaggggtcttttgttgttgaggcccaaggacatagtgggggtattgcattgctttggaagaattaagatgaagtaactatcgattctttctcaaagaatcatattgacagtttgatatcttttgagggacaagatcattttcatttcactgccatttatggagaacctaatcgaagcttacgaaagcaaacatggactcttcttagtatccttcatgatccttggcttgttgatgatgtgcacccttttgttgaatcccaacactcggggcttgttggtaaaatggtgcaatcgctgatgaagacatatgtgttggattgggatgatgaggttattttatatgtgcttactgcaagggattaggaattagtttggaaaattccacttgctactgatttggaaggtgatgattggtattggaggaaggattcgactggtttgtttactgtaagaaatgcctattctttgttgcaataagcgaataccagcgatgctcaaccagataattctagtttttggatgaaattgtggcaactaaagcttcctccaaaggtcaaagattttttatagagagtgtgcaccaacaatcttcctactagatttcaattgtcaaccaagcatgtgcctataaattcttcatgtccattgtgtatggctgcaccagaaactgctctccatatcttggtttggtgtgattttgctcaacaatgttggagacaaactcaggcacctgctgtgggtgctgctgttatgtctttttgcaactggtgggaagaaggcttgaagacttgggacatgacagaaagtttggaagtggccatggttttatggtcaatgtggaaggtcagaaatgatatggtttggaatgctaaacaacttgcatcagatgaagtgctgctattagcaaaacttaactttgttgactggtataatgctcaaaaacaagacctaggtactcctaatgaacccaattgggttcaggttgagcattggacctctctagattttcctttaaccaaaattaatgttgatggagcactttttacttacgagaagtgctttggtattggtttggttgctcggtctatagctggtatggttattcaagccaagactttgaaaaaggttggtgcatttcagcctcatgaggttgaagccattggagtaaaaaaggttttgagttggatcaaagacaatgaatggacgagcgtgattgtagagtcggattgtctaagagttatttcggatttacaaaataataaaattatggcttctccttaaggctatattatttcagattgtaaggctttgtttgccgatgtgataatatttcttttcattttgtcaaacaatctgctaataaggttgcgcatgcgttggcgcgatcgtctcttatggaggctaatcgtatctttagtagtgtttctttacctactgtaattgcttcttttgttttgaaagatttgaattaatgaagtttcattattattaaaaaaaaaatataaaataatattagttgttattttataatattaaataaaa

SEQ ID NO: 220174 - DNA, 4867 bp, Cannabis indica
atattcctctatggccgagcactccctttgtgtagctccaccaaaatccagctggtctttcatagctactagctttttccaataccaactagcatggatagaggctgtgtagctccaccaatcttggtctttaagatatacactatgaatccatctttgccagaggctttcccgcttgtttgagatggcccaaatgtacttacaaatggccgctttattccactcttctatctttgtaattcccaatcctcctgctttcttaggctgacagaggctttcccagaccacagccccacgataatgaaacattgcttgacctttccacaaaacggccctacaaatagcttctatagctctgataactttttttggcaataccatcatctgactccaatatgcctgaatcgctattagaactgagttaattagagtaatctgacctgcaaaggagagatttcttgtactccaactcttaattctagcagtcatttttttcagccaatagctcacaatccttgcataaaatcttcctaggacaaataggtatccccagataagtaaatggaaaatcctgtctagagaaacccgatgctttaatcaacttcttcacacttccctcctccatattactacaataaattgcagttttgctggcattcgggtgaagaccagaagtgagggaaaatagtttgagggcctgaagcatatatgtgatgctctgtgtatatccatgacaaaacaaaagtacatcatctggaaaagccaaatgattctattgaagtgaagagcacctgtcatgaaatagaaactccttcttctctcctatcttcttcataagcctagacaagtattccattcccaagacaaatagtagaggagacatgggatccccttgcctaagtcctcttctagcttcaaagaatccatgtaaggacccattgaacataatagagaacctaggagttgtgatacagttcattattagttgaatgaactttttaggaaagtttaagccttctagcatttcttccaaaaatccccattcaatagtgtcatatgccttttgaaggtcgagcttgatcatacaactcggtttatttgctttcctattataatgtctcaccaaatcctggcaaatcatgatattatgccctataaatcttcccttaataaatcctccttgagaaggagaaattatttcaggaagaatgtctcggattctagcactcaaaagctttgttgcaatcttataaataacatttcaacaagcaattggcctaaaatccttagcagtattaggacatttaattgttggaaccaaggtaataatagttgagttgatgtatttgagaatattacctgaatccaaaaaggagattgctgcttcacttatgtcatctcaaatagtctcccaattgtcttggaaaaaactactagagaatgcgtcaggacctggagctttgccactcgaaatactaaaagctgttgccttcacttcatctttagagaaaccccgaattagcaattttgattgctcaacagataccgctgctcctttagaaattacactgatctaaactttctttctattcatcattttagtcccaagcaggtcattgtagaacttgaggaatgcaacagttatgagctctagttcatgaacccggttcccatcttgtgcttctattgagagaatgtggttttgtcttaatctatgcttaatacaagcatggagcaaagcagtgttgttgtcaccattctcaatccacgccaatttagccttctgttgcagaaaaagaagagtactctttctgcaccttaattaagacttctcgagcctccttttctttgctatgaatttccccattcaaaggttgttgttgtagtgagtcttgccatttatccagatcagtttttgctttaatcggtgcactatgaagtttagagaagccctccttattaatctcctttagcttcactttaaactgcttcattttggacaccacttgatacatctttcagcctcttatcgaagtccttcagatttccgtgaaagctaattcatactttggatgtaacttccacattcaaaagtatttgaatggtttctttccactcaccaaaccaggatggagtgttaaaataccaggagaatggtcaaagataccttcattaaggaatacagcttctgcgtactcatatctatttatccaagcttgattggcaagaatcctatcaatcttggaatagattctatcctctccaggctatttattcgtccatgtaaaaaaattcccactagacttgacatcctctaacccacaagagttgacacactgaaaaagtcagaatcgggataggatttgactcttaaaccaattctttcttccttagccaatatgtcattaaagtctcccatgagtaaccagttctctaaagtattaagctccctcaagtccttccataaagttctcctttccgatcgattattagcagcgtaaatcatagttaagaaactattaaaaccatcaatagttgacatttttaaatgcattagttgactagtacatttaataatatcaaccatgaatctcaaaggattccaagctattacaattttcccacccaaatgccatgctatattggaagaaaagcactaaccttgaaacacatttgagtataagacttcaagctttggagccttaactctcgtctcgagaagaccaacaaaatcaaccttttgggcattaataaattgcttaatcagctgttgtttatgttgattattggctcctcggatgttccaacataataatttatccatttgaaagagagggtactccccctctcttgttttaatctctatttcagcaccattaccctctgtatcaagatttttctctattatctgttctgtcaagctcccttcagtatcctccaagatctgaaaagaattactaacaatagtccccttctttccatcagcttgtgttccttcattctgccctattttgttcttattcctagtcaccttcacaaaaccttcttcatctgtctcaactttcttcctattgtcctgtttcacaacccattgtggcttcccattagagtgctttctgcattcagccgctgtacgtccaagcccagaacaatgggaacaaccaactggtttccattcatacttcagattcactttggtagatgaaccaaactcattctcaaatttcagaaattctggaaaattctgatccataattacctcaatcatgacccttgcatagctcaatcgttctctctccctagtaaccgagtcaagcataaccaatttcccaatctgacttacaattttggacagagtaccttgtccccaatatttcattttcaattcctcgaattgaatctatattggcacacacttaacattctctttcttgaaattttcatggggatcccaaggcttcattatcataggccttctattaaagaaaatataccctccgttcaagatctgatctctgaattctagagagctgaaccgaatgataaagactccatatgccagtaatttcaccttatcaattttgtctttccatattctattgacaaaaccttcaagaacatgtaattgagggttagccctcaaaacatagcatacaattgaaggtgtccagaaggagacttcctcctcaatatcttcaaatgtgattctaacttcactactgctatcaccagaactcctaaaagaattttcaagattcctcataacagtaccacaacgcagagttgggggaatcgggtttttaccttgagcaagatcactgttacattgatcgttggctcaaaggaagtgcacaaagtctttccgtacatccccttgcttctgaattgcctccagtgacgatttaggggataatggcaattggaatacatcgtgtagtgcagggtcatccaccatcacttcctcttcatccgacatctccaacggagctatttcagcaacctcttcttccctagcgagtcgaacaacatcagatccacttttcactcccttcttcctgtttgccttagtaaccgatttagctttcccttgagattttgatcttgttttagccatggtaccagcttctcagctgcaagagcaagaaccacgagagagagcttctcagcttctcaacttctcacattttaaaactattgagttgtcatgtaatataataagctactatttttgtatacaaatttttttatatatgttttattattttgaaaactaactagttattgtataatataatataattcaattaacaaaattataaaatgaatattaactaagattaaaaaaattgtaaaacattaattaatcactatattaaaaataaattattgttttggaagttgtgaaaaagtatgtgcttctcatatcttgaaatgttcagactaaaaagtaaattccaatagtaatatttttaggggccaatcgagtaacaacgtggcctgtaattatttttaaaaacaaaaaaaaagaaaaaaaacacaaaagagataatagaataatgaaagaaaaaaaaaagtgtgagggagtattaaaaaatggtcaactggtattttattttgcgataggggtattagaaagagttaggcagtattgacaaaaactaacatatcatttttgataattagatccactttttgtagtttatgtataaattcttagatattaaccattatgataataattactaaaataatttagttataaatattaattttgaaaacatcaaactattagattttaatccaacaataaataacaataaaagaaaaattaggaatttttatatttaagttagctacttaattaaaa

SEQ ID NO: 220175 - DNA, 1698 bp, Cannabis indica
tcctttattatggtttggtttgggtaatgactactcctactactactaagaatcaatgaatatataatgtgagtgagtcaatatcaccaaaacagaaaaaagaagaatgcaaacacaataaaagagaaaaagcaaatgcacacatcatcaccatcattacaatcatcacttacttactaccaccccacataccaaacctaaattacaaacaattctctctttctttctctctctctctctccaacttttattcaactcttcttcttccccaccttttccctcctttttgcaattgcaccctcacttgcttgaaccctcatacaccccacccccatccatgtctcctcctttctctttcaaaagggtcttcttattcaacaagatttctatatttaagtacaagagaagagctataaatacctcttcttttctcccacaaactccattgatgactactttcttctctcccttgtaatataacctttctctttctctgttctctttttataccaaagaagaagaagaagaagaaaaaacaattcttgatttcaaaagaagaagagctaaacaatgggcaagagagaaggaagaagaacaagacttcattattgtcatgtagtgattttcctattgggtcctttcctttgttcaggtgacttgctttgtcttgttttgtactttggtttcaattttataattttttattatcattattgttataaaaaattaattttgtgttttgggttgtgtttggttgtttttccccttactctattccaataaagatttgatttttatttttttttgttcaaaaaaataaagatttgatttttatatcaagtttagttttttattttgttcaatcttcagttaagtcccaacttctttttcttgctttctctttattttcctttgcatcttttctctctttttgactgttgaaattgatgctccaatcctttattatttaacttgttgatagcttcttaagattcttccaacagcttcttatattttaatttttcttcatttttatttatttctatatctaaagtatgcaaatttcaagggtgggttcttactgttttgggtatataatttctctgctgaatctgataccaatgagcatagttctcttaaaaaagactattcaatctataagaataggaatcttctttaaagcttttatttttatttttttcaaacttgcaataattgctgaaaaaaaattctattttcaaacctttctttaaagctttttcattgaaccagtttgttcatgtagataaataaggacatcttgaattagtactcttattttttttttttacctcgaagatacccaaattgaacactccccaataaacttttttttcaagatattttatgtatatttttctcaaatttccaaaaagaaaacttttccacctactatttggtatttgtcatacttcacatggattaaacttaggtcacctaactatccaaaatggtaaaaaaaaaaaaaaaaaagaaacccaatttagtgtgtggtgacctttagcaagaaaaacaaaaacatttgtttgttaagtgttgattttaactaatgtgaatagaactatatagatgtatgacatttccagtctcttataaaagaacaaaatactatttgtatttgtttatgctacagcataaagacaagttcaatcagaaccc

SEQ ID NO: 220176 - DNA, 2962 bp, Cannabis indica
atcagggatctggtattaacatcgctgaatttaggattttctcggctggagtattgggaggtcataatgttcagggtacctctggtggtaatggtggtgatttggagagattgaagggggcacttaatgttccttctatttatagtgattctttccagctggcggattcgaagaaaagaaagacagctctattagagggtcctcttgggccttttgggtcaatttcaaaagaatctatttctattgggcctagtgaaatagagaataatgttgttgtcaataatgaaaggaatcaatctaatgtgttgagtacgggtgacgtggccttgggttcaaaaggtgatggtaactcaaaaaacttgtttggggcgggttctggttcacagacccgccagtcattatgaatgctctaagctggaatggctgggggtttgggaaccaacgggcttttcagttcctaaaagagattgtgtctcataagaaacccgactatgtttttctatgtgagacaaagtgtaacaagagtagagtggagtgggtaggtaaccaattggtctttgaaggtatttttgtggtgcaggcctagggttttagtgggggcttggccctgttgtggaaaaataaggatgaagaatttttgttggggttctcttcgaaccatattgatcttagcattaccattgatggcatctcttcttggaggctcacggggctatacggggaacctaacaggggcagaagacaacatacatgggcgctttttagagagcttgcaagaaggtatgactctccttggtgtataataggtgatgttaacaatgttatgtcccaacaagataagaagggcggtagaccatatcctaggtggctgttggaaggctttcaatcttgtgtttctgattgcggtttggtcaacttggaccttgttggttaccagtacacctgggagaagtgtagaggaacaagctcctgggttgaagctcgattagaccgtgcactcgtttccaattcttggcttcaacttttcccaggtgcgattctttctaaccttgagtattcatattcagaccattctcccatttatcttgagcccatcatacgaagtaatcatatcccataccatctatttcggttcgaaaatgcatggcttaaggaaccaatgtgtattcaaattgttaaagatagttgggaagctcacggtgaggaatcgattatggggaagattaacttgtgtgctactaatctctctcggtggggaaaagatttaactgggaattttaaaagaagaattcaacagtgcaagaatgagttgagtgttttgaaaaataaaagagatgcccaatcggttagtaggtatgaagaagttaaagtgcttttggccaatgttcttgatcagagggaaactttttgaagacaaaggtcgaaacaactttggctcaaagatggtgatcgcaatagtaagtatttccaccttatggctagtaagaggaagaggcacaacatgatttgtaaacttaaaaatgaacaaggagtgtatacggattgggaccatggtcttgctgaggttattgtgaactattttaacaatcttttttctgcttcatcagtgtcttttactgaagtgattggctgtgtaaataggatggtttcggatagttctaatgaggattttctacagccgattgttgaagaagaagttcgtaaagctattttcaaaatgcatcctaataagagcctaggtccggatggcatgactccggctttttaccaaagatgctggccgattatcaaaaaagatgttaccctctttgttcaaaagtttttatcactggggaatttgaaatgggttgtggtgatgctaatgttgttttgattcccaagaataagaaacctgcctctatgaaggatttgcgcccaatttccttgtgtaatttactctacaaggtgataactaaagtcatggctaatcacatgaaaccgctgatggatggtatcatttctgcttcccaaagtgcatttattcctggaagattaatctcagacaatgtgatggtctcttttgaagtgcttcactatttgaaaaggaaaagagcgaggaaaacgggttttatggctttgaagctagatatgagcaaggcgtatgatcgcattgaatggcaatttcttgaagccattttacaaaagattggtttctcttctccctggttgaatcttgtaatgaagtgcgtatcttcggctaaatacacaattgttgatggtcctcatgagataggtctgttgttaccttctagaggaatttgtcaaggcgatccgcttttgccttacttatttattctttgtgctgaaggtttatccgctcttcttcagaaatatgagcatagtggttggattcatgggtgtaaggtggctaatggggcgcctcgtgtttctcacatgcttttcgcggatgacaactatttgtattgtaaggctacggttacagaggctgtccatattcagaatattcttcacagttttgaattagcatctggtcaacaagttaatctggcgaaatccttgatcttcttcagtactaatacggactccatgatggaacaacaactctgtacccttcttcaaatgcaggaggcggctgaaggtagtttttatttggggcttccaagtactatgagtcggaccaagtttgttgtgttgggatatctcaaagatagagttcataagagacttcaaagctgggaaggcaaattcctatgaagagctgggaaggaagtcttaatcaaatcggttgtccaagctttgccaagttatgcgatgagtgtttttcttctacccttggatattagtaatgatattaagcgtgccatgaccaaagtttggtggcgttcctcaaagagtgatggtaaaggcattcattggatgtcttgggacaaactttgcaagcataaaaagggaggaggcatgg

SEQ ID NO: 220177 - DNA, 6590 bp, Cannabis indica
cagcatttcaggctcctacttgcatcagcagatcccgaggtcctcattgcaacacttgaaacactttctgcactagtaaaggttaatccttctaaacttcatggaagtgggaagctggtttgttgtggttcagtgaatagctatctcctgtctttggcacaaggatggggaagcaaggaagagggtttgggcttatattcatgcattatggcaaatgaagctacccaagatgatgggttgcatttgtttccagcagaggtgcaagttgatagtgacaagtcccaatgccgcgtgggatctaccctttattttgaattacatggaaacccccaaagtactaaagagagcagtactaatattagctcttctaattcaaaagttatacaaatacctgatctacatttgcgaaaggaagatgatttagaactgctgaaacaatttattgaagagttcaaggtaccttctgagctccggttctcactgttgactcgaatcagatatgctcgtgccttccgttctcccagaatatgcaggttgtatagcaggatttgccttcttgcatttactgtgcttgttcagtctagcgatgctcatgaggaacttttgtccttttttgcaaacgagccagaatatactaatgaattaatcaggattgtacgctccgaggaaactgtttctggaagcattagaacacttgctatgtttgctttaggagctcagttagctgcatattcagcgtcacatgagcgggcacggattttgagtggatctagtgtcagttttgctggtggtaaccgtatgatactactgaatgtgcttcagaaggctgttctgtctcttaaaatctccaatgatccttcttctcttgcttttgttgaatcgcttcttcagttctatttgctgcatgtggtttcatcctcaactacaggaagtaatgtaagggggtcaggcatggttcccacattcttaccacttctagaggattctgatcctacacatttgcaccttgtctgctttgctgtgaaaactctacaaaagcttatggactacagcagttcagctgtttctctttttaaggagctgggaggagtcgaacttttggctcaaagactgcagatagaggtgcatagagtcattggttctgatatggttaatgataatacaatgatgattggtgaaagctcaagatgcagtgatgatcatgtatactcacagaaaagactcattaaagtttcattgaaggcacttggctctgccacatatgctcctgggaactcgtctagatctcaatattctcaggatagttctttacctgctaccttgtctctgatatatggaaatgtagataagtttggtggtgatatttatcactctgctgtaacagttatgagtgaaataatacacaaagatccaacttctttttcttctctgcatgaaatgggtcttcctgatgcatttatttcctcaatagcagctggaattctcccttcttcaaaggctcttacttgcgttcctaatggtcttggtgccatttgtctcaatgccaaaggcttggaggccgtgaaagaaagtacagcattacgtttccttgttgacattttcactagcaagaagttcattgtagctatgaatgaagcaattgttcctttagcgaatgctgtggaagaactcttacgccatgtatcttcactaagaagcacgggtgttgatattattattgaaattgttgaaaaaattgcttcatttgcggacaacgatattatggggtcatctgtaaaagttattggaagtactgcaatggaaatggattccgaggataaagaaaatgaaggacattgttgtttggctaatgcagttgattcagttgcagaggggatcaacgatgagcagtttattcaactatcaatcttccatttgatggtattggttcaaagaacaatggagaattcagaaacatgtaggttgtttgttgagaagtcaggcattgaagcattattgaagcttttgttacgacctagtattgtccagtcatctgatggaatgtctgttgctttacatagcaccatggtctttaaggcgtttactcaacatcattctgctgcacttgcgcatgcattttgttcctctcttagagatcaccttaagaaagctttgattggatttgatgttgcttcagggtccttgttggatccccgaatgacacaagatggtggaatattttcttcactgttccttgttgagtttcttttgtttatttctgcatcaaaagacaatcgttgggtgactgcattacttgctgaatttggaagtggtggcaaagatgttttagaagatatagggagtgtacatcgtgaaattctttggcagatcgctcttcttgaggatgccaagcctgagatggaggatgaaggtgctaattcttcaacagagtcacaacaatcagaattgactacatatgaaagtgaagagcaacgttttaactctttcaggcagttccttgatccattactaagaaggagaacatcaggttggaatattgaatctcagttttttgaccttataagcttatatcgtgatttgggccgtgctactagttctcaacaaagaactagtgatggttcttcaaatatacgttttggatctggtcatcaattgcatcattctggaccttcagattctagtgggcctattagtagaaaggaatatgacaaacagagatcatatcatacttcctgctgtgacatggtgagatctctttcttttcacattacccatttgtttcaagaattggggaaggtaatgttgcttccctctcgtcggcgggatgatattgtgaatgtttctccttcttctaaggctgtggcttcctcgtttgccgccattgcattggatcatatgaatttcgagggtcatgtgaatgcttctagatctgaggtgtctgtatcaacaaagtgccgctactatggaaaggtgattgattttattgatggaagtctattggagagagcagattcttgtaatcctgttctactgaattgcttgtatggacttggtgttatgcaatcaattttgaccacatttgaagctactagtcaattgctattcacagtcaatagggcaccaacatctccaatggacactgatgatgtaattttgaagcaggatgagaaggaagttactgaccactcatggatttatggtcctttagctagttatggtaaacttatggaccacttggtgacgtcatctttcattttgtctccttttacaaagcacttacttgtgcagcccctaaccagttgtgatgtcccttatccacgtgatgctgagacttttgtgaaggtcctccaatccatggtgctaaaagcagtgcttcctgtctggtctcatccacaattcatcgagtgtagttatgattttattactacagtcatttctatcataaagcacatttactctgggattgaagtgaagattataaataccaataccagtgctcgtgttactgccccacctccaaatgagacaactatttcaacaattgttgagatgggattttctagatctagagctgaagaagctttaagacaagttggatcaaatagtgtggagttagcaatggagtggctattctcccacccagaagaggtccatgaagacgatgaacttgcacgtgcccttgccatatctcttgggaactctgatacggacactaaggaagctgatacagatgacagtgttcctcagctagaagaggagatggtccagctaccccctgttgaagaattattatctacatgcacaaagcttttgcaaatgaaagaacctctagcttttccagttcgagatttgctggcaatgatgtgttcccaaaatgatggtcaatataggtcaaatattgtatcatttattgtggacagagtaaaggagtgtagtttgactgctgagggtggaaatggcaccatgttatctgctcttttccatgttcttgctttaatttttcaagatgatgtggcagcacgagaagttgcctcaaagagtggtctggtaaaagttgcctcagatctgctttctcaatgggaatctggtttagatagtaggttgaagtgtcaagtaccaaagtgggttacaacagcttttctttctattgatcggctgttgcaggttgatcaaaaattaaattcagaaatttcagagcagttgaaaaaggatggtattagcggtcagcatgggtccattaacattgatgaggataagcagaacaagtttcagtctgcattgggagtatcttctaagtatatagaaatgaaggaacagaaacagttgattgagattgcatgtgcttgtattaagaaccagcttccgtttgaaacaatgcatgctgttttgcagctatgcgctactcttaccagaacacattctgtagctgtttgttttcttgatgctggaggtttaagtttactgctatcactgccaactagtagcctctttcctgggtttgacaatattgctgctacaatcattcgtcatgtcttggaagatcctcaaacacttcagcaggctatggaatttgagataaggcatagccttgtcgctgctgcaaacaggcactcaaatggaagagtttctcctcgcaattttctatcaagtttaagttctgccatttcccgtgatcctgtgatttttatgcgtgcatctcagtctgtttgccaagtggagatggttggtgaaaggccatatgttgtattattaaaggatcgtgacaaggataaaagcaaagagaaggataaatctgtggagaaagaaaaactcattcttagtgatgggaagaatgctttgggtaatataaatacagcgagttctggcaatgggaatggcaaagttaatgattcaaatataaaaagtgtcaaagcccatagaaaatatcctcagagttttgtcaatgtgattgagcttcttttggattatgtgtgcgcttatgtacctcccttgaaagatgacatagtcacagatgtacctcttgataacccatcagtaacagatatggacatcgatgttgctgctgttaaaggaaaaggaaaagcaattgctactgcttctgaagataaagaaaccagcaacaaggaagcttctgcatctcttgctaaggttgtatttgttttgaagcttctgacagagattttattgatgtatgcttcctcagctcatgttttgcttcgaagagatgttgaagttagcacatctaggggttcccatcataagggtttaacttccatatgcactggtggaatatttcatcacatccttcttaagtttctcccatatgctcgttgtgcaaaaaaggaaaaaccaacaatagcatacaggctttcattgatctgctcaatgatgctctggctgcccgtacacctactggttcatatatatcaacagaagctgctgctacctttatagatgttggtctagttggttcattgacccgaactctcaaagtgttggacctggaccatgttgactcacctaaagttgttacatgtcttatcaaggctctggaggttgtcagtaaagaacatgtccattttgctgattctagtacaataaagagtgatattaatgctaagcagcctgatgaaagtcaatctgggagggcaaataatgttggtaactcatcccaatccatggatacggtttctcaatccttgcatgattctgtgcctctagagcacattgagacttataatactgtgcagtcctttgctggctctgaggctatgacagatgatatggaacatgaccaagatcttgatggaggttttgctcccaccactgaggatgattatatgcatgaaaattctgaagatgccaggggtcttgaaaatggcattgacataaggtttgaaattcaaccccatgtgcaagaaaatcttgatgaagatgaggaggaagacgacgatgacgatgatgatgatgaagagatgtctggggatgatggagatgaagtagatgaagatgaagatgaagatgaggatgatgaggagcataatgacatggaagatgaagtccatcacttgccacatctcgacactgatcaagatgatcatgagattgatgatgatgaatttgatgaggaagtgttggatgaagatgaagaagatgatgaggacgatgaagatggagttatactgcggctggaagagggcatcaatgggattaatgtgtttgaccatattgaggtttttggtagagatgacaattttcctaatgaaactctccatgtgatgcctgtagaagtttttggttctagacgtcaagggcgctctacttccatttacagtcttttgggcagaacaggcgagaatgctgctccatcacgacaccctcttttggtggggccatcactgcacccaacccctcctaggcaatcaggtactttttttttcttaaataaaaatcattgttcttggcaatctgacttgattttggcgttaaactgatttattctctctcttaaaataaagaatttgaccgtctttctaaacaaaattttttttttttatataaacaaattatttcaagttactcccccctct

SEQ ID NO: 220178 - DNA, 2545 bp, Cannabis indica
aaaaaaaaaaaaaaaaaaaaggaattgacgccgaaaaaaatcatacttgagggatgaagaacaatgaagataagattccaaagcatttttttctagggcttaggtgtgtggaattcaaagtgggagtgtgagaaagttaatttaaaactctcttatttataagagagttcaataatctcctaatcctagagcaattgggaggcttttaaatttaaagctttaatggaagaggtaaatggaaagtaaaagacataaatatatcttttcccttatcatttagagtggatttagaaattcttatagaaataggaataggaattcaagtttaaaaggtaacatcaattcctaatgctacaaaggaaaaattagagatttaaaagaaaaagataaatgataagcaaaagatcaaaagtattttctcttcttctttatctctctaatttttgaatatatataattaacaaataagattaggattcaaatccaattaattctaattccatgaaaaatatttaaaaatatcaaattttcaaagaaaaagataaagataagtaaaaaaaagataagtttttcttctttttttattgttaattaaattttgaaaattgccaaggactatgcaagggaatccaaagtgctaatttgactggaaatgcttgaagaataaaaataattgcctaagattgtcaaaattgattcctatctagtagtttcaagagaaacgggctaggttcacgtcattaagttaactccacacaaatgtgaagttgacttaggggcaaatgttaacctcaaaactttccctggtgatgtagacatcaatgtttgacatgtggcaagaagaataacgtcacttagttgagtagacctgagtcataacagtcgacttaggaggggaccctagccctgcgcccagattgactcgggagctcttgattgaagtttagacttcaataacttgaatctaacccactatatttagtcattttgtaccataaaaacatgaagcaacctaatccaagccccgagagctaaaattacacgaacctataactcgaaagccaacttgggcacctagggtttcacgcagtgcccaggttgacattctttattagggtttcagtttctgagaattgcttagtgaaaatgggtcaaaatttgtattaggacatcaactatacataccatggacatatttgaggcatccaaatcatattaagagcaagttcatttttgagcactcgatgcccggacacccaacacccaagttaacaatttgtcaatctgagtgcctttcaagtatcatattcatgatttgggttttgcatcttcttcgtattcatcaaaaatggggaaataggtacttttgggaaagaaacaacactttttgggtgccagaagcaaggcccaatgcctaggttaacacctggttgatattttgttaaaatgggccgatttcaatgatgttttacaagaaaccttccaagaatcttctttgttttcagaaaatattaagattcaactatttttgggggcaaaacggacctttcgaagggccataactgggacccaacgcctaggttgacatattgttaacctaggctgtttccaatcaagttcatgaaaaagtgctttgagcatttttttcatcatcagaaaaaatgaagattaaatcaaactcggggagaaaccacaaacacgagcccttaataacaggacccagtgcccaagttgaattggtgctggcccaatgccaaagttgataatcaacctggtgcgctcctttcgattgcttaaaagtcaaatctaatttgaacaattaatttgaaatggtcaaaaatggggtaggagacctcgtccttaagttcaagaaccttggaagtatcaaaatccaggagcttgagaatgtatacccagtacccagattgaaatggcctggtgtgttggatactgcttatccgattctaattttgtttcgatcgtccatctattttttctcaataattaagatccatgaagtcagagaagtcaaattgacaacttcacatttctcacttccaacatgggaaactcactcagaaatgaagagttttgagtctctcattttcgcaaacagcagcatctctgagaattggtgaccagcttcgccagaaaatagaaacagactatgtgatgtcaaaatatcacttaagtatcttaaagtacatcccttagaattttttacactttcccagcgtccaggttgacgtcatatgtcaacttgggcgttgggtcaagaattgcctttaataaaacaaccataactcactcaatcttgatctaattgatgagattcaacttgcatattgaagctaattcaatgttctattaagtcaggtctcacacttcaattgcaattctaaagctatcagcataaaatttcaccccaagggagttacgagaataagcaccggggtacccgcagtgggtcccatcgagctccggaaaaagacatcaccaccaaaagttaattttgattattggtgttggaaattattttcccagg

SEQ ID NO: 220179 - DNA, 3742 bp, Cannabis indica
attatgttcttatcgtaaaaacaatgtatatgttcttattttttttaaaatatgttaaaaactataaatctacatttttgcaattctattgtcacttaggtatttatgaaaatattccttctttttcattcatagaaataattttttctttttaggtaaaatgaatagtacctaaaataataaaattgcaccttttcttttacggatttatttaacaattttttttacacatattattcttttcggaaaacaatattaataatgtagcagtaacatgcaaacacaaaaacaactgtccccattttgtaaagaaagagtttaaattcgtaaaaatattaaagatatactctgtttttatagctagaaacctaatttattataattaagtgaacaaatttgtgttaaatattatgataaaacagatcattaggagctggtttatcaaacttaaagtacttctcagaagcttgttcagcaggagagagaataatggaggtaattaaaagagttcctaagattgattcagagagcatggaaggtgaggtattggagaatgtttcaggggaagttgaattcaaacacgttgagtttgcttacccttctagacccgaaagcataattttcaaggatttttgcttaaagattccatcgggaaagacagtggctttggtggggggaagtggttcgggaaagtcaacagtaatatcactgttgcaaagattttatgacccacttggtggtcacatatgccttgatggtgtacccattgataacttacagctcaagtggctaagatcacaaatgggtttggttagtcaagaaccagctctttttgcaacatctattagggaaaatatattgtttggaaaagaagatgctgatttagatcaggttgttcaggctgctaaagcttctaatgctcataatttcatctctaaattgcctcacgcctatgaaactcaggtaagtttttctttttttctctttcttccactaattattattatttagagttaatattattttggattccctattttacaaaaattatccattaattttcttttttaaaatagtatcaaatagtacattgagttcaattttaaataatttttttaatataaccaacttaaaacaatttctaggaagaacaaatataaaaaatgtagttatttttggattgggttattattaacttttattttgataaaaaattagttcatagtactattttttttttattttcgaaaatatatagtttaattggttatttaacaaaacagagtgtccaattaataacttttgcaaaatataaaatctaaaattgtagtatttaccatattatttattagataatttgcaaagtaattcatttatactttttttttgtttacctttttaattttacttttaaatttgaaggatcttaaattttactgtaaaatattaattgagattgtcactactatatcaagataataaaaatatattttatatacttaataattcagttaacaattaacggtgagatttaaataagatttgagaagtgtataaaattaaaataaatattttagctactatgattacacttatttatttatttgcttgctttggcttttatgcttttactttttcagaaaataataggttaattaactagagtataatattagatgtatatctatataaatccaaacacatgattgtattggcatactgaatggcatacaagaaatagtggtgaaggatttctatgctatttttagttgtttttattttacaaatcttattaatccaaccaactcatgatttcgttccccacataccaacgttgttatttctctcctcacaattagaatccaattacttccacgcggaccaccattgaccatattctgcagtcaaataaaacagcacaataaagtactttttgtttgttttcagcaaaggacaattaataacatatcaaaagaattaacactgaatactaattattagtacaataattcttgcattattatatatctagttgatttcagcaatattttatgtgttgagttgagaagggttcacataatcaattagtttaaggattgctaaaatgcaactatcatcttttgtagtgtcatattcttattaatatactaaattaaacattagattttacataacttaagaaaatattcccaactactactaattcaaaattaacaatactcattattttaactcattaggttcgttgaactttaactgtctctttaattaataaaatatatgggcttgatatttatttatagcattacaacaccaatcaattcatgaaaactactctttaaagtggaaagtagactatgaagcaactctctttataaattatactttgattcggtcaattggaacaagtagtggctaatccaataaaatatttagtgtccaaacagaaactataatatttcacttttatatctttatactattacatcactagaattaatgtgataatgaagagaatgatatttgtaaaataagaagatttttatcactaatttatcttaattttaataattaaataaatattatgcttggtttgattgcaggttggtgaaagaggtgttcaaatgtcaggaggacaaaaacagagaatagccattgccagagcaataataaaaaaaccaaggatccttcttctagacgaagcaacaagcgccttagactcagaatcagagagagtggttcaagaggcactagataaagccgcggtgggccgaacaaccatcgtcattgcccaccgcctctccacagttcgcaatgcggacatcatagccgtcgtccaaaacggccatgttatggagacaggctcacacaacaaccttatagaccgcgaagacggtctatacgcttctctcattcgcttacagcaaatggagaagcacaaaacactagaagaaccatcatcatcaacaacaacaacgagacacattggttcttcttctatctcgagcatggagttgaacaacacaagcagccgccgtctctcgttggtgagccgctccagctcggctaataactcggctcggttttcgctaactggaaacgacaacgttttggaaaccgaaagtagtggtagtggtagatcgctctcggtaccttcttttaggaggcttttgggtatgaatgttcctgagtggaaacaggccagcctcgggtgcttaagcgcggtacttttcggtgctgttcaaccggtctatgctttcgctatgggttcgatgatatcagtttttttcttgcctaatcatgatgagattaaggagaagactcggatttacgcgctgtgttttttggggttggctatattttcgttggttattaatatttgtcagcattacagttttgcttatatgggagagtacttgactaaaagagtcagagagagaatgctttctaaggtacttacctttgaagttgggtggttcgatcaggatgagaattctactggtgctgtttgtgctaggcttgctaaagatgccaacgtggtatgtttattcttaatttttaacttatagaaaagccatagtactcatagtcaccaaaatagcatattttgtgtgcacaaaatcgtaaacataaagttcctaagaggtaagaacataactcaaagcttcttccatacattttattaagtggagttttatgattataccaatagcaatgtgatactgaaagggaaatttgattt

SEQ ID NO: 220180 - DNA, 1682 bp, Cannabis indica
gggcatcaaatattcccgccatggaagtagtagattgaagtactgaagactggactatattgagtgttgtgagagtgacaagttgacctgcttatatttgtgtttgtgtgtactttttgtcgtgttgtcttgtatactattttttttagttttaataaacgagattcaatattgaatgggttggtcactgggtttctaggagactcgataaaatgaggtgatgaaaaatttataactgccctttcaaacaataaaagctgtcactttgtcaactacgtcattacccaattttggctgaaaaataaaagtgtgatcaagtgctagttgcttgcaaaagtgtttgaacaatattcatattgaaggctcttcatgtctcatttcatgcctcaccaattttttaatattttttttaagtatagaaaaaaaaaaaaaaaaagaatgccatatgtgatttggaaaggtaaaacacatcaacaatatgaaccatgattatacatatataaacattattgaaagaaaaaaaaacataagtgaaaaaggagaacaattaaaataagtgagagctatgagattttaactaaatcagaacaaaggtttctttccattaagcaatcccatcaaataagaaaaaacccggcttcctgagtctcgcagaccagaatgcatgaactcattatttatccacaatcgaatcccagctatctgagaagctgtttgcatggccaccttgaagttaacatacatatcatcgtagtaaacagcagctgcaactggaacctgttcaataatgaataactactttaataccaaaaaaattatttaaatagtgtttaagagcattaacttcatattcaaagcaacatatctataccttgttgttatttaaggcattgatgctgtatagaggaggccaatcatccttctcagctaggatataagcagcgtcttttagtttctttaaggcatgaaattcatcgaacatccaagggaagatcatctgtggaaccaaaaattaatactaaattccttgtgtatcttttagaagttgtaagcagtgataaaaagacaagaaggttaaatcaaatttgagaatatgtaggaagcaaacttctttttcataggtctattgttagcaagtaccaacctgtaaagtgtatcgctaaaatatcaaatacaatactcttattagatattacagaattcatataacattttctatgccactacacaaaggccactgaagaataatataatatatatataaaaaaaaataaataagaaatagcagatcctcatccagcaaacaaacggaagagaaaacaattagcaatcagctaagatactgaggatttctcagtcataactcggttcttcaagtcttttaaaagttcagtagtaatatataccttgtagcttgtaggaattatcacctttcaaatatcaaatagtaagaccattccttcccattgtccagttgtataaatttacttacttaacatgtgaagctagctctgatgaacaataatattttatttaaggctaattaggatttttgtcctctgaactttgacatgtaccaaatcatgccccttgaactttcaacgtcgttaaaaatgtcctctgagctattgagattattggatttaaagacttttgtccaatttaagtaaaaaagtctaaca

SEQ ID NO: 220181 - DNA, 5354 bp, Cannabis indica
gaaacaatgaagaaatttataaaataagaatagctttgactctcggaatatcgttagattcttatattaattgaaattgttctttagatttcctctatagctttttcattaggaaattgctataatcgtacatcactggacaagaatgattataatcatctgcttatgatattgctctattttcttctaagaaaaggagtagcatggatgacttattcaagatattctatccatgaaatgatgactatcctttttttttttcaataattgaatctccttcctaaagttctacttaaactcgattgaacatatacttgacttatagttctaatatcgatattaagcattttggaagctgaacttagagtttaataatgtcttagtggcagtccaagctagaatagtaatgaatttctagagtacatatacacactgaatttaacttttacaagtttagatatccaattcatggatcaaactaagtgttgatatatgacatgagtttgatgttttgagaccgaatatccattaatattaaagaaactctttgttgtaactagaattaggaatcatatacatcaaagaatggtaatagctatggattatatatggcactctatcttgtcatagtagttttgacaagattattctcggaaagagatatttgtgttacataaccacttgaatggtatgccaggtgtccttggacatagggatgtacaagccaggggtggttatgagtaatttttcaatttcttagacgattactatagatatttaacatatgccagaaatttgaaatgtatgaaaaatttcatgaattactagcaaagacagttaagaaagtcattaaaagatcttgcgaatcgataggagtggagatatatttgatatgcaattcaaagatcatttaaatgaactttaaattgtgattgaacttacctcctcacaatttttaaagtcgaatacttatgaaatacttagatttatgattagtaactagcagttaacaaagtccttctaaaaataaatctttgagatagcaaacaatatattaaatgtcgtctcatctaagtctgatcatatctttaagaatatctagaactgctaactgttctagatgttgactacatagatgtaatcttaaaaccaaagtagcaaagaagtggagatactattcgattatatccaaaattattccgtcatcttacactatataagatagttctacaatctctattgtattgatacaactaaagaggtctatatcattgaacttcctaggtatattatcattcgaatcattatgggaggatttctaagaacccaccctagtatgacttggatgacactagtgatgacgaaccaatgttagtttaaactatcattggatagtccaaaaaaggaactaagactcaaagcatagagaactatggtttagccattcacatggagcaacatagagtttttagaatacaagactaagatgggaaaccatgcccagtctattgaatggacttaaggaaatttatttactttcttgcaaacagcttacattagtaagatgctgagcaattttcaaatggctaactctagtagaggtcacttgacttccagacttgaagtttatttatgtaaggggttgtttctaactgctctataaaagataactgtctagaaaaggattccctaagtatcaattgtaagaggtcttatgcatactcttgtatgcaattagaccagacatatgctgttgagtgggagctgagtaagtattagtttaatccatacatgaacattggaagataataaaatacatcctgaaatataagaagaggaaatatatgttagtcagtgtgggtgttgtattaaaacccttaggctacagtaccaaataagttttctagactaatgtcaatgctagaaagtctacttaagaaatggtaattactctggggtggagcagtggattctagagaagtgtaaaagcctatttagaatcactaactctaccagtaaggctgaataataaggatgccctaaaggcaattaaagaattattcaaactcaagaaagttcgatacagactttggcattatttacaaacatggaataattgctagtgtgactcggtgttgacacaaatacaattgccaaatagtaaagaatcatgtaccctaagaagagaaaatcatatagatggataatttacaaaatcatgtattttgtgactaaggaaaatctaatggtcgggtaggttgatgctgaatacagcctatcagatcctattacataatttatgccaaatactatatatgatcaaagacatcaagtatatgagaatatattaaaatgcactttagtattatattagagcatgtctgggagtatgttgggatttcatgccctaaataaaacccaattcaatgtaatcatatttactttcaataaagataaaaaatcatagcacgacctagtcataagctttgttcacatattttacacgtgattatagatttaatatataagttctattaaatcccaaacatatagttattcacgatggcagtgatgtcatcacaatagaaaataattgtgattatatgattcaaattatttagtccacgatttattaatgcattagatttacactgacgtaattatcaacaatggggtttacttacacttggataagttaaatgtctttgttaggacattagtaaagtaaataacatctgatgtattttctatacatcaaactggaccgatatttatagcagaagagatatcgtaaacttatcgtaatatcttttctaggtaaatctctaatagttgatcttagatcaatgctcttaatcttgaaatggttaggttctagctttactgtcttattcttattctttgattagttcattcaaaacctgcctgtaggtttggctcaatacttacatcttgatagcagggtagtacaactgagtgggagtgctagtcatagatatggaatctatagcttttgtaagtagataaaagtgaaatgatagtttctttagagcttggctaaatacgtttaaatgattgaggtctcattttggtaatcataatagttttccaaaatattatttacatgtagttatgtattttaaggataaaatacattgaaaggtaaaacggtaatttagtccctattcaatgtagaccatctacagaggatcattgattatttatattgaaataatagataactaatagcgtatttattcttggagatcagagcgttctatgtaatcaagagtgaaattctgaatctattgtggacttaagataaatcaataagatagagaatttactcggtaaattctagaactatttattgggagcttgattacataggccaatagtctccgcagtggcttggataatatcaccttgatgtctcaattaattgatttattagaatttagaaattgactatgtcaaatttaagaaattacactaagtttgactaaattaagaaggtaagagatacatagactttattgttaattgtgacaaattactataaaattaataaggctgctcattgtattgcaaggagctcttgtttctcttcaggtcgtgatcttcagtggactgattgtcctgctgaagttcagtctcttgtaatgggtgaaatttcgtattaatgaaattttaaattttattcaaaaaaaattgtatgtaaagtttcaatttataattacctaaaatttaataagaatttaaatataatatataagtgatggatatccatgtagacatatatggaaagttatgaaaagaatgaacatcaccacaatcttagatttactggtaagcttgcaaagacaaataacaatatagaatctactcaaacgatcaatcgaaaacactcgttcaaatagttaggcattgatcacttatgtcagatgctagcacaatggtttactatgcctccaaattgcaagcttcttaccacacgacaaaagaacaattattagctagcctcacaaaaaagtttaaggaggatttccaattacatacaaatttcaatgaacaatctctctaaaattgtggatatcgtaactctcacataacaagagactccaatgttattagaactaaagatacaagtgatcctaataaattggggagacctaccggcaaaatcgtccatcaaaagtgtacaaacaaaacactatccaaaacctatatataaataaatttatctgaaagtaatcacattacatacattagttctacgtatttggtaattggtggtataatggtatgccaactaatgtattatattatctttataataatggcggtataaaaggtttgtttttttgaggcatttttgctttcaagttgggtctaataatattaatatatgagctcaaaccaagaaaacaaaggtgattgtaatgatgatgatgataataataataattaaaaattattaatattaacataatttgtcaacatccttcttcccatacatctagcttaaaataagaagaagactatacttgaatctcatatttagaagaaattaatgcatacatataagaagaaatacatacatataaaatgcttaatatgaccgatggttgtcatttggttcaccttccatcaattattattattattattgtcacacctaattaatatatactatatatttatatgaatattatgattgtttaagtgttccaaatatatatatgtacacatttatatgattgttaaatgacattgtacgtaattgatgaaactagtagttaataaaaagaaatgatataattccaaattacatcacccgcttattataatatttatagactaatttgtagatatgaaagctttggatgtaagtggccatcccatttaaataatcatatattttgtttgtaaggtaattatacgtatattttaaatatttgcatagttatgatatatttttattataaaataatttatatgaatatcattttcaataatagtgagtataccttttatctatattgttgatcgtgaaaacatttaacttgagagtatgagtgataagagttttctctctctagggttttttctttcttctttctaagctagggtttttctttcttttctttcctttttcttggctagggacccagccgtcgacctactatgcttctggtgttttctggccgagagggaggtagatggcagttattatggccatggatctctactcttcgaaagtcgagaagctagctaggggcaagctttggggtgagttgaagctgaacgttgttttctacatggagttaagaaaaataggatctcatgtggaa

SEQ ID NO: 220182 - DNA, 1889 bp, Cannabis indica
accttggtgctttactagtgccaatcaagcatgggtttttgatagagggcgccaaacactactccagccagccaagggtgcatcaaggacatgtcaaaataccacattactaacttggttctttgacagaggtcgcctacaatataggactctagacttgagtgaattgatcaatcaccttgaggacaaggtgaatttcgggaggccggtaatgttaggccttgggattagtatggtgggctagcttatattaaataaaagggtaattgagtctttgtattgagggtagtgttttggagggaatacaatagtatatatagaatgttaaggggaattgagtggtatgcaatgttttgagtaaatctctatttgcaccaaaggggcctaagggctcctatcctttgtaattggatttctcaatacattcaatatacaattcctattatttgctactgttttgctcttacttttgttactgttttattgaatatttgatctggggttctcgggtcttatcactataaaactaaaggactataggaataaggtggagctcttatctctcacaacaagcagccaagtgtctttagttgcaatgttgcttattctaaaacaaaatgataggggttcataaagtccagcatcaattatggtaatgctttgtgacaatgcagagaacttacaggaccactgaaactggaaagaatatcatacagatcattatgggatagcttagaaagatgctaatggatatggaattttatctatttggcccatacttgttaattacagattcaaatcattttgtatgttcgatgccacttagcttctttcatgaacaacatacctctgtaacttctgattcagcgttcttcattcaatcacagaatttccagcgaaactgttcttcccactcggtgaaaaataatactgcagccaaattttgcaaattagcatttccaggactagttagatacaatgacaatcagtataagctagctagaggtagcccaagcacaaaaggaatttaaattcagaaaaaatatataataaatagaaaaggtataaaattatagcagcagcaaaagtagcaagagtttagtacttaaagaatatagtctatattgacatgtttgtagttagatcaagtaaaagaaaaatattgatgtaaaaagtcttaaaataattaaataccttaaagatcagatgggcaggagcattgtggtactcaaggtgttattatactaccaccagaataagacaagccatcatttcgaccaagattctgaaattttaagttggctgtaaaagtataaatttgctctgtgtagactgtaaaaggctgtgtcctggttccttctttaagcttctcttttctataaaatttctcatgtttccagcactatcccatgcaccagttgcagaatataagcctgctagaacaacataattagcagaattatctggatccacttgaaagagatgcttagctgctacttctccaagacgcgtatttccataggtgttacatgccccgagaattgaaccccaaagggatgcattcggcttaacattcatcttgcatataagatgaaaagcttcttctaaccagcctccgcgtgcaaaagtatctatcaaacaagctatatgttcttctcggggtaagatgccatgcttgctaaccatatcattaaaacattcccatccttcaccagtcaaaccagtatgactgcaagcacagagaagggacaagaatgtaacatcattcggcttcaatccctcacattccatcttcttatatagttcaattgctttatgtccgaaaccatgtttaccatatccagcaatcaatgatgtccatgaaattatgtttttctcctccatctcat

SEQ ID NO: 220183 - DNA, 1978 bp, Cannabis indica
cttttcttcaaaaaaaaaaaagcgacttgaatttatcgtctaaaaaaactgatttaacaaatataataccaaattaattactggaaaatagtttttcataattattagtcaaaggttcttaattagttaaaaccaaacaatacatataatcatgtaatgtaacattgtttgattatcctttatttatcaaaaataaaaaaggcatatgtattaagtttattaataaagtcttaagatgggttataatactaactatttgtgtaatttaatattcaatataaaaaattattaactactgacgttattatttttatttaattaatgaaagaaagttataaagtgatcaaaataaacgtattccaactttaagagttaggttgttgctgaagtggtttcttgtactcctatacattatgaagacacatccccttatatatatagaacttggcctaaacaaaaatgattgtaactatacattatttatttcatgaatcattatatgacgttaactataagccacatagttacagaaccgacatttaaactttttaaaaaaattgttctaaaagatgccattttcattaatcaagaaaaaatatatatacattgattgaacatcttattaaaaacaaagaagggaacacagcacaaggcctagccttgagtatactactagtgttagttaactctccttgttctagatcaccactttaagggtggcctattatagactatacttttctttttgctcaaccaaaagaagaaattaaaaagaaaaaataaatatgagttatagctaaataaatatatattaacttttaaaaaatagtaatattatggacaccaccaattaattcattataattcagaataattttcgatatataagtcaaaaaaagatataactaagacaaattaaatcatatttacatagataaattgcattaggaaaaatgtatttaaacttgtgcaaaaataaacacaaaacaaatactcattaatccgattatcataaaaaaaaacaaaaaaaaaaaaaaaaacaaccctcaacccaataaaatcaactaaaaaaagaatgacttgcaattcatgacaaatttaatgaagaaataaccattataaaaattctaagactttttcttattagtattttaaatatagttgcacattaaaaaagaaaaaaagaccaaagaaatgctactaagtctaatctcaaccataataataaagttggtttcataaacgaaattaattagcaagtggtttgattatgtggatggggttgcttgtgttttgtatgagagattcacactcaattataagtatatgcttaattagcttgattgttataattattattattattttattattatatatgtaaatcatgaggaagtataggctaagtagttttggattttcatttgagggtacgtatgtaatgtaacaacttacaattacatgataatcttgatgggattaactttctattaaaataaataaacgattttcgtacgaaatttgttttggctttcagaaaaaactaatcatattgaaatttcgtttgatgattaaatcatagctgttatatgtgttttttgttttctttatgagtggtttgaagaagaaaaagggacttagaggggttaaactgcaagaattttgagtggggtggattaacacgcaaaaaattatttgatgaaaattagccacacattaattcttatttctgtgtggtcacagacttggctgtcactttatataatcacagactcacagtgtgttagtcatgcacttttcaagatgatatttaccaataatattttgcatgtgtttttgtataaagaataaatgggtgaggagtaatagagacaccttgaaaaagagatgtacatacatagataataagaaattttttatttttggataatcaattaacttttttttttttttaaaaaaaaaaagagatgggcaaagt

SEQ ID NO: 220184 - DNA, 4423 bp, Cannabis indica
aatcacgtaatacgcctatgctagttagggtgttacaatacatacttcttgcccaacggcctggttagagagtctttttcaaaggagagacttttgcgtgacgcgtgtcctggttcgtacaaaaatcctcacatcagctgcacgccacaagatgaagaagtttcttaccagccaattgttggactgtcctctagtagtactatccttagtagcgtgtggagtatgaaaccctaggtaggtaaagggtatgccctttaccccatgtgcgcctataaatactcctatttttctttaagcaagcagagaaaaaattttcacttacagaaactctactaaaatccctataaagctttctcttaagagataaaagaggaacacagaaaccctactgtaaacatttgcattacttacatgtttgcccaaagaggccaatacaattgactcgtagactaaggatcattaacgcctgaaccacgtaaaaatttgtttatttattgtctattgtttctcatttcgttaagctctaaatatagtgagtttttaaaaaactcggtaaacattttggtgctttcattgagagctgagaaaagtcttgtgatcttgatcacgttttgaccatggtgtataccaaaaaaggctctcgtaagaagctcctcttggatactggtaaaaaggtcctcttcgatacagttgtggaggaagccgactctcatgcagccgacgcttaggaggactatgattgaaagggtgcaactcctactgagaaccaaggagggaatatcgagaatgttgcagaagaccttggtgataaccgaaatccaaaggatgaagaagatgaagacaataacgattactattataaggatgaatattacaaagatggttgctactatgaagatgaccctagtctagttcgggtaactaaagaattggaagctgcataggcagcattagtaaagcaacaaaaaattaccgcttagatgaaagaaatgatggagcaacatcagagtaattttgatggcttggctggaaacgatggagaacaattagtaaaagtcgtgacttaagggaaaattcgtaagcaaaatgaagctgaaacctcaattggttatagagacaagggtaaaggcgtagtggatgaacctccactaaatagtgctcttaagcctcctcgtaacgatgtacccccagtcgaacaaccctcgaggatgcagaaggccaccaatgcttctgagcttggacggtcttctgactctcgagacaaaactgtgctgaagggaccagtcacaaaggtctttaagcccagaagacgagaaaatcctccaagtgattccgtcaacgaagacgggaggaccagtcactctggagacggttggtccacgacagatctgtggcggcaattagacactaaatacgaaaggtacaaaagcaaaaaggtgaggccacatgggggtgaccttagaaaccatctgagtgacaagatgaggggacgtgatctcctcgaaagtgacaccaaaagactagaagaataaattgatgtgctgactaagttggtcaaaaaacaaagtagagcattgtcagactccgaggatgaggatgcagaactttgtgtcagcaggatcacggaaaatccactcccaaaaaactataagatgccccacatcgaattgtatgaagagagaactgattcagaagcacacttggccaaatataataagatgatgcaagtcgcccgcgttagcaatgatgctaattgtttgtgtttctctctgacttagacaaagtctgtggtagactggtggaaacggttgggtccgggatcaatcgatagctagaagcatctacaatcagctttctgcaagtagtttatcatcgcacgtgaaaaagacattgaagtcggttccctaaccaatgtaaagcaagaatctaaccaaagtttgaaggccttcattcaaagaatgatggaagctgtcgccaaaaccaaggtctgctgcgatctgaagtttatcgctcttgtaatatcccgataaacctaatggtaaataattagggtttaaatttattttatgggttaatcaagtaataagtaggattatgatcctactaatttatttcagcataaaattttaattttgctataattgagtaaataagcgtaagttgttaattacaaagatttatatagcatgtgtgaatgtaatatgaggtatatatggaataaaaatatttttaggtttggtgatcctgaagaattgataagtagatatataaacgtagtttgttagtgacagagatttatttgaaatacgtggatataatatgcgttatttgtgaaataaaagtatttccaggttcggcgaccctggagacccaattggaggccaaaaatgtcgcaacagttttagttagaaatattgataggattattaggataagttaattttataaaaactagagtatttttgagtactagaagttggtcgaatactcaaaaaatagaggtttctttgtggctaaaaaaaaataaaattactattaataataaagtttttattaatacttttcattcttgtttgtgtaacacgtggcaagcatcagatccatacgaccccgctgttggttgattactatttaaggtcaacaaccttattctcgagggtacttagatgtttcttgtcaacacaatggttgtgaagatgagaaggggctaaggactttactttctacaactctcaatgaaagaagcaaactgttgaccaagatttttacagttaaataactttgcagaaaattctttatggaaactttagaaaatatgagataagagtttttacgtagttctagtgttaagaaatcttagtccataagtcaatattattaggggcatggtatgaacacatcaatagtagattctctctattcaatcactaatttttctaaagaactgaaaaaaaaaaaaaggattcttttacgataggtgacctttgcctataaatagggcaactctccattgtaaaagggtccctcttttttagttcttaagtaaaaacaccgctacaatagagagagaaatatcatggttgtactcatacaacacccccaataatattgattagtaaactaaaattctttaacacttgggccacattagaattcctgtctcatattttctatgctctctaatattaatttttttcctatatatttaatttcaaaaaaatttaatttctaattatagattaaaaatattggtcatattaatatttgattcctattcaatcttgcctctacaaatattatataggagtaaagtattagaggaaataaatgtgtcaaaagccttcaaagaaaattaagatttgtttcataatttattttcatttatttagttgccaaaaattttaatctacgattataaattaaaataattggtgatattaattattatttggttcttattcaatttttccactacaaagaatatataagagttaggaatggtaattttggcctttttgcgggcctggttgggcccacgactcaacgggacaactttggcccaattattatgggtttttatcgggctctaggctcggcgcgacctagcctggtatataatatttcgggtcaggcgcgacccaacctgattttagattttaaaaaccacctaaatccctaaaaaaaattagtctcaatttctttagttctctacttctctcccgtttatagagcgaatagtactttgacagattcaatcttgctccccattacttcctgatcaatttcttcagcaaggagaaagaaatattaggcaagaaacacagagatttaatcatgcacctttaggggtgctagtacggtggctatttgcgatggagagcataatgagaaggtgaggcaggtaaaaaaaagtgtcatttcaaaatcgagaaggggtttgtgagttattggggcgtaccacagagtcggcttaccaaggaagatggaatcgatttttattaattttggtgatatcgtattgatttttataaatttactttattatgaagccgtgggacacgtacaaattagatatgtccattgatctaaagaagcacctcgccccaacaactttattagacaaaaaagcatattggtctgtcaaatccctaagatggccaactaatatttttttcggtatatttttctataattgctatattatattacatccaatttataaagagtttgaatattttatatattcatccatagcaaagtaggttctgagactttgtatgttgcggtgataatgggaggttcataacttgcttgttttagtgaaataggatctgtaaaatttgtctgctgcgctgatataaggatgaaaacttgtgtgttatttgattgtttgcaattgtaattgacagatagttaggttaat

SEQ ID NO: 220185 - DNA, 3498 bp, Cannabis indica
atactattttggacactgtgttttataaaaattattaatttgaccatgagaaaatgaacaatatattttttgataaccatataaataggatatggtctcaataattaaaataaaaatatatgtggtatgttaatgaccaaaccaaaaaaaataatgtgtataatatataaattaacatataatacttctataatataatataccataaaatagaaataaaaaaatacatataacactcacaaaaacatatataccaaataaatattatctaaaaataagaatagatcatatatatatatctaataaaaaaaaaaaaaaagaaagaaatatgcaacccacaataacccattaataataaaaaaaaatatttaaaataaaaataattttaacaaaatcaataataatgatatatcataatattgaaatgatatgcttctaaatatttttaaaatatataaagaaaaaaaatataaattgaatattaaaattgtaagaaccataaaacattatgtgagaaaagacacttttaaaaaaaatttaaaattttgtaattaattaagcaaacatgttacatggcagtataaaaacacaaagctcggtaagagaagaattatggagtctactaattctgcaattaatctttatggtgacaggtttcactaaggtagttcatcaaagaagaagtcctagatgaaatttgaagaggtatacttcataaaaccattaaaaattccttcccctattacattgtaataaattatttcttttgtacgctcttctgatggtttttcttttgtatttttatttctatttttatatatgtatacattagaagtcatattcaagaacaaaagaactccatatggcaaaaaggcacataggtagattgaaggggaccaaagatatggctgactctatgaaagctcaggctgaatctgatctctatgatgctaaaaagacagtaagagatttatcttcctcaataagaaacacaaactccaaaacaaaggctcaaaagcaagagactgaaatgttgaagaaatcaattaggcaggaaaggagttcggcctctgtggatgctgatagttataactatgtagaagtggtaaaggaattggagattgttaagcacgaattgcgcatgcttaagcttgaaatggctgcaattttagcagagaaatcgagggcagaggatcaaatcgaggctgtaacatcgcgaatatcatcttgttcgaactctttggaggctgatcaagaaggagattgaggaggtaaatgaggagcatgttttgattgagttggccacaattgaggctttgaaagagtatgaagaaattgagtctgaaagagaaaaggaagccgctcgtttcaaatctaccattcagaataccaggaagaaaatgaaggacattgttgatgatattgaggaatctaaagagcttcaacccaagttggatgcaacaatggctgatcttgaggtgttacagaaggaatggagtcttgtaaaagaaatggagcagagagctcaaagaagtaagagcttgaaaggttcagaagcaagttccgaaggaggagagacagaccaggatgctacactttctttgcagacaattactgaagaattagaagaagcacaaaaagaattggctttagtcaaagaagaaggttttcaatacatgtcctcaatggatatcataagaaatgagctaagacatgttaggaccgagacatctagattggaagaaattgagaagaagagagatttaactgtacaaaatcttaactcaaagctacttagagcaaaatccaagttggaatctgtaactgtagctgagagaaaggctaataaaattgcagcaaatctatctatcactcttgaaaagctcaaggcagaagctgaggctgcaaaggaagaaaagtatgttattgatgaagaggttgcaaccatgaaggaagaagtccaaaaaatggaatcaaatatagacatcaccgaggagaaattgcaagctactttggtagagctggaagcagtgaaatcatcagaggctttggctcttgaaaatctgaaatctcttattgaaagtgcaatgggagctagaagttcttcagtggagcacaactcctcaattaccatctccaagtttgaatatgaatatttaactggacgtgctgttggagctgaagaacttgctgataaaaaggttgcagctgcaaaggcatggactgaagctattaaagctagtgagaaagaaattctaatgaagacagagttagttcaaagagaaatcagagagatgaagatggatgaaaagagagagtcttatggaatggagagatcaatttcagcgaaagatatggttgagaaagagttgaacaactggaaaacaaagagaaaaaatgagacaccagagaatttacaactagcaatgcataaaagatccattagaagcagtaacattgggactaatttgactccatctagacgacctagttatcgaaaatctgcttcaccagggactcgaagttctttccttgttaaaaagaaaagacaagcaatcccagaccttgccaagttcttcaagactaaagcaaacaagaatatttgaaccgctacaagttttcttggccaagtaaataataaaattccttttatgtttcaatattgggatatcatcaaataactataggttagagtatgtgaatgtgaggtttcattatttaagtgatgcattgatgatgtacataattgttgttgtatatttttaaggcaatcaacaaattatatgctcctctcactatggttgttatatgaaagatcctcctcttggttgtcacttccaatattttactgagttacttccattgtatggtgtatacaacttcttttttggtttgtgttattattcattttgatacatgtatgctcaccaataaatacaattctgttattagttttattgaattggttttttctattaaattaactgtcaagattaattagtttgattcttgctaatcagttttactgtaaactaactctataaataataaataactctctaattggaaagtcgagattccattgcaaactttctctttctctatttttctcttcttttcttggtacctaccattacaggtctttaccatttaaactttgtttcttcatggtatcaaatttttgccaatagagttgtctatatacacttccgaccctacaggcctcaatggccaaactcctattgcatctcaaggttcaaacccaatatctttatgttgagttttatgccctaaataaaactccatttcaatgtaatctttatcttttaaatatcaataaacaaacagaagtattttcatcactttgtgtgtcatttggttcatgttatcatttatatgtttatttgatttataaattcatccaaattcttatcacatttatgttcttgtttattgtgtcgtcaccacagtggaaagtaatcaagattatgtgattaa

SEQ ID NO: 220186 - DNA, 1850 bp, Cannabis indica
aagagactgaaggcaggggacaatccgagaatggtggaattggatacgattgacatgtgggttcagatccatgatttacaatctggattcaaaacagagcaagcagttcagaaagctgggaactacattggcacatttcttggttcggatcctaataattttcatggtatttggcgtgactaccttcgggtacgggtttctatctctttacacaaacctctgaagaggataatgaagttccggaaacgtgatggtgaaacattttgggataatttcaaatatgagaaagtccccacattttgctttatatgtggtattatgggacgttctgagaccttttgtgctaagttatatgatacccttgtagcaaaccttacgaagccatacaaactctttatgaaagctccacctagaaggaacaattttttgactgcttctccatggcttcggcaacatgaagcaactcagatggatactggcggcaagaattctgatgaagatattaaagttaatgctccccatgatactcggcttgatgatagggaggataatattcaaaggaacaaatatggaaacttgcatggttatgggaaggatattgcctacaattcgggagctgctaatgtaaagtcgaatatggctttaaatgagccagttgtcttggtcaaagagaatcaagttttattctcatctgatatggaattatcaatatctgagcttaaaaggagacgtgttgggcttgtcaatactaatgacccaactggtcctatagtagatgatatggaacatgacaaaaatgataatgaggaggcaatagagataatttcagaaaacggagtcatggtgggttttggtgtccaggcccaccaagcattatgagcactctgagttggaactgccgtgggcttgggaacccacgggccattcagttcctggaggatatttgtttccaaaagaagcccaaatttcttttcttatgtgagactctttgcaccaaagaattggtgaaccatgtacgggttagacttggttttgagggagttttttcaatcgatgctgatggaagaaagggaggtcttgctctgttctggaaatcgaatgatgaagctaagttactgggtttttctcaacatcatatcgacttggaggttataaggcatgggagtttggaggttaactggcttgtatggcgaacctaacagacaattacgacatcaaacttggcagcttcttcgaagcctctctcttgaatcaacacttccatggtgtgtaattggtgatttcaataacatagccagcaatgaggagaagaaaggaggtcgtccatatcctgctgctttaatctctggttttcaatcggcccttgatgattgtaatcttattgacttggaggttcgtggctatccatttacttgggaacgtggaaaaggaactgaccattgcattgaaattcgcccagacaaagctgctgttacccatgaatggttagtcatttttaatcactctactcttaccaatattgactacacttgctctgatcatacacccatatttttacaacctgaaactctgtccactgctgcctcttttcactgctttcggtatgaaaatgtatggtcccgtgaaccaatttgctcccagttggttgaagattgctggtttaattcgcaaggcttatctctgtctggtagaataaaacaatgttcaattcgattggaggaatggggaaaggaaatcttagggaattttaagaaccgtattgcccaaagcaagaagcgtatgaccagaatgaaaagccagacgagttcgttcctgtatactgaattcgaaagcgaacaaaataattattt

SEQ ID NO: 220187 - DNA, 3971 bp, Cannabis indica
gaccgtgatacaactactaatttgctaccaaacaatttggtagcaaaaaaagtattagctaccaaatatagattatttgctaccaactttgtagtagctaaaacttatatttcttgtagtaatattgtgccgagatgggacatggatgagcttgattcaatttttggtgacttggtctcgaaccacatgatagtcaatatcgacatggtttttgcggtcgtgaaaaacaatattctcgaagatgtaaattgcagctttgtagtcacagtatagagtagtaagttgtggatgtgacatgctaaagtcagtgaggatgttaagtaacaaacaaaattcacatgttgtgtttgtcgtgaacctatattaaacttctacagatgacttggatacaagtttttgcttttttgacttccatgagatgagggatgtacctaggaagatgcaaaaacctattatggatcatcttgttctagacaggtcccccagtcaacatcagaaaagacttggaggtggatggaaggatctgcagtagggtgtggagagttgaagaagagtccttagttaggggtaccctataggtatcgaaggtttctagtggcagccttcatatggggttgtcttggatcactgagatattgacttaggcaattgactgcatatgaaatgtcatgtcaagtgatggtcaaatattatacgaataaggcttctgtatgaagttggatctgaaataggggtcccaacatccttgctaagtgatagattggcttccattggagtgctgacagctttaactccaagggagtcagtcttaatgagtacttgaagaatgaatggtgtctttaggaaactaatatgcttgctttaaatcgagaaattctaatacgtgaaaaaatcatagaggtccaagatccttaagctgaaacttagagtttaagaaggttttgaatgcatatgcatccaaatcattattgcttgcaataactatgtcatcgacatagactaggagtgcaagaaaagcaataggagagcacctgatagtgaatggtcattaggagattgagtaaagccatggttaagtagggtattgcttagtttgtaaaaccattgccttgaagaatgttttaaaccatagaggcttttgtttaatatacaaacaacatttggggtagctcccccttgtttacatagcctttagggattgaaatttagacgtgttcatctaagtcaccatgcaagaaagtattgttgatattcatttggtgaagtgactagttttctatagcacctagagcaataaaaagtttgagggtattcaactttgcaactggtgcaaaggtctcaacataatcaatgccatgctgttgagtgtacccttttgcaactatgcgtgccttatatatgtctactttacctttagagttatatttaattttataaatccatttgttgccaataacatagcaaccaggaggaaatgacacaacaatctaggtgttgttttgtttaagagcaagaaactaattatcaatagcttttagcaattaagccagttttaaggcttgaccataagaagttggctcgagttcaatagcttttggcaattaagccagtttaagagcaagaaactagaatgtaatctttcatatttaagatatttatctaggggatgtgcagtggaagtgtggcacacaaagtcttttaagtgacctggattagagatgtgtctacctaccttggttgttttgggaaattgttttgctttgtgcaatacgtacaggtgctaaagttgatgctagattcctagggatgagaaataatgtatgaggaggagtgggatttgcattgttatttaaaggtactataggcatatgagaggagaaaagaatttatccaagataggtaagtttgtagagccatttagggggaaaatgtttcataaaagttaacatccctacaatggaaaatgtataacaagcatggtctagtggtatgtaagattttgtacaattggggtaactgttgatgtagaaatctggacacaaatatgtaacctacactcactcactagaattttgggaatatattgtgagctgtataaatgagatacacaactatttatagtagttcagtccatgtatcgcgacagtaatggagctacatctacttcaagttttatttctcacgagatagattatagaaaaatagctaagtctgtctggatactctaattttaagagagatgctctaaccttatgactactcttttgaacttaaaaaatgagcttgtggaactctctttatagggaaggaggtcctattaaacaataattaaatattccaaaaaatatgaaaaaatgcatttaggctatttttgacatttgataatgatataaaggtaaaattaattacggaggttagtgatcaatttttggagcttgagtcacgcctacaggacacgctttaggtaagttgtagcttaaatttgtaactccattgagggtgaaggtcggagtcgataagtttagaattacaattgaagtgtgataaatgacttgatagaacattaaaatagcttcaaaacgcaagttaaatcatgtcaatcagatcaatattgaaggagttatgactattttgttgaagactattttggggcccagcgcccaggttgacattcagcgcccaggttgacatgtgacgtcaatgtggatgttgggttagtaggaaaacgtgatggggattcattttttgaggcgtaagtgatatctagaaaccactttacctatttctgtgttttggtgaagctggtcaccaattcatggagatgttgctattttgcagaaatgggagactcgaaactcctgatttccgagtaagtcactttgaaaaaaaagtcaaaataaaaagttgtaaatttgactcttctaaccttatggctctcagttattttgaaaaaaaatagacgaacggtcgagacagaatcaaaatcaaataagcagaatccagcccactaggccatttgtcaaactaggcactaggtgctcttttcaagatgttgttttgatacttccaaggctcctaccccattttttttaactttttgaagagaatgttttgagtaaattttgtatttgagtgattaaaaccagtgcaccaggtggaatgttaacctgagtgttgggctcagttttggagcccttgttatctttgttttctccccaagtttacttgtatattcattattcttgattctagaaaaaattcctggaacactttccagaaaacttgttaaaaatcagttgacaatatgtcaacctgagtgctagaccagtgtaacaccttactagtttaggcatgttatcgtgattttatattaactgtgcagctcgttgctaatcaacgagtttattaaaaatcgtgaataattaaaacttttaaataattactctctaaatgaaaataaataccttttacataaccggaatcccatatttaaaatatttacaatagggttacaaatattccatacaaaacttgtcgcctaacgatgatttaaaatacaacatgttgtcccaaagattgtatgctccaggtctaaccattctgacgtgtaatatctttatccgctcgctttcacggctgctcaaccttagccttactcatacctacacatgcaaataatatatgtgagtcgatagactcagtaagaaaagcataatcataacatagatgtaaacaggattaagattaggagccattacacctaactggatccctccccgcatcctacaccgtactgagtaaagcacgttcaaacatcagcactattaaccataatatttgcctatagtcgatacgctagtcatactctagtcgtatcaatgtgatactctcaagtactacggtactatcgaccataatattagcctatactaggtacactagtcgtaccgatgtgatactatcgagtagta

SEQ ID NO: 220188 - DNA, 2279 bp, Cannabis indica
ttgcctttactaatccaaattaatagagcggtcattacaccttgacttgcaactcagccacttaattttaactgatgtgtttgctaaggcatagaattcaaattatgtggattcgagcaactacttgttgctttttaacagaccaggagattaaatttcaacccaaaaatatggcataaccacatatggatcatctgttatcaagacaactaacccaattagcatatgagtaagctgaaatttccattctagaagcaagttggatgagtagtccttttgaaatcgtgtcttttaaataccttaataaccttttacaagctagcttcctagtgcacatttgtgggagcatgaatgaattgaggcagcttgttgatgatgaatgtaacatcaagtctggtcaaggtgagatattgctcatggtgtttttgtaaagtatttatctacaaaaggagtaccttctgtgagagccagcttatgagaactgcttgtgggactaaaacaaaccttagaaccttccaaatgaaccttgaataataggtctgcaatgtatttgctttgagaaagatacaaccctgcaaatttcctatgcatctctactccaagaaaataataaacttagctaatgtgtgtgagagagaaagaattgttgagaactgcaattatagcttatgaattaaaatagagttaagtcatattaagatatcatctacatagacaagtagaatgaccaagttggtaccagtaccatatatgatagggatgtatcagctcgagaaacagtgaaactccaactgaacaatatttttttgagtttatcattccaagttctaggagctttttttaagccaaagatagctttgtttaatttgcaaatatatgtagggtgattatgatcttcaaaacttgttggatgtgtcatatagacagtctcttgaagatttccattaagaaaaacatttgatacatccaattttttagttctcattgataagacactacaagagtgagaactagcctcgtagtcactgtttgatcacaagactaaaagtttcttcaaattaatccctggttgttcaagataacttttagcaactagtttagatttacacttgtccacagttctatctgcattaagcttgactctacaaacacttattatcaattagatccatatgaaattcataaggaactaaggtccatgtaccattggatatgagagcaacaaaatatttgttcatagaggcattcagtacatggagagctgctttaactatttttggttctctaggtagcaaggaggaagacaattggtgcttggtagccagataggctttaggtttataaatccctctctaagacttaattaccaaaggatgagttcttggaggctcaagcaaaactacaacaacagatgaaaagaaggaaactcaaatactgcaactacatgataagaggtaataggttgtgaagttgcagattgttctgcatgtttagaaagagaagattcatcttgaatcaatgtagatacagatgaagactctgcaggaagtggatatggaaaaagagagccattggtaggagactcaaagcagattcaacatcaagtaatgtagcaactggtgtagtgtgagactcagcaatagagattgagtgatgctcaggtaaatcagtagataaaactgtagtataacagcaagagtaacaacaggattaggaccaaagacaatttgatttgtaaaaaaaaaactaaagcagtaggatatgaaacaggtgaagaatgcacctgagatgacgaggaatagatgaatttgggaaaggagagttcattaaacatcacgtttgagctataaacagctatacagttaaaattttaaactgagatatttatctgcagccgagaatcaaacttagtatttacgctgtaatttattattattttttctttaagaacatatatatatatattataataatatgaaataagtatctatatggcgaaggttaaacttagtatttaagctgtaaattattattattattttaaaaatatatatattataattataataaaataaaataataacttgtaataagtccaagagtgggtgtgagtgtggggctgtcatgtgctgttacatgtgataaattaaacagttcttttagtatttgtttaatttctaagtaacataataaaaaaatatttttttaactatttactataacattaattaataagtctttgatttttgttccctaatagtaattaataatgaataaaa

SEQ ID NO: 220189 - DNA, 6413 bp, Cannabis indica
gaaattgtgttgaattacactatatacatatgccttatataggactagattaacataactagaatggactaagagccttatattagttgaccttagtttgttacaaagtacactatgctaactaatcttaagacattagacagttaggaaacttactgtcaaccatcaaaaataactaacaactatctcacagatttccaccttagttgttatttagtgttgacctcatggtagtgattaagctagttctgaaattccaagttggtgtcgaaatttattaaactttgctgtagtcactatctttgtaagtatgtcagatgggttgtcctcagatgctatcttctcgagtcttactttgctttctgtaagtatatctctagtgaagtgtagtcgaacatcaatatgctttgttctctcgtgatacatctgattcttgcttagatgaatggcactttgactatcacataagattgtggtgctcttctggttaatgttcatttccctgctgaagcctttaagccagattgcttcttttattacttctgtgcaagcagtgtattctacttcagtagttgacaatgccaccatagactttaggttggctttccagcttataacacacttgtttagagtaaaaatataaacagtttgagaccttcgagtgtccatatctctagcataatctgagtcaagaaagccttgcacttcttgcttgaatgtctctgatttgtacttgagtcccatgtttgatgttcctttgaggtatctcataacccacttcactgcattccaatggtcttaccatggatttcccatgaatctactgattacacttaggttgtgatagagatcaggcctagtgcataccataatgtacatgaggcttcccactaggttattgtagggaatagactccatttgcttcaattctcatttgtggtaggtgattgagtctttgacaatttgaagtgttgtgctaaaggtgcactaactaattttgcatatgaaaaaccaaatctgtgcaacacttttgagatgtactcactttgagatagaattaggcttttatcttttctgtctctcagtatttcaatcccaaggattttcttagctgcaccaaggtctttcattacgaactcagagctcaacaatggtttcaccttcttaatttcttcactgcttttacttgctattagcatatcatctacatataatagtagatacaccccaaatttgacattgatacttttgacatagacatagcagtcataaacactttttttaaatccagatttggtgatgtactcatcaaatcttttgtaccattacctagaggagtgtttgagaccataaagtgatttcttaagcaagcatacatagtcttccttccccttttcctcataaccttccggttgcttcatatgaatttcttcatctaattccccatgcaagaacgttgtttctacatctatttgctctaattccaagttatccatagttgtcaaagctagcaacatttgaattgaggtgtgctttactattggtgagaatatttttgtataatctataccctctttctgtgtaaagcccctttccaccagtctagccttaaatctggctgagtcacaccttggaattatgtctttatgtctgtaaacccaattgcagctgattattctcttgtctttgggtcttttcactggaatctaggttctattatccattgttgttccccatttcctattgtcagttgagttcatggcctccctgtatgatcttggttcattgtcactcatttctgcaacattccaagaaaaatggacaatgtcagcataaccaaatctacttggagcctttgacactctcttggctctgtccctgaccaattggtaatgctgcaattctgtgtcagcatttttagtttcatcgtcatcttttgtcttaggatgatgcatttgttggttagaacttgaaccaagttccacctcaagcctggacctatctgcatattgctcattcatagaatttgttacagacctcaatgtgtccttaattatagacagaactttcatcaagcacaacatctttgttgacaaaatatttttgatgatggcctggctctatgctccacatcttgtaacttttaactccttttggatagcccaagaacacacacttcctagccctttgttctagtttgtcaagtctgatatgagcataggctatacatccaaaggttttgagccttccatagtcagcagtgtgtccaatccatacctcaattggggtcttcaaatctattatagatgaggggcacctgtttatcaaatggcaagctgtcatgatagcttctgcccagaaatcttttggtagccctgagtggattagcaagcatctaactctcttaagaatggtccggttcattctcttagaaagaccattatgttgagtgtatgtatgtactattttatgcttgttatgccattcttcccgcaaaaattggtgaaatcatctgcacaaaattctagaccattgtcaattcttagtttctttatttttcttccagtttatgtctcaagtaaaattctccattccttgaaagtattaaatgcatcattcttgtttttgagtatgtgaacccaaacatacattgaatgatcatcaataagagtctgaaaatatctagcccctccttgagacattgtacttgagggtccccacaaatctaaatgaatgtaatctaaggttcatctagtattatgtatacaaattccaaacttaacttttatggatttttcataaacacattgctcacaaaaatctaaatccttaattacattctttccaagtaaacctctattgcttagaacctctaatccctttttactcacatgaccaagtctttcatgccaaatagtaaaatagttcttcatctctctagaagcaacataaattaagttgtttgaagtgttaccttttaggatgtagacaccattcattatggtgcctttcatgattattttctgaccctttttgaaccttgagaacaatattttccatcttgattgagcatccatctttgtctagcatggccactgaaatgaggttcttttttatttttggtacatgtctaacctgcaacaactcactatgagttcctcctgatgattgaagctttaatgatccaattcccacaatagcacatgatctattgtcacccgatgtcactattcctctatcaattttcttgtaatcaaaaaaatgaattatgtttgggcaaacatgaaatgagcaacctgaatcaataatctagtctcctcctaaatctccatttgtaacaaccatcacaccaacactttcatatctatcactgtcatcccaattaccaaccacatcaacactgccatgattcttgtgatgattgtacctttgatttaaattcaaattcttgagttcaggacaatctctcttgaagtgagttgtcttatgacaaatgtagcatttcttcttgtatttgccttttttgttttcctttcttttgattaccattatactggttatccctttgatcagttcttcctcgaacaattaacaacccttccccaggttgttcttccttcaactcaaaattttctcttcaattcttttgacataagagcactttgaacctcttcttatgtcaaagaatccttcccatacatcattgtgtctatgaagtgttcatagctttcaccgggaagtgagtcaaggacaataatggcttgatcttcatcttctatattgatatcgatgttttctaaatcaagaatgatttttttgaaatcatcgagatgatcttcaatgccttttccaggttgcatcttgaaagagtacaacttttgctttaagaacagacgatttgcaagagatttagtcatgtacagacctttaagctttgtcaaaagaccagcaacagttgtttcttttgaaacttccctcaagaccttgtcaccaagactcaagataatctcactgtgagccttctctagaatctcgatcttctctttctcagtcttgtccttgatcttttcagcactaagaagagcatattgaatcccctcctgcaccagtaaagctctcattttcaccctctaatagtccaaagtcgttcttccctgtaaatttctccaaatcaaacttagcacttcccataatttccctggatgttgttcacgctctatcacgcttggcttttcttaaatcaatcttaagaacccgtccatctcggataccaaactattaggaatgcagtctcgatcattagctatacaacatgagttcttggacagaactttgacacactagtaaaaccaaaaaatagagtatgagagaataaaaaatgtattcgaattgtattgatgaaattgtgttgaattacactatgtacatatgccttttataggactagattaacataactagaatagattaagagcctttatatattagttgaccttagtctgttacaaagtacactatgctaactaatcctaagacattagatagttaggaaactaactgtcaaccgtaaacaataactaacaactatatcacaatttttttaaattttttttagaaattcatgtattatgtagttgttaatatttttactaaaatgtccccttttctttatataaaatataaatatagattattatttttttaatattttacacacttttcttaatactaagattttgacaaaacaatatatatataaaaaattataactaattaagtaagattagattaaattataaaaatattttattcaaccttatatgatgggttcttttttgaaagaactaaaagttcatcaaaacaaagaacaaaggatgggaatcatagggaaaattccctccctttgatacaaaccaacacccgagctagacattctagctcttttagagagaccatctacaaaacagttcaaactacgactcataaaagaaaacttacacagattgaagttcttgactaagtctaaaatagataacgagacatgcatatagctctaatccggagggcaacattgatgatctaaattcctaactgaaatttgagaatccaaaaaaacatgaacatcattccaagaattttgtatagcccaagcaatggaaaaacgaatagagagaagctcggcctccagagcagatctcgacaaagataaatgagcgcaagaaccagcagaccaagacgcattcgtaagaaaaaccatacataaaagttaaaaaagtaattttattacaaataaaagtaaaaaatcaataaactttatttaaactatatagtataacatcaaaaatagttcctaaataatgtgagactacttttaaaacatgcatcgttaaacattctttacaaaatgagaaagcctcacaaatgagtaaaaataaaataaaaatcatataaaatgatttggtttatactttgatttatataaatatatagatttggtcgttaaactgtctatatgcgttacacgttactcttaggagttaggaaacgaaatacacaggccaaaaaaaatcatttaccccaaaaacaaacaagtcattttttctctcaatcaataactcacaccatatcttacaacaatatatatagatgatgaatgagatgtgaagttctctattttataattatcaattcattaattcattaattaaatgaataataattatgtcggtataataataagtagtctgagaataaaaaaatcagtaaagaataaaataaaaccacataagcactacttcaataaagggtttttatttttgctgaaaaataaaaaaggaatgctaaagggatgttcaaggttataaaccccttatggcgtctatttagaaataattgatgccataaattacgcgtgtctcttatgacgccagttatttcaaaataatcgaaaataaaaccatgtccacacttcttcttcctcccatttcagccatctccttcatttttcaaactagagaaaaccccgaaactctcgccaaccaccgcccctaacccccccccccccctcaatttcactattttcaaccatttttttttttttaaaaataaattctttcatttttcatacccaaaagcatatcctcagtgtaagatcgtatttttcttcgtttgtaatgtaaaccaagagaaaagttagtggttgtaactccgattgtcgtttttggtgttgaaaacgttgaatctcaaaggatattaaggtataaatctaatctctaataattaattttatttatatacattgttttattttgtaaatattttgaggatttttctatattattaagattttgttcatatgattgtgcatggtggttggattttggtcggcattggtggcggaatgcggtaataag

SEQ ID NO: 220190 - DNA, 2668 bp, Cannabis indica
tatttatgagagtatttattaaatagaatgttcttgtagttttttctctctttaactcttataaacccaaaattctcgacccccgttttagtgtgtttgggggatatttatagtgtttttctgaggtgatccctagaaccgaactattttactttctgtgtagtttcagtaggggcacatattcctagcagatacagaatgggaaatgcatgacctataccctaggaattttaggggttaggtggatataatcctttatccctctttgactgatgtgatccctcataaagtagctgtcactagccttattaatcatagcgtaatagctacagcagaggggttacgccgtcagacatattgcttatggcagtttcaatacgtcttctcccatgcggcattaaatgcgaggcggctgttcaaatggggtctggtatctcctggaggtgctttgccatagctctgtcctccaggagtatgtggagtcctcatatcttctccggaaggtattttcttgttgatactcttgatcaaaaaagacttagttaatatatctcatagtcatatttttcagatccacgcgtcgcagtcgcatggtcaaagtattttggcaaaattaagggcaacaatacccattctttaggcctaaacaaattagtgggtgagtccacgagcggagccgaaccactgctctaagttcaactataactctatctcgacaaagccagactttttggtcacgaaaggatgaccctggtttagagaagtgaagactcaaagaaacacgataggatatcctaaggagtaatcccggaagagtagtcgaagaggtgtttgggagtagtcctacatggcaccccctttgacaccaaatctcacggaatcaggggtttgtcccctatgtaagacctggcaattgtgcataaaaaaactacttttggcgaacatccactactctaacatttattgtacctgatcgacaatgcatggccacttgtcaacaaaaaattgtatggactgtacgaacaacaagaaaaacactttaatctcaccctattagtgggcttatttcacatgaaaaccctagcgagtccaggttcactcgagaacctgacttcagtctataagttgggcttgaactcttcatgcaaagggttacaaaattttagccacacactctggttagaaatttgacaagaaaaattgtgtaagatactccatatccatagagttcaatattaactcgtggactaaggctcattaacgtcccaactatgtaaaaaatctttgtctcttttacctttaattgttcttttagtttaatctatttcttaattaatttttaaaaatctcggtaaatattttgttgctttcaataaaagcttgaaggaattttttactattgttgtcttctacaaccatggtttcaactagatacttgaatggaaagccatctgctcaaaatgataatggaaaagatgttgttgatattctaaactagcctcccccagcagacatttaggtgggtgtcatgggagacggtgtaagacataaaaaagtggccagctacccaccttggaaaagctagcaataagaagaatatgttgatgaaatttccatcaatgaagataactaagaaggccaagacgaggattaaagagacgactatgacaaaagccttgacgaaaaatatgaagaatattatgagaaagacacaaaggcgttgagcttaaggtaagtagtcttagactaacagaggaaaatggtagagcaagaaaaagttgcacacaaaaacaagaaagcctcttacagatgcaaaacatggtagcaaaagggaacctcaacactaaaaacccaatagtgggaaagtttaaccatctcaggattgaaccctataatccaacaaatgacaagggaatgacaaaatggctgagccccaaaagaagagctattagctatggccagaggaaaatgctcctagggacaacaaagatacacaaaccaactattgtggaaagaaagggtcacccaagccctagggctaggccttcaaatttattcgtagagcagagtcaaggtcacctgatgaaaaagcaacagtgacttgatgtaaaaacaagggtcttgctaaagggatagaagataaagtctgaggttcaggccaagctgcatctcacagataacgatgtttaccctcagttatctcttgtaaaaatcacttatggcgactagcaacttcatccagattggtttttattgaatggtccctaattttggcatcatttatctcatgtttggattgaggtttcttgattttgggtttgaattgaagggctaattccttaggacattctatttctagaaaatctggagttgaattttcaaaattagactgggacatttttacaaaaaagaataattctaatttttagaagaaatttattcaaactagaagcctatgaatataataaattcctacgttttttctcttttaaacactaaaaattatccaaaaactaaataggagttacttaaaccaaacaaagtaagcaatgatgcaattaattataaaaataagagtaccaactggaaaaaagaaataccaaaaggaaaagtataaaccacttactgctaaaatgtggattttcgcacaagggagagttctgaaact

SEQ ID NO: 220191 - DNA, 3126 bp, Cannabis indica
cacttatcataatcatcatcatgcatcacatggagaatcttatgaaccaaaatgaaattagggaaagcaacaaaaaagcaagtgtagtgaaagtgaaagaagggaccaaaaagaaaagaattgcaccataatagggaccctcctcttataaagacaccccgcaaaaaaaagtggaaatgactcttattttgaatgtataattgggttactttgggacctttagccataggttatcataactaaagccatacctaacaaatcaactcattacaaatcctagcagcctcaagaaatttcctaacaaacatatacaaaaatgggcatcacatctgtgtttattctactaactttttttttagtattatttttaatttctttttcctaattcactaaagtgacaagtcatactaacactataggttgtctcccatcatggcaagtctttttcaaaccatattatattttaattaaagctctacatatatcgataccaagaacaataatagtgtggtctcttttttcacctaaacatttgaccatgattcattcacttctaacaaaccatgttaaaatatcttatgtctttgataaagaatcataaaactttgttttcaaacccccaaattagttttgatttcattgaactgaaaagcaaaaaagttccttaaatttaggaacactatccagagctagcaaggttgtccttggctcttgacatgtttaagttttgtggttgttaatgaacttgaactttatccatataatacaactaatggttttaagcaatttgatagtgaaagaatgaatccaaatagaataaaatcataaatacaaaaatatagactgaagaaacaaaacaaaacaaaaaattgtgagtactctcatcttcatattcaattaacctaatcacaatgagataataaaaacaaagtgggacaagaagctgaatgtgtatataatattcttctgaacaaataatatctagaatgaaatcaagccaatttaattatacatgatagattaaaaagggcatgaaacaagaacaaggtgaggactaattaaggagataagaataatacaaactcaaatgagtgttgtgttgtgttgttgtgtagccgtggcaaaaacccttttcttcactggtatctaccattaaaattgtatcagaaaccaagtggtctttgggagccttgaccattgttgtaaccatcataaggtttagtggaccttcttgacttttttctcaacacaacaatccaagtgattacctccaataacaaagcaattccacccaatacagcaatgcaaataatgtatgcagatttccacttctgagcaggacttagtatattaatacctttaaacacgtttaggataccaagaacaatgatggcatatccaagaccatgatggtatatgttccagtagaatcgatacttgtggtccttctttggtctaatgaacagagcaaaaatctacaaacaacaaaatataaccatatttaaaaaaaaaaacttgacacaattttcttgtgattttgaggttgaagaagaacaacgacaaatcagaaattcacatacacctacctaaaactcctattctgtttctgtttagtcatccagaaaaaaattgtagtctatcatgaaaaaattgtactaaaaagttctcctaaatgactatcaaaccggcattgaactatagaattaggctgagatttttacctgaagagttgcaaggctgaaaagggcaatcccaatattacgatggccagtatattcaatcccctttgactcacttccaagcttgatcccagtagcccaaccagctactccaatggcataagaagatgtttgacaaaaagcatggagataaaaccatgccggatccgcagactcaaaagttctaaggtacctggctatgataactccaagtgggaataatattccccagcttacagcgtttaaaatcccatgaatctaataacacaaaaaacaaataaaaatacaaactttatcaaaccctttagatttcaccctaattagaatcaatcacacaaaaagttaagaactttttaaagaaataaccccaaaaaaagaaactcacattcttcttcttcgtccttgaatctacagaggtggtggttgtactaatctgagacccattcaagcttaatttccctttagcgttgagattggcaccctgaaactcatgagcgtctggtctaccagaagccacggaaggacccacctgccatacgtgattcaccgaagaagctttctccggcaactttaccttcgcaaagatcctcataaccccaccggagtactcggctgaggtatcccaaacatcaaacgagagctttccttcaacaagagagctgtaagatttgatatcgtaagtcttaacaaccatggaaccgtccgattgtttgaaagcgattaaagattgggatccaaccatgcccgtacccgtcggattaatagcccacgaaatccaaccgtcggatttcgcaggaggagcaatgaaggcgatggagagtgaggaatttgaggaatcataggtccaatggaggtaagaaccgagagaaggaaggtctaaacattgagagtaaagcttgttgtttgtaaatttctgggttgtgcaggtgagggattgagcgggtgagattagcagaaccaaggtaacccacaatgaagattgaagaagaagaagaacaagagatgccattgctgagaaaacagaggaattttttattttcttcctctggttttggagcaacggccaaatattacagagaagaaataaaatggaagacaattggaaataaataaagagcgcttccccactaaatttggggatttatttatttatttagtaaatagagctgtctttttcgtatattaaaaaaggttttttaattaaaaggttggtaaagtaaaatatttttttaatttttttttcttgaatagtaaaaatgcaaattaatttggattataattttttttttttctggatcaaagacatacattaaggtaagtagtaggcgtgttgattcgtttttgacttgtgtataattttctttattttaatttgatatgtaaaaaattgtgttttgtttgtattaac

SEQ ID NO: 220192 - DNA, 2560 bp, Cannabis indica
ataatgggaataagagatatcaatctcaagagctacaaggaaataatcacagcaagttatccatggtgtaatccctcaacacacattaactcactaactcgagccaacataatcaacaatattgcttaatacaatttcccaatctcagctctctctctatcagatatctctctccatttctcactctaacttctctctctactgtattgtgtctctctacttgtcattcttcttgtgtttgacttgttctcttgttataaaatgagaggagtagtccactttatataggccaagggactcaatatagttgctgtcatatttgacagttgagttagttaaagactaaccaactaaccgaatcttagttgttagggatttaaggaataataccacaatagcttatgaatttgtttaacatgcacttgctagacaataaattttcttgaaaaaaattcctctcaacttggaagaaacctgtgataattaaacgtagaactatccattctagttctatatttgttctaataatatcccatatgtaactctataacttcaaggttaatacaatattgtattcttaacaaaataaaaactataaacatttttcacaaaataatataacacttttttaaaaaataccatatataattaattttgttaattttaataaatatgtcaataaaattgttgatcatattattatagatttctttcttaaaaaaaataaaaaagaattttcgattattttaatgatgtattaaggtaattttcaagattagtaatcctgaataaggtggaaacagtaaatatgcaatgggtttagtcactcttgtattcaaagtaataagaaggtgaaaatcattttgaaaattctattttttttttttttgttctttttttgctgatatgattaaatagtttatttttttttactgtgatcatcttatttgttatttgtgtgctttttgtatctcagggccatttttcaatacctaatcattaccttaataaccatttactcttctatgtagtcaaaattttcaattccctaaaagcagtgcaatattcatttattttattttttaaaatttaattaagtaaaaaaaatatatttagcactaaaaggattacattttagacacctgtatgaacaaatgagaacagtgcttaaattacattttcttttttggctttcaactttattttccttttcttggtttagatatataatttagaaatgttaaatggagaagtccaattaaatattagatcttacataatttaatttaatactattatatatcactaactatttataaggcgacacttttaagtagtgtcttaataaaaatagttatactaattttttcatctaagaaaattgtgtaaatattttgtataaaaatgtaatttatttttcatatagatgataccatgtaattacattttaaaattattagaatatctataaaatcaaatcacatactaataatataagggatatttaagtaagtattcaaaaaaaattgagtttataactagcataaagtaataaaaaagtttaattgtataagtactgtaatgctagtaaaatatatttttatttaatttcattaatacagattttgttagtgttttaaagatgatacatataagacctacattctaaattataaataagtttgaatatttacttatagtatcaattatctaaatcttctttcaacaaatttaagatattaacagtagtaatctgtattaacgaaattggataaaaattgtatttttttactaatattaagtatgaataatattattagacacatttagtgtttagaatttttttttatacgtgtcgttttgtaattaactagcaatattctttaaaaattataacattaaattatataaaacttaatatttaattagtctaacaataatattaacaaataagaaaatgttaaatactattgcgactttttcacaattcttataaattattaaatagttagctacaaatatccctatcaaagaaatagaataggaattttaattttttttttttgttaaataataggaattttaatttgaagtgttgttggtgtcctttttagtcttagctgttttgttcgttccacgtcattgtgggtaggacaaaacactttttgttcttttttgatctttattgcttttgctgacgctatcactctttctctggtccccacttatacatatgacaacaacaacaaaatcaaaccaaacacttcttggtgggaaagcttaattaactaaagtgatgtgttaaaatgtattaatagtaggggtgttcaataaaatttacaaaccgctcaacccgaataaaccgcccaaaccaaaccgaataaaccgacaaaaaatacaacccgaaataatataatgaaaatccaacccgcccaatgaatatattgggtggtttacaaattattctaaaccgcccaattaacccgaataaaccgaattaaaccgatttatatattttttaataaaagtgtatatcttatattatataaattacatttat

SEQ ID NO: 220193 - DNA, 2796 bp, Cannabis indica
catcaaacattttaaaactgacagtacttgagccttctatgttgcacgtattattgtttcccagaatgactttacctccattagaatctctgtaatcagttaaaatggtcatagagtttgtcatgtgaaatgtgcatcaagagtcaagtatccaatcatctttgaaagatgtggatgcaacatagacttcaccactgtcatagccatctgagaaattggcttcttgttgcttgtcattctgatatttgttttgatctgatttttctagaaacttgcccctttcttgtttttgtacttgttgtagaaatagcaatcccttttatagtggccagttttgccacaatagaaacaaccagtagtgtcaccagaatctcttgatggtgacctactcttccctttgtttgagcctctttgatgatttgagctattactccttcctctgttatgatagggtttcttgtgagatggccttcccctactcagattcatttcaccattcccagaactggtcttctcactcttcatctccaaatctttagattttagggcagatatgacttcatcaagagttatggaaatccttccatacttgatagcagtttttacttctctatatgattcaggcaatgaattcagaatgattattgcctgattctcatcacttagagccccattctctcctgaatttgccaattcaatgtgcatcctttgaaattcatctaagttttgatctagggtttttgtatgactcatctggaacccaaatattctctcctttaggtagatcttgttagttagagacttttgttgaaactgttcttcaagcttcttccaaatcttggcaggagtttcttctttatcaatcaatctgataattgcatcagaaagattgaaaattatgatcccagcagttgtttctaacagctcttcttgctgtatctttaaagtgttttctggccattcaatagggtcttcaagaatcctaagtagtttctgttgagccaataaggatcttatctttctcctccaaatcctataatcaccagatccatcaaaacgatcaatatcaacttggatattactcatattagtataatcaaaattaaaatgagttgagttttgaggaattgattgagtatcctctataggatcattcagtggaatttccacagcttttcgactatccacaacagcttgttgtgattcttcttcttccagtctttgtcacttttcttgattccttccttaagttgaataatgctcgaacaagagcttcgataccactgtaagtttttcctgagttcccaagaatgcccctacaccaactcaatatctgtttcaaacaattgggacaaaactgtccaagaaaagttaatatacaataaaatcaaacgaccaagaaaccttgttgtttatccctgaatgacaaattgtttaagtcaaaacgatttgtcctactccgtggaacaaaaccaaggcaagtgagttaaccctagctcagaacttgccaaagaaccttcgagagtttgaccaaactttttctctttctctctggttctcaaaccctagaactagatctccttctccatcaaaccagatcgatatccccagaatccttccccagaaattatcacaaacacatacacacacaaatcaaaagtaaaaacagtaaagagagattagaaaaacaaacacaaggggtatagaggttcgccctaaatccaggggtacgttctctttcgagctcgcctttaagaatgatctcagatctacactattgatgaagaatattacattatgtgagaaatccaagtcacaactcgactggtatttctgatatttctctcatttctttctttaagtttttttctttgattctcactaactttctcttctttgttttgcatgtacaactgaaaacaacaactttgagagctcctctctcaatcctgggtctgcggctttctggtatctctcaaaacataagagattggtgagactcttccctccttttatagcattaggtttagttgtaaattgtgtaacagaatttctgttgcaaaacagaaattcggttacacaaagttgttaatgttgttgtgtctggtgagtgggtaaggccacgagccttttacttgtagttttcatcttctttgtaacactgtaaaacaagttgtccaggggagatctaatttaacaatttccaccttagatttctcctgggaaacttgttcttatagtgcatcattcttcaagggtcttagctcaaagtggtaatgttcatccaccattaccaacccctaaagacttagcattcttaatatcattgacaagtgtaaggcaatcggactccactatgacatgatgccaacctttcctcttgatccaactcagagcttcctttagtcccaatgcttccaccattagaggaccccaagaacccgaacaacacatttgaactgccttcaacacaacaccagtgctatccctagccaccatcctgaaaccaaaacgactttcttctgagaaaatagcgccatcaacattaactttgatataaggtaactccggtttagtccaatgctcaacatatcgctcatgacccaagtcattaggagaagtagagagctttttttgagcatcactccaagagacaaagttaagaaaagctgttgacaccacctcctcaatcgaagagtgctttgagtcccaaactactttattgtatattgtttagtttgtataaaaccagttttattattttatgatatttgaacaataatttttattttattt

SEQ ID NO: 220194 - DNA, 1766 bp, Cannabis indica
tttcagtatggctaccctgccaactgatatttcatccttggttttggatgacttattttaatgaagttttatcttcttttcaaaaaaaaaaaaaagaattaccacgtcgcaatttacttaacaataacagtcaggtacctacataagtttcagaattataacttaggtattattactgccaaaaattaaacttgggtatttatttacaactgcgagttaaagttaggtatttatgccgcaaattactctttaaataaagggtaaatagcggcataagtacccaaagttttgagtttgtaagcagcataaacccaatgatttttttagtggcataagtaccaaatatttgtaaaattgtaatttttctctattttcgtcagtacaggctccggtttaaatttattaaaaaaattttggaagtaactgatactacatattttttgtccagaccaaataatctaaaatttaggtcttatatgtgtcaagtttaagacaatgtctgtactgataaaactaataaaaaattacagttttataaatattgaatacttatgtcattaaaaaaaattattaagtttatgcagcttaaaattttaggtacttataaatagagagaaatgtatatactaatgccgtttacggaatacactgttgtaagaagttgtcatatctaaagtagagaattattaattttttaaaaataaataaaaatcgccgttgccggggatcgaacccgggtcacccgcgtgacaggcgggaatacttaccactatactacaacgactcgttgattaactaaatcgttatattatatatattacaattaaaatctcaattcatagatttttttttttggtaaggatttcctagattaatatatgatatatataggaaatttagtatatatattacgttatagttttttttagtgacatttcaggatcaataaaaatggttcttttagtgattaaggaaatatagtacctttccgagttgagttgggagatttgatgtttttccttgccatcaaaacaatagaattttaattgattgactttggccttcttagacattttacggcgtttgtatttgggtttctgatgctgcggcttattgttcttactattgtcaagtcaacaagagaaaaccttacaatatcactcttgcagttgagttcaagagcgatatatagttgaactcatcatcatatatctaatactactactatctctgctatagggtacgtatgcatgatagtgggcaaaggtaaagcatgttttgaataaaccaggtattgttgttcttgttgttgttgtccatgatgatgaagatgaattgatgatgatgatgatgatgtattgttcggtttctcgctaatttggctttgatgaatggtgtcttttagtcatgacatccccttttactaaaaaaaggctgttattgaagcccctatttcaaaaaataaattggtgttaaagctatatatgataattttctattacctacgacgtccacggtccacagccaccatgtgggattccaccttgttctcggcaagaagattatgcccatatgtatattctcagacaaaattatgacgcaatttgaaaatatttaattctatttttttagataaaaacatctaaattatagattagttgtctactaattactttcttcatgttgaactctacccttatattgatatatagtttggagccaccgattatatatttataatattttgttgaaaaaaaaaatatatt

SEQ ID NO: 220195 - DNA, 2933 bp, Cannabis indica
gaacaattctgtggtggaaaaaaatttcaatctgtggggaaaatttattacattggggaaaagactttactggtaacttcaagcttcggattgctgaatgttaaaaggagataaggaagattaaaaaagccagtgatattggctcgatacaaaaaggcccaggagcaactccacaaaattttcactcaaaaagaagttttttggcatcaacggtctaaatagttatggttataagtagtagaccaaaatagtaagtttttccattcgaaagctacttctagacgcaaaaataatctgattcataaactgcaagatgcttatgggtgttgggtggattgggatactggactaccatcggtgattattgattatgttactaatcttttctcgtctagtgggtctatttcaaatgatattgtggaaggtgtgatgctattggtgtccttttagcagaatgaaaaccttctccgagatgttactaaagaggaagtccgcaaagctctcttccaaatgcacccggacaagtcgccaggccctgatggtatgacactgagattcttccaaaaatattggagtgtggtgggaagcgatgcggtaactcaagttcgagagtttcttaatactggtatgcttcctaatgctttgtgcaaaacaaatattgccattatccctaaaaagaaaaatcctacaaccatgggagatttgagacccatatctccttgcaatgtgcttttcaagatcattaccaaagttctagctaaccacttgaaactcatcctcccccaagtaaaatctgatacacagagtgcttttgtgccaggtaggttgatctccgataatatcatggtttcgtttcaagttatgcactacctcaaacgtaaaaggcagtggaaagaaggttatatcacagtgaagttagaccttagtaaggaatatgatcgaattgagtgggatttcttcaagccatgatgcttaaaatgggttttgaaaatcgttttgtcaatctggtgctggtcacagttacttctgttcaatatatggtggttaatagtggccgtgagatgggtcctattacaccggctcagggtcttcgccaaggagaccctttgtctccatatttgttccttctatgtgcggagggtctcacatcattgattaaaaaattcaaaagacaaagggatttacatggttgtaaagtcgctaatggcacacctattatttcacatgttatttgcggatgaaaattatctatactgtcgtggaaatgatcgatagactggtagtgtgatgcgtctgctaaacgtatttgagatggcttcaggacaaaaagtcaactatgctaagtcatatatctttttcagctccaatactcctgtggctactcgaaattaggctctgtggtgtgatgggcatgatggagtctgatgataactctagttatttggggctcccaagtactatggggagaaacaaggatgctattttggggtttttaaaagaaaaattgcagcagaaaattcagcgatgggagggggcgtttcttgtcaaaagcaggcaaagagatcctcttaaaaatggtggcccaagtcattccaagttatgcaatgtcggtatttctactgccttcaaaaacctgctggcatcttaagcaaatgatggccaaatactggtggcaatcgaattcaaagaagtctcgagggtttgttgggtcagttggtcacgtttgtgcaagcacaagagtgctggaggcttgggtttccgtagtcttcgtgattacaatctgtcagtattgggtaaataaggctgacgtttggtgaaaaatgaatactcacttgtcggtcgcctcttcaaagcaaggtactacccacgaggatcttttctgaatgctacgctgggtaataacccaagttatatatggaggagtatttttgagatgcaaactttgatcaaagagggagccgtgttcgtattggtaatggacaaaacactagtattttgggagctccatggctaccaaatgactctatctgtatgtaatatcatctctccctgggttgagtacttacacagttcaaaatttgatgaaagtgactcaaaaagagtgggatgaagagattattcgggatatgttcgacaatagggattaagatattattttaagcatatctttaagcaactcaattgaagaacatacatggtattagagaagagatactgctgttttttacactgtgaaaagtgcctaccagtacctccaagagttgaaaggggcgtggagcgtgggcatgggggatatggtgtgaaaaactctgtggaagattaaagccccaccgaaagtcctacaccttatgtggaaggcattaaccaactgtctacctactcatacccagctttattccaagcatatacctgtcgagttatctttccctttttaacatatagaagaagagacgattgttcatgtgttcctgcactgtcaattcagcaaatcttgctggaatcggtctggtttggctagtgtttctacacacagtagcaatttcttcttaaagtttaaaggtttggttgacaataatacaccagaacttatggaggaggctgttatgctttgtttgtcaatatggcaggccaaaaatggagttatttggaactaaaaaacttgttctacgaccgatgtaatgttcacaacgaggttaactttagctcaatggaaacacactcactcaagaaaatttgagccactgctggttccctcaggaacttatgacagtggcgagcgttggacaaaacctactacacatatgctaaagataaacgtcgatggagccatttttaaggctgctaataataaatatattttctttgaacatgttttgctggtgctacactgctactgctggcgaacattgttgggaattattttaccaggatct

SEQ ID NO: 220196 - DNA, 3725 bp, Cannabis indica
gaacaacaagagaagatgaattagtcagtagtcgccatccttgtttgcctaacatagacaaattaaaattctgcaagttacgaaaacccaaacctcctttatgcttatggagacatagcttgtcccaacttttccaatgaattccactaccatatgaagacttagaatgccaccagaatctctccataagtcaaccaatatctttgtaaatttcaagggagattaggaaaatactcatagtgtaagaaggtaaaggttggataactgatttcaataaaacctcctttcctgccctagaaagtaacttactatcccaattttgaatgtgtttcctaaccttctccttcaagaaaccaaatgccatagtcttatttccaccaattacactcggcagaccaagataaaaattgtggtcattagtagctctcatgtgaagagttgatagaatcgtatgatgaaccccatcatccgtgttagctaaaaaatatagaagacttattcaaattaaccttttgacccaaagccttttcaaacttattaagcaaccctagaacacgttgcgcctcctccctggtagcagtacagtacaagaagctatcatctgcgaacaacatatgagtgacaaaaggagccctacgaaccactcgacacccatgaatccatttcttctcttcgtaaagacgaattagagccaagaaacctttcgcacagataataaagagatatggtgaaattggatccccctggcagattcttttagaaggattaataggcccaagaacatctcttccatgaacaatgttataagtaatagtccgcagacattccattatcatccttacccagtcaatagagaaacccattcgaagcagaatagattgtaagaaagacccctccatcctatcatacgccttgctcatatccaatttgagagccatgcatccatttttaccttgttgtttatgtcttaaataatgaagaatttcaaaggaaacaagtacattgtcggtgataagccgtctcggaataaacgcactttgaaacttagaaattaccttggacaataaaccttttaagtttgttagccaacacttttgagatgaacttataaagcacattgcaaagagaaatgggccttaaatctcccatgacagaaggagatttcttcttcggaataagcacaagattagtagcattaagatctttaggcattacattatcccaaaagaagccttggacaagtctaaccacatcttgaccaacaatatgccaacacttctgatagaacgctggtgccataccattagggcccgaagacttatctaggtgcatttgaaatacaaccgaacgaacctcctcctccaaaaccggctgaagcagagcaacattatcctcatgaatcaagaatatcatcaccatgggacctcaaggaatggaaaatattagcaaaataattaatcattacctggggtaaaccagttttccacttaacccaatcgcccatctcattcttcaattggtgaataaaattatttcttctgcgagagctggccgcaacatgaaaatatttagtgtttcagtcaccctcctttaaccaaaattgcttcaactgttgtctctaaaaaatttctttttggtgataaatctcagcaagcaatcttttcgcctcatggtactgagaaaccgactcagtattagtacaacctttaagagcaccaaatcttcttttgcaactttgaatcctctccttaaaattaccagtcaaatcttttccccacaagctaagacgttcctaaagccactgacttatcaaaaatgttgctagacccacaaccttctcactgctcctgaataatagaaaaagaagactcttctcagagccaagcattctcaaaatgaaacaatttcaaatagcttgaatgaagccaaaatctggggtctaaaaataaaggacaatgatcagaggtggtgaaaacaagattaaccaatcgggaattcgggaataagttcatgacccaagctgagttggcaagagccctatccaaccgaacatcgatccaactatcagtgcccctacctttttcccaagtaaattggtgacccaaaagatccaaatctactaaatcacaatcagaaacaacttgctgaaatccctcaataagccaattaggatagggattttcacctcttttatccacctgactcataacattgttcaaatctccaataatgcaccaagggagagccgattcttcctatagcaatctcataagattccacgtgttccttctaagagcacgattaggttcaccatacataccggtgagcctccaatcttgtaagttgtcattatgaaccacctaatcaatgtgattttgggaaaagcctctaactttagcatcatttttatctttccataacatagctaaacttcatcccatgccctgcgcatcaacagaaaacattccctcataaccaagctgagtcgataacatctccagtcttggtttcaaacataaggtttcacatagaaaaataaaagtgggctttgtttgataaaccatatctttaaagaattgaaaactccctgggttcccaagcccgtggcaattctaacttaaaatactcatgatgattggcgagcccgatcggtcgagcccgcaattaaaacattttttgagtgagcacttttatcattacccatatccacatccaagttttccttaggcccaccaggcccaataacaacttctttacctgtccttttacgcttagaatccaagaaaaccattccctcctcatccatatttgaattagatgacacatggatatcccccaaacttcctaaattatcttcccattactcccaccaatatctacattttgattcctcagatttcccctagtaacttccacttagaaccatgaatcactcctagacccatgaaactcgggatagagcctccatgaaatccttgaacatcagggacatcagtcctcccatcactcctgagattagcccccaccgaaccaccgtaacttttagaattagacaaacccgatcataaccacttcacacccatagcgtactgcgttcttctgggcaccgccttcatgaacgtgccgtaggtttaacaatggtggaaattggttgataaacaaacgagaacaatattgatttgtatggcctataatcccacaaataaacaaaatgtaggcacaaactcgtacctaaaattgatccaaaaccagtctcctctgatttgctgcaacttcattctctatttcaaaagtttctcaatatcaatctgaacccttacccgtaagtaatccctccacaccccattaaaattattctcatcaaacttaacaaagctcccaatgtaattcccaacatccttcaccattctttcagtcttaacacccgaacgtatatcatgcaattgcacctagatttcaagaaatctcacagcccttggaacatatcctggcttcagtctctcgaatatcagaggagcatctttgaatgtccaaggacttctgtcgattactctctgaacatcaatctcatgatagaattggaagatatatttatttcccccaaatccttcacatacattcccattcctggttcccagagcactaccatcagattctgcatagccatgaagtctataggaatgtcttcgaaaattgcccaacagtactccaccttgtatcaatct

SEQ ID NO: 220197 - DNA, 1116 bp, Cannabis indica
gaacataaattgaacccatgctaattatagaataactcacttaataatttataaggaggtaatggcaagagcactgatattgctaagataaataagactatctaaattgttagtaatggtatgttgatgtggagaatacttttaaatttcaaatggatggagaatcttgtatatggagtatccatagaaattatgggaaaggtaaggcttatctggaaaatagaagagcacataacttgtgaataaaggaaatatactcaagtgattgagatgtatattaatgagattgacagagtactagttattaataataacacttggagagatttttggaggtttctactctgtatttagtgatgtaggggttataaccccgattattgaaaggagaaatttagatgaccttctagatgtgggtctcagttagaagtattagagtattgaagttttcgttggaacaaaaataagactgataagcttaccaagagatttgaacatggaagatactttcctagaaaggaaggttgagtttaaatttatttcatggtaggatattagaccatatgttatattgttaagagaatgaggtacgttattatctgtaaaagaattgattatctccttcacgtgaggtaaatttttctagtgaatgtagagaataaaatgtatatatatgggttgcttttcggacgaccaaaaatgttgggttacttaattaagtaacattgagagtgatagagttattactctatgaaactattgtgaaattaacatgatattcttattaggcaacaaaagggtaattggtcattttatcaagtgataagtgaacattggttatcttattagataatggagttgattgttttaataaccaataacttgtataagtgaatataatatgagtttgatagtagatagttaagtataaaagtattattgattgcaaaatagtgatggtaaggtataaactgaaaaggtgaaactctagtgataatgatggtaaaagaatacaagagtcctagatttcgataaataagcatttgtcaacgggggactcaccataagttagtatgataattcatgttgggttttgtgccctaaataaaacccatt

SEQ ID NO: 220198 - DNA, 1038 bp, Cannabis indica
ataaaacattgatcatgatttgcacatttaccgtaaaaattaatgtcaatatttaattgatattttggtagtagaattacaaaaaattcaaaatgcgcatttggtattaaataattatgagattgaaattgttcattgaatgtgttatacttacttgtcgtaagctttcacatgtcaattagcgaaattgtgattcatgtgaatactttttccccgcatcaatcacaatttctactaagattcatacatgaaatttagttatgtcgatgatttattgttaggtaggatgtttagatggtgaaaaaaaaacacattagttatcatgaaccacacaatcttttctaccctatcggtaatggattaactgtatttttggttatgatatttgaaatagttgttcttacctgcgtaagagtcataagttttgtttgaacgactctagcatgacatgatcgtttccattgatagatcattgagaaagctaagaaaacgagcagattgtgtaatctttgttttcacatagtggcattgctctaagatattttcttttagctttaagcaatcttaaaacttctaccgcttagttatcgaatgggactataatatgttttgtcatatcgatctcttattagaaaattggaccaggccttgaaattgatcaatcttgaaatcacatttgaatttaaagatgccaagttattgcatgcttagtaggagtattgtgatgggtgtcagttgaatttagtaaggtatatatgtgtcgatcgatccttattgaaaaaaaaaattaggatggaatcgcttaggatggaatcgccaatggtggcttgcattttcgttagtttgagcaagttgttgacatgggtcttaactctttgggtactcaattttagcacgcgacccacttgtcaaagtctctaatgtaggccattcaagatgtctttgaaaaaccgaatttttgcaaatgccaataattattacagaaatatactaaatataaaattgtatacgtctgcagcagcaggatgtaattctgtt

SEQ ID NO: 220199 - DNA, 6781 bp, Cannabis indica
atggaaaaactgtcaagcaacaaacaaaaggagttaaccaagtaatcaagaatctacacaatcatgtctggctggccaaggggaatacagtaggccggctagaggaagcttatatggccagccagggtttgagtacaagctagccggccaaaaggtgactgtcagataaaaagggcttgttcgaccaaagaagcctaacctttgcaaggaaagtgtacaaagaatctacttaggctagccaacacatgctaaggttggccaacacatgctaaggctagccaacacatgctaaggctggccaacacatgctgagtcttgcaaacacatgctaagaaaggagttaagcaagtcgccaagaagctgcacaaccatgtctggccggccataggaatcttatatggccaaccagggtttaagcataagctggccagcgaaaaggtgactgttagaccaaaaaggacttgttcgaccaaggaagcctgacctttgcaagcaaagctatacaaagaacctgctaaggctggccaacacatgctaaggctggccaacacatattagggttgtccagcacgtaccaaggctggccagcaagtaccaaagtttgcagggacatgggaaagcttacagacacatgggaaaacttacatgcatatggaaaatctggcaggcacatgggaaagttggcaagcacatggaaagactggtaggcacatcccagagttacaggagcaatacctggccggctaggcgctgaaaaataaggataggatgaccaactcctcttctggcagaaacttttagtgtctttgtagctttcaacttggatgtacactctcagctacaaattggcttcaacaacccatgaaaatagtgttttaactttgtatatttacctattctttaggaacaattagtaggttattttcttatatatttaatatgtaacaaataggtgatatctcctcattttaaggaagattaacctactttgaactagatctgttgtaagccctgcacgatataaagggcattacgtctcactcaaaacctaagttaggaaaagtcattccatatgctgcaaaggctttcttaagcctcatacacgtgctcctctttctccctctctcaagtctcatatctcatctatcccccttagacactaagtcatttcttcttcagtctttcataagaaatcataagttcttgatctacttaagcattgtactcactattgtaatattcaaagagggctatagctagaatcataaggttctcacctatgatttgcatggtattatctctagaattaatacaattaaaaggagagtacgtcattaacaactaaataaggggggaaaaccattataaatatatgtgtctcttttatcaattattattcttgtttacacgtggtgattgcctatcataaatacagctccgctgctggttggccaaattctgagccaacaatttggtgcttccattgagagcttttgtaatgccctaatacttaggcacgctacagtaatttttcaactatagcgccatctttgctaatcaaagaaattttcttaaagattgtgtcaaattaaaacttttagtttaattactaaactttataaaacttttatacatttatttataaaagtcgggatcccatatttaaacttttacaaaatattcaaaatgtatttagtcgggtcacacaacaactacaaaataaaaccctagatgtcccaagactgaatactccaggtcaagccgctatgacatgtaaaacatcaccctagcttgaagctcactcctgtttagccttcacctttcctttacctacacatgaaagtagaactgtgagtcgatagattcagtaagaaaagtatataacaaatcatataataccgacttgtatctaagtgcacatacacctatttacaaggtttaacaaataagtaagaacgttctttactagggtacagccactgtaccacatacactacgtacgacactgcacgagggttggtagggtttgtttcttaccctgagtaccactaagtgatataccacatacaccctgtactttcccgtacttgtactggtgtcaccgtaatgtactcttaaatactatacattataccaatgcactctgtaccacttctgtacaagggtcttggccggccagcactatgctaggtagggcatggccactcattatcccatgattggttggtacagtcagtgtgttgataggggtagatcgcaccatttactagagttaggtggatctagaaatctgaagtgactagactcacttctcaagttgttgttttaaatgtttccaaatgatcccagacctagccagttgaagattagcctttgggttactttctccccaaggccccaggacgggtgttcaccctggtggctagccaggggtgtaccattaaggggctggcactagacctttatggcaaggtttgtccacatttgagtagggcaaggtctgtcctggttcctgaggaacctggttggacagtctgttagtagactccccccagtctatcgactagtctcccttggagggggtctctaatgagatcctgacctctgcaagcagttctctcattgatcctctttatcagtttggtagcttatctatgacgccggtctagctctgcctagtgagatcagaggatgtactcttgctcatccatccatctaagacatttgtgtctctattctgcgaatacattgcaaccaacatcgcgtggttcttcagtttggttgacttgacagaggacttatctaagtctggctaactcgagatcttctcccaagtctacatggggcttgccaattcttggccctatctctttagcataataccaaggactaggtccagttgtggtgcctgggggctgctccatgtgggtccttccttcaatgggaggctccagtggagggtcctccttaggaggcataggttcattgttcagatccagaatggtggtgtcgaccttgccagctatggtggctagattcgtggtgcctgttgaggcgacagaagtggtcacatctgttgcgctcgtggagattctagttgtgactagagcatgaacatcgggatctatggtcatagggtcttaaggaacacctgataaggcagatgccgtagctaaagttcaccttgtgttaaccatgacgttttattagataaattaacaacccgctctcaattaaagcactaaactattgacctcaaatttggccaaccagtagtagagttgaatttaatattgatgcttgccacgtgttacacaattagagtataaaagtaaatagacacatgattttatagaggttcgacctccttagtagcaggtaatgacctactctccttttagttgtattgatactagagataataccacttagattactataataatgggatttgaagtggctctcttaagattacaatgtgaaaatggaaaatctaaagtgagaatagaggacagacttgtgagagagtgagaagagatgaggtatcagacttagagtttaaggcttaggatttagagttagggtcttagggcttgactaatatagaaattcttacaaccctaatatcccttataaataggtaaataaagttattatatacataataaattaataaaatacaaataactaaattgctcttcaaaatagggaggttgttgatatttttctcaattttcttgggttgtttaggcacaattagtggtttgactttctatccatggatgaaagctgcacaccaaaacctgccaggccaaaagctggccgaccatgtacctgtagggtgcaaactggctagccatatgatgtctagaagttgggcagactatattggacataaggtcagcaaggggtgcccggttcttcatttttcgtccttcctaagtacttggacctctcgttgattgaagtgttgagtagatagcttggccttcttattggcaagatgtactcccacatggaattgatacttaccacgtggacataccacgtcaggtgaaaaaaaattgggataatatatatatactactaacatctcagatgagatgtaccaaggtatatgtaagtactctagctatatattattttccctatattcaagtaatatagctagcagtccaatggaacatggatatgatcttttctttctagcctatatcacttcaccatgtaatgcccgtgcaaatttgacgaaacaaaaatacataaagtgtttttcaacaagaagaatattaaacatcaatgatatcattttgactttgaaccccacatggtcccccaatgacagcgccaggctactgtggggcacccaggtcaacataagttggtcaaaagcattttggtacacttttttgaggattaagtctcccagcattttttctatttttgttagtggtgaaaatacaagtgcttttgggaacaaaactaaggggggcagatgaaaagtttggtgcccgacacactaggagacggtgccctaggcgccaaggttgacatgttccacgcaaacttcttgttttgttaatctgattgtgattctgtttcaagcattcttctttgttttgttccctaaacgatatttaaggctttgaataattagaataaaatatcactaaagtggtgttttagcccctaggtaccaccatgcaccacgctgggtgcccaggttgacaggtggcatggggattagtgttttctccatcaaatggcagtgtcatcctgggcatcagtcttattttgtcgccaaaataagatttggatgcttccgcaagttaatatctcatgtacacgtgtcatgcacaagtctaacaacacccagacgcactagtgatcacccggtcatcacctagtcgtccccaatgatcactcgggcacctctcgtgcgcatcgagtaaaattgccaagagatggtgaacaagttcaacgaagtcaaagaatggagtaaggaaagctttcatatcatccatgcatttcaaaatatgcctaaggcccgagaaaccaagttttgggcattgacattttatgtcaacctggtcgcctaaaagtcgatctggtcatccattcagggtttgttaatttttcagaactgcgcatcgcatagtattttggcaataacttacttaatttttatctaaatgacaattccagtggcatttgaattattttttcaagacgtatctaagctttacgtcctttccacgattttgactttttgggtgccaaaatgggttttcaagtgaatccaaagaattttcctctgaatttcatgcgaattttctattattttgctgtaaaaaaattcgacctcattaaaaaaaaaggaataatagattttctctgggtttttgctctcgcagctgtgaagctggagctatggcaaaaacgagatcaaaggttcaggggaagtcaagatcaagatcgattagcaataaagggaagaagaaggatgtgcgagcagagagcgatgctgttcgagatggtacgaggttagggatggatgaaatccatgaactggcaatctcggaggaagaggagatcgatattgattcagcaatgatcgatgtgttttaggcgccactgtctcctagagcatctctgaagttgattcagaggcaagaagatatcagaaatgactttgtgcactttctcaaagtgaacgagcaatgtaacagtgacatccaacaaggtaaaaccccaatacctcctgttctgcattctggttttgttgtgcgaaatttagaaaactctttcaagggagaagaacagaaacctaacgtgaaaataaacttagaggatattgaggatgaagtgatgttttggatgccatccattgtctgctatgttctgggatcaaaccctccattgcagataattgaaggttttgccaagcggatttggggagataaagttgatagggtgaagctactatcatttggcatatacatcattagatttaatagtctgaaattcagggatcaagtacttaatgggggattcattttcttcaataggagacccgttattatgaaaccgtggaattctaatgacactttcaagaaagaagatgtgaaaaatgttccaatatggattcaattggaagtgctagagctaaaatactggggagagaagtctttgtttaagattgtaggccaaatggggaaaccgattatgattgatgctattactagagagagggagcgattgagttatcctagaattctaattgaagtgagtatggatcaaacactccctgagatgttagaatttgaggatgaacatggatggaatacctctattggagtgaaatatgaatggaaaccttccatttgcacacactgttcggggctgggacatgtagcagcagagtatagaaagagtactgggggaaaaaagaatggattgtaaaggctgatcatagaaagaaaactcaggtggatgaggacggttttactaaggtcacagggtccaaaaagattgagaaagcagaggggaaaaagcctgaaactcgagtcaacaattcttttcaagccctggatacagagcagagtatagaggaggttgaggaaatcaacattgacaatatggaagaagggggagaaccctctttgataaatggataagatgatatgttggaatgtccagggagctaataattagcaaaaacaacacttaataaagcaatttattaatgtgcaaagagctgattttgttgggctcctcgaga

SEQ ID NO: 220200 - DNA, 2313 bp, Cannabis indica
tttttttttttaatttgaaagaaaaaatcgtaatttcttttgtgatgcatttttctttttccttttttagacaataagagtggaaacagaaaaatcccttaagaaaatttaattacaatatgacaaatagaaagaagacccatttgccacaagacctagttcactcagatgactcaccagcaattccagacttgttgattttggtcaatggcctaggctattattagtataacatcactcttgatagaattattaactgccgtatttgggtataaaaaatatcagcagtacgtaaataatcgatccttcttgaacaataagattatgttggttactgaattgccttagttctcttaaataaagttttttttttctcatcctcaaaatatagtaaaaaaagtgataatgatgtacttttgaactcagatatttcatcagtggaacatatcttgccatagaatagcacattaattttcgttggaagtcttggtcagtaacaataaaaagtttcaaagattgagaaaggaaggtttgaattggactgagttcttctagcaatgcaagccaaggaggatgtggaaaacaacataaaatctaatgtgtataaaaaattgcaaatccaagtaaaaaaataaatgcaaatctgatataaaaaataaattcaaatccaaaaaaagaagtggagatggacatggttgtgaacttgtgaaggggtgagtaaaggaacgtatttcatctaaatctttgaatttttcctaaaacttgtcctataaaatttatcagtgttcattagcttacaaaattacattaatttaacagtataattttcaaagaccatattggaaaaattattaactcgccagtcttatttaacatgcgtttaagcaaaaaacctttttgcataaaacatttataagtattaacaaagaaaacaattatgtatgaattctaatatttgcaaatattcttgcgaaatagcgtatatgagaatgaattataattgaatatgaataaataaccatattgttaggagtaataaatataaattaatatgtgtatctatctaaacatatttaccatcgtacccctaactaccctctcctagaatcagacgaaaatgagggcaaaaccggaaacaacaaggttcattataaagaggatccaaggagaaggagatgaaaaccagaggtacaatagtttaagaatgaggttttgctctcacggagatggaggcagccgggtcgggtcgggtcgttttgtctaataggaaagaatggccactcagtctctgctgcttgcctctctctgatcgcatgcggagccgatgatttcccctacctctctctctcaaaataaaaaaaaaaaaaaatcataaaataccacaattaaatacaattaatgataataatatataatcagaaatatttgcagcccagatgggtaattcagatctgatcatgtaactttattaatataatgcatttaaggtcaactgtgtaaatttctcctttagtactgtttttactaaattctttttggtcattttcataggcctgccccccatcccccactcattattatagcattttaaaatctatagtagcttctagtattgtctcctcctcgtataatgcgaagaaaattaacaacttcgttttctattttccctcctgctatacctgtattgtaccttaacaatttattacacatgactatcgtttgtgattaaattatagtgtctagatactattgatataatattattatttatttaatttaatgttaagtctcacagcttattttattttaataaaaattataagaaattattaattatagtgcaatgccatgtgatcactaaaatttgtatagttgttaaagagtattgttattggacatcagtggtgcttaacacttttttagtgtgtcgctttataattggctagcgatactccttaaaaattattatattaaactttatgggatccgatactgaattagaacaataacgatattgacacgtataggatggtgctaggtaccactagtacttttttagcattcctcgttgttaaatacaattatactaactatgactctctccaataggagatgtaaaaattgtgctttatttggcacaaaaagtagttttatgctaaatttacatcaaattttagaatcgcaaaattttgatataaaatttaatatctaattaatattttattaaaaattaaaaactaataatttataatcaattttattattattttaatatgtaagacaataaaaaaataatataaatatttcataatt

SEQ ID NO: 220201 - DNA, 3518 bp, Cannabis indica
tatatttatcatacatatacaatgatatttatactacttatttattaccaacaaaatgttagaatatggcagattatagtgtggggttgtagggctcttgactcaatcatatcaagcacacaagaacaaattgacaccccaactacaaatgctaacaattcataccatgattctccctatgaatggcgattaaacatgaaaaatggtcgaattaaagagaaaaggctcactcttgactctgaattttccatggattatcccgccatcaatgaaaattacattggtctcaaaaataaattcggatatgcccaagtggtcgatccaatatccgctactacctcaagtatgtttatcaaactcgtattctaacctaattttgataatttaattcttgtctaattaatcaataaacaaaatttatgttattgcagataacttgctcaaatattgtggtattgcaaaattacattttgaagagctagaaactagaatttgttcggtacaacaattaatttaattattctgaattattaatttgtattaaacttaattttctaattattatatatatatttttttaactagacaagtggtgaatctaaagaaatggtaaaaatagaataccatatgtttgagaagaacacattttgtagtggagctacttttgtttctaatgataaaaaggaatgtgttgatgaagatgatggttggattatcacatttgttcacaatgaagataccaacatttctcaggtatattcatcaattaattaattcctttatttatttatttaaaagttgtttaattttaaatctatgtattattctaagttcataaataataattttttatatttttatttttttttaattttttattttcaggtacttctgattgactcaaagaatttttctagtgagccagtagccaaaattactttgccttacagagttccctatggctttcatggaacttttgtatcaatgtagtataatttatatatgaaaaatgattatacacactttatacacataataatgtgtaattaatcataactgtataattaaaaagtgatatagtctcacttaaaaatataaataactaatatcattacacatcatatgtaataagtgtgtacattttgaatatatatctaacattaatttttatatattaaactttttattttttgttatatatattcgttattttttttttaaagaacatcttgttgattaactaagaaaaatagatgggatcacaaggggtaatctagttggttagaaactctagcacacttagctacatcatcggcaaaagaattttagcaacgcttgataaaagttagttaattatcaaagttaattttacttagtatttaattattatttttatataattatttcaaaaatctacatattttgtacggaaaatatccttttaaattttgtattttacaaaatttagagatgaaattttatataataaataataattcggaccttttacgttccaaagtaatatagggtctaattttttattcaataaaaaaaaaaaaaaaatcatcaataactttagcaaaatacaaattttcaaaattcagtttaaatgatataaactaaaaataatttcatttttatcatgatatcgaattatttagacagctgataaacatatatgtaagagtttatacattattgttttttattaatagaatattataaagcaatatacatatgttgccctacataattaattactctacaacaaatgtaactacaaatattaattcctaactaacatcatcgtcacatagctacacatacatttacatacttaccaaatttattaaatcaaaaaccaaccaaataataattcataaataaaactacacccaactaatgttatcataaataaataaataaactactcatcaaaatcaacaactatacttattattatcattacttcatacatattatataaacccaacttgttatttatcattttcttcctcatgccaccatggaattctacaaccaaaattcagatgatatccttagcaccatatacgaagagagaagttacacaaattcaattgaaaccccaagaagtatcaatctcaatcaacaacaacaacatcatcatcataatcataatcataatcaatactatgatgaaatatatgatgacgaattataccacaatgataatgatgatgatgatccttattattttagcccattagcttcttcaagcccaaaccaggcccataatcaggcccggcccagtttaatcccaccaccgagtccagaatcgccatggacttgctcaccactccaaacaccttctccttctctcctttaccactgcattgcctcacttcaccgccacgacgggactatatactcggtcgcggtatcaaacggcgtcgtttttacaggctcagacagtacgagaatccgcgcgtggagaccaccggactgtgtggagcgtgggcttttgaaatccacctcgggtgaagtgagagctattttagcctacggtgatatgctttttactctcataaggatctcaaaataaggacgtggaatttcgctgtcgtttcgagtaattttcttttcaagaaattgtcgtctataccgcgaaaacgacggagttcgctgtcgtttcagttattttcatcgaaaccgaaattattaaccgaacgacataaagattgcgtttcgtgtttggcttattatcacgcggagggaatcctctacacagggtcacacgataggacagtgaaggcttggcgagtttcaactcggaaatgtgttgactcgttcgtagctcacgaagataacgttaatggaattttggttaatcaagaagacggttgtgtattcacttgttcatccgatggatctgtaaagatctggagaagaatctacagagaaaactctcatactctcactatgattctccgattccaaccttctccggtcaacgccatagctctgagctcatcgtcttcttcgggatcggacggtggtggtggaacggggtttctgtattccggatctagcgacgggaccataaatttctgggagaaagaaagaatgtcgtatagattcaaccacggagggtttttgcagggtcatcggttcgcggttctgtgcgttgtggcggtggagaagatggtgttcagcggatcggaggatacgacgattcggatctggcgaagagaggaagggaactgtttgcacgagtgtttggcggtgttggacggtcatcgtggaccggtgaggtgtttggcggcgtgtttggagagagaaaatcttgttatgggtttgttcttgatttacagtgcgagtttggatcggactttcaaggtttggagagtaaagattttgccggaggaggaaccggagccggagacggaaccggagaataggagtgtttactgtggtggtggtggtgggtccgagtttagtagtgagttggatcggaacgattcgaggagtagtaataa

SEQ ID NO: 220202 - DNA, 1673 bp, Cannabis indica
atatatatatatatatttcgagttgtctcttcaattaatatttgacctataataatattataaaagatggttccaggaagattaatcaaatgaattagctgtctaaaaaatttgccacaatttttttcttcataacaatttttgggcccactaatcactattcactactctatacctaataattacgtcgttaactattgactaattccaaatatatatagtaaatctgtgatcgaagtatctatatatatatatatacatatccaaatctatatgattcatatatacatatgaacctttgaaaatgaggaaatagttaaagaataaaaattctaatttgtattgaaaagtataattaaaaagaagtgttttgacttatatatgattcatgaagagagaaaaatgactagacttgaatatatatgctcgatctgcatggcccatatatatataatatatatttattacaacaatacaaacacacaaaattgttatactttgatttggtcaaggtaaaccatattgatcaaaactcataaacaaataaacataatatttaataatatatatactaatagatatacttgttataatcaatttacgtatacctatcatatatatatatatatattatgatcaccccagcaaccgcagccaatatatatatatatataataattattcatatataataataacttatatattataagtctatattctctgcatgcaatatcaaaccaaaacataccttttttctttcatctcatataagtataattctctctctctcccaaaaatataactgaaaagatccaaacaaaaaagatgatcagaaaaaatgacatctcaaggattatggtttttgtttttgtgttgtttttgattctttgttattgtccaaataaattattggcccagaaaagtagtaaaatagaagtaaaagttggggtgattcagaatttggggactgattttgggaaatttagtttgagttgtataaatatggctctaaaagatttttataactctaatcctagttataaaactaggcttattcttcatactagagactccaaatctgacgttgttgaagctgctgcttcaggtacgtaaattgaattaatactaatttctttctcttttttttttttttctcattcatatacactcatagatataaatagtgtacgttattgccagggccgccctgaaatgtagtgggctatagacaaaaaaaattatttttgggctcttatttagaaaaaaaaatgatatttttcaaaatcagcacaaaaagttgtgtataaaaggagaattttttttttggttccctaggcacaggtctagcctgcctatgcccaagtccaaccctggttattgctattcatttttagaatcccgagtagttagtgttgaatccacgtgacggatgcagattagtcagcatccgtcacgtgaattaagctactcagctccttaaattataacgttttatgatcatatatacatatgaaaatatatttattttttcttatatttgtatgtatatatacatttccttctggtatatgtttatttgatacttttaatatggaataattaaattaagtagattgaataatgtaattattaaattttttgaaaaaaaaaaacagaaaaaaagtgggggt

SEQ ID NO: 220203 - DNA, 3802 bp, Cannabis indica
aaaataatttccaacattagcttgtgctctcgtaattttgtagtagtacacaacaaatgctagtcgtgatcttgcataggaaggccgcttaagacttcagcaatttctaaatggcttgggtccaatacagatcaagctggtctatctgcaaacaaggaaaataaaattagcgtctataatgtaatgaaaataaatactagaacgtacgaggtcgccgattgaagtcaatcctgacccctaacatcttaaacgcatagaaccattttgatttccaatctcccttattggaaattgtgccttctaccccatttatttcagacttggcccatactaaagcaatagaagccattgtcatggccaacgctctttatgtcatagaagaagccaaaatctttgattgttggctctcctcgcatatactccatatacatcgcataaaatcctaggattatgcagtagttgtttggggtaagctggaaaggagagacatcataatgagaaagaatgtccttcacgaaaggatgaaagagaagcgtcaccccgcatcgaagaatagaagttgaaacaaccacgttctatgttggaatgatcataggatttgtaaaggggaggtgagatcgctatgttggcaaaggtttggaggtagctgtgtgaatcagattcaactttgcaaatgttgacaaatcagatttcttgactcgcgaaactagatcctcgtaggagaaaggctcatttaactgggcgttttcaactgaatctgtctcgcttccttcaccttttgttttgtcctccatctcacaatctggtaatttgaagtcctcacccatttctttgacttctgtatctagggccattcgtgtatgaacaagatagccttgggctgacaccgtagactcgctatcacacacttctaaggtcactgattctgctaattcctgaaccatcttgtctatctcattcgtatagaacgagccctcacgagctctggctacaggagcttcatcctcggacatcgaggttgggatgaagctatcgctcttttttgattcatctgcgaaggctccttctccagagtcatacctttgactatctgacaagtcactcatctgaaagatagaagatctttttagtgtggtgcgagtgcaattttgacaaattaagtgccctcacatgcgttataaacatcaaagcaaaaaaactcacagaactggccatgtatctctagaaatggctgggtgtttctcagtgtcataagggtcatgttgctacatgaacattaagtcacggagaaacacccatcatttcaagaatctagtaagttccaacaatgaataaaatgcaagaaaaatgaaaactaaccgcatgtctcaagaaatggtcgggcatatcataatatcccaaggggcatgcgacgattggaagaacattaagttaatatgacacccccaccatttcgagaacccagatagttttcatagtaaaaatgcatataacccaaaagctaaaataggcctaagagttaaaaatactaggaaacggggtcaaaaagtttagctattggttagacaaagttattctagagcatacgaatatacgaagtgttcttccaggaactagcgagtattcaagatgctcttcttaaaactcgtaaatattcgaggtgttcttcctaaaacttgcgagtattcaagttttaggcacgtattttccagaaaaataccacattttgcctaaactgcaaaatttaggttttatcatttcatatattttctattcctaaaagcaaaacatgcctacaagtacccaaagaagagacagcgatgataggaaaagtaaattactaacctcgaaatactaatttccttgggtaagcttgcaagagatggaatctcaggaagcaactttcgtaggaagaaattcgaaaggatgcaaaagaatttttggaagatttgaattcctaaggaagagaagaaaataatgaaaataggagggaaatgaatgggaacaattttgtatctagaggtttaaatattggtatccctcatttatagggatggagacacgtgacaaaggaatacctaaggtctctcaatctaacagttacctgtgaatatgcctgcacgtaccccgaagggtttttggtgacgttgcacctcaaagggataaaataataattatagccgtcttttcaaaaccctcaacaagacaaccaagagtcaccatctcgtgacaactactcacctacctctctctcatagtttccctcatgacatggttgttaatcgcgaaactagggacatgtgttatagtgtgaatttttcacctagaaactcgagatcaggctcccataaggatgacacgtggactcacatccctcgaggattgttgaggtgtcaggacctctcaagaataaacctcgcttgaaccagactcagtgagatgatgtgaccttgataaagtctagtcgtattattaccccttgcgtaatgtaggaccaaggaggaattatacaagtctcgcatataccgagatatatgctataactatgaagacttctcctgcagtttagtaaagatcgtttctttacatagcgagttcgttcgaatgacctaacatgtttgatgacccgacaatgactcgcatgccctaggttgtcgacgctgacaaggtatctgtatatgcgactcaattaggaagcagatacctaagcgcaagacccattggcctcgttttaacagaacccaccctaagcctgcaagcttgtgcgagtatatgaacagacaacttgcactataaaaattgcatacgttgctctatttagtaaaacagatttaaactgtttttcatttattccatttacgtttttcttaatttaatgctaatattcaatgtaaaacagttcaataattaagttctgtgtaatcaaagggacactttctttgtatataaaagagtgatccaatatgaatagaacaagctagaaaatccttacaatagtggactaagcaaaccgtgatctgaatgaactactataactcttcgcgttcattattttattaattttttcagtttgtctgtgtagtctcagttgaatactcaccattctaggttgagtacttgctctcttttattaaataataatatttttattttcatttggtgttgtcaaaattcctccaacaacaattattgtggttattatgtttgtgattatgaactaaacactctttctagagtgttgatgaaactattttaggttatgaattaaagtttttagattattcccatatttattcttattatttgtgtaatatcccgatatgcctaatggtaaataattaagatttataattatattatgggttaattaggtaataagtggaattatgatcctattaatctagttcaacataaattttaaatttgctataagtagataaataagcataatttataaattacggagattcatatggtacatgtgaatgtaatatgagttatcagcgtaataaaaatatttacaggtttgtcgaccttagagactcgatcaggggccagaaatatgataatgggtttaattgatagaattgatgggaatattatgataagttgataatataagtattggggtaattaggagtatgtgagatttgacttagcgcactaaaagtataaatttcttagtggctaagaaatgataagataattatgaatgataaattattaatattattattaataataatattattatattattataatattatatttttttatataaacttatcagttacgataa

SEQ ID NO: 220204 - DNA, 3863 bp, Cannabis indica
ctaggcagaaaacccagaaaaatgggctaccatttttacagaaacggcttgctatttttttggggtactaattgtcccaaaatctcacttttcaacgttttctcggtaattaggttttagtcatgctttttagcgataggaaaacttttagtttttagtctaagtccccaaaaagttatttagagtatcacttatcaattttacatatattgtaacttaggggcctttaaaatgttgagcaacagtttccactcagattgaccgacacacctaaatttggaatcaaggtaagattagtataataatatcatatgtgattacatgtttagaatgcatgtttataaatgcctgttagataatatattagtaatggcagtattggtgtacatagagttgtactaaatactgacggatatatgtttggcaaagtactgattgacgctatcacatcggtacgactagagtaccgagtataggcttatattatggtcaatagtattgtcgtacaaacattctagactcagtacatgtgggagcaggatagaattataattgggtgtatgggtgcctagttataatctagtttatgtttatgttttgattatgcttttcttactgagtttgtcgactcaaaatattttttatatgtgtaggtaaagacaaagttaaggctaaacagtagtgaatacaagcaaatgaatattgtacatatcggggcagttagacatgaagtgttcgattttggggtagcaggctttattttgttagtcactggacgacaacttttgtaactaaatattttgtacaacagttgtaaccttacaaacgggatgccaaattaagtaaagtgtttaattaatcaagtttaaagtttaatgaagaatattttaaaaaatccatgttttcccataaacctttgattagcaaaggagggcacatcattatgaaatcacaataatatgcctaatctagtagggtgttacaccattaaataatatgatggtaaaatcaaggtgttgacaagcgtaaggcacattccggagcttaaacaaaaccttatatccctaggtgcgcttaaagatgaaggatacggatataagtccatgcatagaagcttaaggatcaccaaagattctttggtagtgatgaaaggtgaaagatcaatggtttatacgttctccaaggaaaaactaatgcaaccggagaagcaagcatggtgaaagtgctgtaattacatatgcaactgtagcatcacaaacttagacatatcagtgaacaaggctgtaaagacagtttaactttagtatgatgggttattaaataattatggtttaattatgaaattaagttattaatcatgatttacgcatttgtggatatttatttggattcaaaatgtgctaattatgttatgtatgaaatttcttattttccgtatttgtgctcggtagtagtggaatacgacgttgggccattagagagtcatgttttcatatggtttagaattttattagtagcggggcaacatggttaaacatgaaaagtgtcaaaaaattgtcagggtttggaaaatgaccaaattacccttaggtggcatgtttgcctttgttttgtgttaaggggaaaaatggacattttctttagaatctttattttgtcattttgtggacattattaaccagaatattaagtttgatttatgtaataaaaagttatattaatctttttggaggcaaaagttggaaaaacctagaagttaccctctctttctacaattctctctctttcgaaacatcaagaaaccaactgaggattctggatttttcagctcatttcagtgaaattcttgcagagtttgagtgcttcaatccaaggtatagcatcctagcctccttccctttgatattctttagttcaagatagattttggtgcatgattttgagaattaaggttctgtggttgtgtaattaatttgatttcgtgttttggagttaggataggattatttgagtcgttttaagctgagtttattgattgtggtaaagtttgtgcaaaattgaggtttgagaactcaacttggttcactaatggtgatttgaatttttgacataattattggattttgttgcttgaattgagtctattatggtatatacaggtgttttggaggttattgaaaagtttggggttgagttgaggcgttgggagcatttttgggatttcctacattgaactggtcgaccgattcatggggacgtgtaggaacaaaaattccggttggtccccaagaaaccccaccgaaccaaaattctagttggagaaccggtctaccgattggggcagttttatgaaccctagtttttcctgtttttgcgatatttagggtattaccatgctattcatcgatagagaaatctctagttttaattttaagtctccaaaaagcgtgttagcgtgtctctcattagctttacaaattttgtgatattgggacctgtaaagcgtcgagctgctgttgcacgcaggttgaccggcacacctgaactcgaaaacaaggtaagattagcataaagtatatatgtatgtgaatgaatgcatgttattattgtttacactactaacactgaaatagttgtagaattaagtgtgttagtacaatatagggtattttaagggtagttacggtgttaccaacacgagtacaagtgggtacggaatgcatgcggtacaacacccagtaactcttaaaagtacaatatggccctaccaacactagtatggagtcggtagtgcatgtggtacagaggtcgtacttccgttgagaacgttcttaaccatttggtgagctttgtatttaggtccaggagggcctaggtgcaagctgatattgcattatatatatagtttatgcatatcttactgagtctgtcgattcatcagtttattaccttgtgtgggtaagggtaaggctaaagtggaggagtagtgagatggggctcggcaaggattgtacatatcgtgacagtgcaacttggagggttccagtcttattgtattttgagtcacccttttgacatcgtcatgtggcttgtaaaaaaaatgctatgtaaatatatatggtatatttattttcataatggtttttactcgggatccccgcttatgaaaatttataagtataattatatatggttaatattagttaatttgtttaaaactaaaattatttagttttcgagtatgggtattataaagacctcaaagaactgcacaaacaaggtgtaattgaaaatttaaattcttatgccttaccattttgttaagcatgtgttttagggaaacaacataaagtttactccagcaaggcacacaactaagaagatactcgaacatgtgcatgatgacctttgggggacatacaaggtgcctactcactccagtaagcaatattttctttcaatagttgatgactgtagtaggtgtgattggacctatttgctagcaactaaggatgagtgcctggaacagtttaaaatttggaaaactaaagtggaaaacaaaacagattttaaaattaagaaccttaggatagataatgggttagagtttattaactatgaatttgacaagttgtgtcgagaatttggaatcactaggtataaaaccgtagtgaagaccccgaagggaaatggtgttactgaaagtaagaaccgaaccttgttcaacaaagttatatgtttactgctcagttccagattagaaaaactattttggggggaagttctagcaaccacaacctaccttataaatagaagctcaaatagagtgatagacttaaaaacaccttatgaaatgtggtaca

SEQ ID NO: 220205 - DNA, 4311 bp, Cannabis indica
ggggtccatcgacctctcgatcagcaccaatgaagatgacgatgctgccgccgttgacaagtttcaccataacgaaagaatcaccgagaccgccactcccaccaagcgaaacgccaagcagaagaagctcgaagatgatttcgacgccttcacggcttccaaagctgctgatctcgctaagcccttaagggaggctcagataccgtacaagattcatatcgtgaaggatcacgatatgaaggaaaggctgtgtttggaggtggagaggcttgggctcagtgcagtgattatggggagcaggggttttggggctgtgcgacgtggtaacgatggaaaacttgggagtgtcagtgattattgtgttcatcactgtgtttgtcctgttgtcgttgtacggtatcccgatgataaggaagagggtggtgatgttgctggtggccatggcggtggtgctatacttgcggtgaaggacggggaagaagaagaggctgtgatcaagcctgttgtgaaggcagagcatctaaaaggttagcaacttaaagcttcttacttttgatagaattatggagtttggtatcatatctttgctacattgtcttcatttcgttattgttagagttggaatattaagcttaatgaaataatgacaattgggtttctccgtgaacaattaattatttatttatttattttgtgggaaactgggattgcagaagttgaatccttgaaacttgctatgttttagtacttatcatccatgatttatatgtatgcataactatgtatagatgctacatagtatcttctaatagaaacattatcctgtaaaccccaccataaaatctactttgccttacgaaatgagaagtctttgagattttgttttgagggatcttttgaacttttgccatatttgtttttatctgctgcaaaatagtgttgttggatgtaatatgaaaacgatgttagttgtttcattaaaatctacaaattcgagaaaggattgcaaatgtgaattgtatattctcttagtggggcatttataaccaaagaagtgtatcccaacacttttccgcgttgacccttttttggaatgtataaagtccacagttgtcctttcattaatgtaacaaatgttaacccatggtggttagttgaaagtagtaccttctgatagacgtttattgaaattcttgttcatcaagctctatcagattcccaataaacgtgactatgttgctatgtgaataaccgttgtagtacttaatatttgtgaaggttttactaaattgctcttatcctttttctgattgtcagtggtataatagatatcttgtagcctgtcaccaccaaaaagaaaacaaatagttagattaactttcttgaaactagaagtaagcctaaagaaggaaagaagtatatgcgatggcctgtactttatctagcttttgtgtatgaagaaaactactgactgtttaacttctttataatacaagagtttacaagaattatgtttcttaagccactgtgccagtgatcagttattatgtttctttggtatgtgtatttttttatgagcttccatgtttatgtatcaacattttcaatgattaataactaactcaaatatggtattgtttaaagcactttatgttagaattctgaaattactagaaatacattagaacaatgttttccaaaacatgatactctttttcattttttcatttatgatttgtttgtaggtttgaacgaaaataattattgagataggacgagtcttcaaaaaaattcactaggcaatggtgaagtatttttcaatgtatataaccaacttctaaattctagcactttgtctttagagaaacttcttatagtaatcaggatatggtattgtttttagcacattatgttggaattttcaaatgatttatacatgcattggaacaacgtttttcttcttacgaaaagctacaactttttcgttctcaaattgtttttgggttcgaatgaaaataatctttgggataagacaagcctttcgaaaatctttaccaagcaacggtgaagattcttcaatgataaatcggaattctggccttgtgcattagaacattgttccccaatagtggtgaagattcttcaatgataaaaacaaacttggaattctggcctactgtttctagagaaacttagcgaagtaatctgtttatgattaactattgtatatattcttttatatttttgttatctttttaaacaagttgccaaaattagaaatttttgaacaaaatactcactgcagcattgattctttgttgcatggctaatccaatcgtactaattcgtggttacacattagttgtttatcacaaatgatctactcttgtcttaactttttaaaggctctctattgctttataaacctgtaaattgtagtacataacttttcatacatttcatttacttcacaatttcgtattatttttgttatttaaattttttggcactagcattttgactggaagtggaccgaagttttggagtctagggtgatttgaatcgtggaacaatacctaccagcactttcaatcattcctccttaccactaaaccaacccttagggttatcttttcttcacatttaatcagcaaactccaacatagtttatttattaacttaacttttcttaaaaatagacaaaggtaatgataagaaattattcttacagaataaaataatctatccaaatctgaacacagagttatgaaatccctcaaacactacctctttattgatgataatataaaagaacaatctagctttcaagatgctagatctccaattgcaaccttttcaagagggctgctctctcctaaagtctattctcttctatttctaagctcccccacaaatgaatccctccctcttatttataggcacgggataacataaaatagtgttagctaggatgtactataaataagacaacaataaaagccaactagataaaaataaaagccctctctcctagcttatgtgtcttcctattgcccccgaaaaacctttacattgtcctcaaggtgaaaagaaagacatggttttgtgaacaatgacttgtttctctgcttgaagagtctttgccatagtttttaaagacgccaaagatcggttaagagaagaattgcctctaattgttacgctctgttcaccaagctgaaattccatggtttgttccgtcaaatttgtcttggtcattcctagtgtagtcaaccattgtaaaccaaggataatgtcagcactccctaatggcaagggcaagaaatcatcccaaatgtccactctttgaaagtgaatattcaaattcttacaaatgccttcacatttcatcgaatcaccatttcccattgtaacctcattagccttggtctcaactattgggatgtgcagcttagtgactaaggacttagaaatgaaattatgagtggccttggagttgattaggattaacactttctttgtgccgagttgacccttgagtttcatggtggaattgctagacaatccagtcacaaattggtaagatacctctattgatttgtgcacttcaattgtgtccaagtctatggcatcaacaccgtcatccttcgtttcattatcgaacccattttcttcaacatcctcgagtacaatgataacttgtagcttccttttcttccagcaatgtcttagtgaccacttgtcatcatagcggaaacacaatcccttttgttgtatatgttgaatttctgaactggtgagcttccccaccttagtggttgaatttgcaaggaaagttctagttgatgtctttttagctcccgctgataagtcaggttgcgccacacaatttgaggaataatatcgatacgaaggctctattcctttctttgatgtcttgaacgatatccattgcctcatccacattccttggtctctgaattcactattcaactcgtaaagatggcagcaaaccattcaagaaagtgctcaattgtatggttggatccactgtcttcaagggtgctaacaaagccctcttgtaaaactgatcatacagtgacccttcttgagtgtcttggaaatggcagagcaacaatttcttcaattcctcccagttatagatgtcttgtttgttgctctcatattgataccaaagcaaggcgtcgccagaaaatgaaatgaaagtcgcttcaatcttctcttcttcgtcgtaatcatggccaaaactagaactctttttgcttgcaatatccacccatcagggttatc

SEQ ID NO: 220206 - DNA, 4026 bp, Cannabis indica
attgagtttggacttgagatactaaaaacgatcggtggtgagggcctttgttaggagatcagctacttgatcgagagatggaacatagcagacatggagttggtgagcaataatgagatcacgaacaaagtgcatatcaatttcaatatgtttactgcgggcgtggaatactgggtttgctgctagtgcagcagcactttggttgtcgacccagatgattggaggttggtgtaaggagatatgcagtttggataagagggataccagccattttatttctgatgtggtgttggccaaagctcagaattcgctctcagcactggatcgagccacaacggcttgttttttggcagaccaggaaattaaatttccaccaagaaagatggtgtagccaccagtggatcatctattgtcggggcagcatgcccaatcagcatcagagtagccatagagatttagcagtggtgctggtttgatgagaagaccatctgttatggtgccttttagatacctcaatagccttttagtggcttcccagtgagttgtggttggggcatggagaaattgacttaacttgttgattataaacgcaacatcgggcctagttaaggtgagatattggagagcgccaattgtgcttctatacaaatgaatatccaaaaagggatctccaatggtaagagataatttgtgagtcgaacttgttggatttgagcttggttttacaccatctagatgtaatttgaccaacaaatttgtgatatacttggactgagagagatacatgccaactgagtttcgaaccacttcgacacctaagaaatagtgtagggggcctaagtctttgagggagaagtgaagattaagatcatcgataagcttctgcttcaggctgctgtttggactagtgataaggagatcatcaacgtagaccagtagtaggatgatgttggatcctgaaccagaaacaaaaagagagttgtctgatttggattgagtaaaaccccattgtagcaatgtcaatttaagcttgtcgttccatgcccggggtgcttgtttgaggccatagagagccttgttgagtttacaaacatgtgtagatttggaagcatcaacgaatccggctagtttttgcatatagactagttcatttaaagtaccatgtagaaaagcattgttgacatcgagttgggtgactatccaaccatgagagacagcaatggtaagaactgtgcgaactgtggccggttttaccacagggctgaaagtctcttcaaagtcaattccaggtgtttggagaaatccttttgcaaccaatcgagacttaagtctgtcaacagagccatcaacttttaatttgattctatggacccatttgttggtgagaacctgcatatttggtctgtagggaactaaggtccatgtgttttgtcgtttgagagcaaggtattcctcagtcatagaggcattccatttcgggtcagcaagggcagctttcacagatgttggtttagatgggagaaggacaatgggcagtttgtgtttggtggctaggtatgattttggtttaaaaatgcctctcagagaccatgtgatcattggatgggtgtgagtgatgttttgtggttcatgggcaatatctaaacatggttgggtagatgtgatatcatgttcaggtgctgcaatatttgaggtagttgttttggtgagagagtgagaggaatctggtgtgagtggtgagggagcatcaggtggtggagaaggggtaggttctggggttgctgtggatgtaacagtaggcaaggtaggggcagttagtagtgtattaaaactagccaatggtaaatttgttgatgaaatgtcttttgtagcacagggctgtggaaaactgaaggttggcttattgaaggtgacatccctggcaatatatctcctaccatgcaaactttcacatatgtagcctttgtgattgggagaatagccaaggaatcggcatggttcagatctgaagctgagtttgtgagagttgtatggtcgaaggtgtggataacatatgcagccgaacgtttttaaggacttgtaatcaggaactttattgaataacacttggtagggactgctattgtcaataattggagtaggcattcggttgattgtgtaaactccacactgaaaagcatgccaccaatatgacatatcaagatttgcttgtgctaatagggtgagaccagtttctgttatatgacgatgctttctatcggcacgaccattttgctcatgtgaatgtgggcaatgatgttgaaagataataccctattcctgcaaaaaattagcaaacaccctatattctcctccccagtcagattgaaccgatttaataggtaaagaaaattgtttttcaacaagtgtcttaaaacgggtgaatatcttataggcctcagatctaagagtgagagggaagatccatgtgaatctactataatcatcaatgaaatgtatgtaatacctaaaaccatctatagagggtgtgtgtggaggtccccacacatcagtgtgaagaagttctagaggttgtgtggctctgctatttgacagaggaaaaggcattttatggcttttacccttttgacatgcatcacaaaattttagttcttttaatgaattgggcaatgacatgtgagatagaatttgtcttagagtatttgagctaggatgcccgagttttctgtgccacagatttatatcactaccagcaaaagataacagtgcttgagattgaaaatttgtatttatagaatctttattaatagaatgatatgtacaattgatgggtgaactattgttcacaatattggaggtacaatcattattacaagaacatatactactgccgaaagaattttgtattgatttatttgattttgatactgtggcaagatggcattgtaagctagctcgagagaatttggaggagttttcatcaagaacatataagccactcttaagtttccatcgagctaaaaccttccccgtgtccttatccttcacaaaacaacaatgtttgtgaaattctaagaaaatattattgtcatgagtgagtttagatacactaattaaattttttgtgatagtgggaacacttaaaatagaatttaattttaatggggaggaagaattagtatgaatgcattttttgccaatatgtgaaattagaagttgtttaccatctcccacagcaagggtttctgaaccaagatatggggttgcactgtccagatgttccatgccaagagcaacatgattggtagccccaatatcaacataccatctcaggtaatcaccaaattcaagtacagtagaggttgaataagcttgagaatcacttgcttcagatgcttcctattcagcaagataggcctttggggattgtgaattgttctttggtgtgacaaaatttttgtcaaatctatagttgcaaaccgaggcagtatgtcctactttaagacagacttgacagataggccttgaatttgaattgggataccttggtggaaaattgttggggtttcttgctgcttcatttgatctgttctgttgaaaaaagggtctgaaatttccatttctgctgctgttataaccagttcttgaatttccaacagcaagatttgcagccattttattggaaatgttagaaaccgagtgatgcctttccaaacgacattcatgagccatcaatagagcttgaatttcttcaagacttttttattcatttgttgaggtgataccagaaacgactgaatcatattcaggtccaagaccattgagaagttgtaactcaatgtcttgatcattaactatacacccagctatagcaagattatcacatatggattttattttatcaatataatctgatatagacatattacctttctgaatatttgttaattggcttttcaattgccgcaatcgggcctttgattgacctgagaatttttgttcaagggacttccagacttcgaagga

SEQ ID NO: 220207 - DNA, 3644 bp, Cannabis indica
gtacccatatcgcatcactttccatgaaagtacatcgtcacactctttcttgaaaaattatgttggtcctttgcttagatagttcatgttggttagctgtttctcccttgcctcattcgcatattgctcttgcgctttctttgaatctcaattgatgtaaggtccaccaacaatggtcaaaatattatgaggagctttggagccactcacctctcctgcgttatctgccctattcgtttagggattggtttctcaattgttcttcttgtattggccaaaatgtcctcgttgaattaattcttcaattgcatcttctaagaaccaacattcaagtgttgtgtggccaatatctttgtgatacttacagtatttcttcgagtccatcttgtcacgattgcctctgattggtgggggtttcttgaaaacacccttgtgttcttcgatggcatatatgtgatcacgagagacacagaattatgtgtaaataacaaaacatagacctcccttttgcttcggggaaccttccttcctagttggggacttgggaagcttcgggcttcatcgccttgtggggctgcatttttttgtgctacaccttggactacatctcttggaacttctgaatcgcgaactcttggactgtgttcttggtattggagatcttcgtttctcttttcttttctcgagcttggtaagagagttctctattcgcttgtggggttctgccatggaaaagaacccaactagcattttaagatgtcacactggtagtttcttccaaaattctattctttgtagcacacttgtaaaaagcatacagacaagcgaagacttgggggccttctccactttggttaccatgacattaaaatgcttaaattaatcgtgtaaagtctcacccgtgtcttgttttatgtttgctagagttgtgtatggtggtttgtatgttatggttgcctaaaaatgagttatgaacaaatccacaaatgtctcccttattaagatggacgcttcgggtaattggctgaaccagtcgtgtacgttgtcctccaaagttacagcaagaatatgacacttagccaattgagatacctgatcaaattccataatattgttaaatttatcaagataatctataggattggtggtacctgtatattcaatagacttaaaaagtctgaagcatttagggagcctggcttatcgcacttcttcggtgaagggggacgtcccatgtatttataaatgggctttctctgctactcgatcactcttaatggtcacagaagattttctttatcaatccctcctgccagtatgggattgttagcatgcatgaattggtttcctgttggtaaagaagccactactgctatgttcgccggtatcaccacattattgggcacgactggtgccagcggcgggttaactgcattttttgcattgtattcacagggggataccttgatcagcaaaatggggatcatgaggttcttcctcagttttacgattccttggaatttaggatcatgcatgaaacacttcgttgaggcaatcttacatgtcgtctctctgcacatgatacattcctcctagtcttctgaacaccattcttgacttggtgtagacactgggggagcgattgttagttctcgaggaataggaatgagattcatcatcgttgttaacgcaaatttttgttaaccaaaaatagtaagcctttacataataaatataatacagaaataataagaaataaataatgtataagtaacaccagatatttttacgtggttttgcaattaaatctgcatactccacgagtctattttctttaagatattttctattacaagatacaatataaattgtatatatatatttctcttctatcatccatctctttttcttctgcagaatctacccctatttatagaaatataggttggcagttatttatattcaattcaaaatataatcgttgatgaaacaatatcaatttccacgttttatttaaattgtatgtagataatactagataatcgtttaactactagtaattcttatccttatagatgattaatgctgatttagacaactgtatcttgcttatctgtgagtaattatccttggctattataatgtggaaaaaatactaagtgttagcaaatgattcgcctcgtcaagtttctttagaacagcgaggtgattatctctctattcataacatgaggttgctttgcataactgtattcattcatttgaataaatgaattatcttcttgggtgtgtgtactccgatgaaggtatgtgtctcgtcaatataggttttaatagtcttctatccttgtctcgcttaagactacatagtcagcgagttatgaatactttctattaatcctttatttaacgagttattcttttttttcgcattaaatgatataatttcattatattaggtggttcatattccactgtatgacacgtgtcaccttctgaagtgaagtcgaattttggatataaaagtcttttacctcaatttatggttttgcacgactatgcaggttacgtcgtttgagatcttcctcttcttgcgacatttcctccctctaactctgtcaatttgtattaggaacaataggacccctacatgtataaattcgtaacaggttaatttaggtcgagtccagcatagttgttctcacttgagtgttccctacatttacgagtattattaaaatgttcattataacgtctaatatcattagttacttgattatcagtgcaacgtcaggttgggactcgtggtggacgttgggcttgaactcggcctcttctttaaatttctgcttgtagcgcacgtatatgttcctgaatagttgtgtactgtgaggttgtgagttagatcataccctcagatgcggcgatagatgtcattggtgaaatatgccccatggtagctactagtgtcgaggttcctccagcatgctctatagacttaggaaataggttgaggggagtcacattagtatgccctactcctcctatgacagcatcaacgggggttgttcctcctccataaataggaacattgagagtcccaacgttgaaagatccattgttgttgttcgtgtttgtctgatctgtagccatctcgataatcctccaaaaatgtcaaaagatttctttctcacagatggcaccaaatattgtcggatgaatttagacaatacaaaattttgtgagtatttaaatgaagttagaatactcaaaagtaaatatgcgagtactcacttagaacagggagtagtcaaaatataggctacaaaatagacataaacaaaaatagaaaaaaagagaagataagagaattatagtggctcagtcagagctcggtctacttagtgcacttttggtaataatttcagcttagtatatttgatttggatcacccctttatatagaaagctagtgtcctttaggattacataaccgattggttaaaaaatatttttacaataaatgacagcatttaattaaaataaatgtttaaggaataaatggagaatagtttcatccattcttaaattaagtacagcaacgtatatgacttgataagtcgcgacttttccattcatatttca

SEQ ID NO: 220208 - DNA, 1499 bp, Cannabis indica
tacctaagtttactaaattataatactctactttataacctttttaaagtcattatcccttactaagatcatatcacctaaaaatgatttctctatgcaatttagtaaacaacaataaacctaaatcctaccaaatatgtataataatttaccacttgaatcatttctattatatcaattataggcttatctataaatatattccacttgaccaaagctaacatgcaactgataatttaaacttgtaaaagctatatttaacattaataccccacttccacaagagagtcaaatattttctttgaaaataaacaaaattatagaataaataataaattgtttttaaactaaccacccactatgactaacttttaaggagtttacataacgtaacgtggactatattatttttaacaatataataacacttaatcgaactaaacttgtagtgctcgctactcactgttttacaatctgatttacttgatataatttaatttaataattattataaaatatcttaattataaaggctcttaaataatattttttttggttgagaaataataaaataatttaatttgaggacatcatgataatgtggaacctgtgaaaatgtaagagatagcattataaacgtggtagaagaagatagatgcaggccaataatgttggtttctttttctcttttttataaatgaattattttatcttatattgtcagcaatttattcaaattattaaaagaatatgggtaggtctgtaatagtgacctaaatataggtgacactatttgacacaatatgaaaaaatataggtttagttagaatatggcataaaaatatatgggcttagatagtataataaattaactcgaaaacacgatatttaagtacaaataaattagctcaaaaatatcacacattaaaagctgaataataaatacatttatttatctattaaaataatagtaatattaaaattataataagtataattatattttttagatttagcttataattgtaataaataatggagcatgaatttgtgctcgtatagaaaaatatgttggtctatttaagaaaattagatcaatttgaataaagcacgacacgaactgaacactacacgaaagtatcgaatttgcagaccgtgctggccaaatctataaaattattgcacagcacgacatgacctattttttcaaggcatggtaggacaaaaccctttttttttatagctgagaatgatacaatccatattttaagaaacacaaaaaatatatgttgggttagcatgacctgcacttatttacaactatgagtatacccaccacggtcgggcctatgttaatttgggccttagtaaaaaataaaaattggggcccaatgaaaaaatgattgttattgggatttgaactctcaacctctagtttattaaactaactaaattaccactaggctacagcacatgtttaacattaaaagtattattat

SEQ ID NO: 220209 - DNA, 1682 bp, Cannabis indica
acataagcattgtcattaactgcaaaaaatcatcgtgtcttatttatgtttcttttacaatctgtgaacgcagtttgaaaacatacagcagctatgcaatgatccaagagcaaaggctgccgtcttggctgatatggattctcttggaagagaagctcaggtaagtcattggatcaaaacttgtgtctagccgtcaattcgagtgctcatttctttttctacctcggcctttgtctaaattcaatttttttttaatgcagctaagaggttttgagttcgcaaaagctgtgacacttgtatccgaaccatttacattggagaatggtctgctcactccaacattcaaggcaagtgttcatcttgaaaatgctgggaacgaaaatcccgttagttaatctaatattttaactttgttttttcaacttgtttaggtcaagagacctcaagcaaaggaatatttcgcaaaagctatttcggacatgtacgctgagctcgcaacttctgatccatctcctcagagcaagttgtgaagtgtaaactaaacttaataataataagcagttacttgtaaatgcttgtaagctgaaaaggaaaaaatgagtagacaaatgaagcagctaaagcagttcaaagataagtttcattgtgtcagatgaaactgggaatggataacatctccccatcttactgtattgtttttagaattattttttggtttccagaataaaattgtgatgtaacaagttaattctgttacttattcctaatataattaataaaatagcttatttttttgaaattattatatgaaaaatataaattggcactttatttataaaaatattcctataaagtgtagacaacatttatattttttatgtgctttaattaccaaaatacctctaacactatcacttacacaatcagacgatgattgttgggtggttggtcgaaagttgtgtcagacgaaggtttcaatcaaacgaaggttgctgggtggttggccgaaggttgcatcagacaaaggtttcaattagacgaagattactgggtggttgatcgaaggttgcattagacgaaatttgctggtggttgaccaaaggttgcatcagacgaagattttaatctcaggaagcatggatcgtgggtcgctgttgaaattgtaatgcaaaagttatatctattgcgagccaactaatgtgcaacttaattgtaactaaaaaaatataaaaatatgaaagtgtatatgtaaaaaactatttgtcagtattttttttacaactgatcgataattacttataccttaatagtaatatgtggagaaattactgttagcaaaatgtttatgtgactgttgtgaaatattaaaaattagaacagtgtttccatgtacgcaactctatttacatgtcttttcatgatttaatatgaacaaattcaccattagaaatttgaaaaacacgaaaatacacgaggataaatattttactatagtattgatattatacttgaattggattgtttgagaattctgatttaactttttgagatatacatttaataaatctgaaaattaaagtcaaaaacattaattttatgcaaattaaactagaattcgagttgaattttagtttcattttttttttgaaaagaactaatgttcattaattagtaaaattgat

SEQ ID NO: 220210 - DNA, 3213 bp, Cannabis indica
caacacaaggaaaaataacaatcatcttacaagggacagaacaacactagggtgcattgtcctagagggagacctcttgaaaccacataagaagggtctcactgtcggggaaggagacccgaaaccaccgacaactcaaaagcttccgtgttgagaacccatcagagcccgaaaaccttagcccaccaaagaatgcacgcacaccaactaatcgaaatctcggggagccaccaaagttagcaacaccatctgacaattgcaaactaaaacataaaataataaaacatggtgttgctcacaatatagccaatgtatattattttgaaaactaaattatatattgtgaaaaagaaataaggattaacaagttgttaataatttgtaaaataacaatacataacagcaaaagagattacataccaaactaatatattaaccacaatgttaagagaagctttgtctcatttgcttaaatctttgagtacttatcctcccattgataataaagtgtgtggtcctgcaaatatattaatctctgtgcttaaaaaaatcagaaagaaagtgaaaatgaatggttttcttttctttctaaaattagtaaaaataggcttcaataaaagtgctatgtctatataaattaatagagtaatgtgtgacataaatacttaagtttaatttttgattgcagataaatatttaagtttagtttttgacggtacctaagctatatttttgaaacttccgtaagtacttataatttaacattcaacgaccaggtatctacgaaagtttcagaaatataacttagtattattatcgtaaaaaaataaacttagtattttatctacaattgaaagtttaattatactaatgacatgtgtacacataagctaaaactgaaaaataaactcaaactgaagaaaaaaacatgtacttaatttgaaagaatcatattccattaataacatattagaatcttaaattgataataatgcatatggaaacatatgcaatcacgatttattgttatagtattaagaaaagagtaatgatacttgtacacatgaattacatatactattcatacacacttatgtgagaagtatttcttttataggtaggaattatcttaaatgaatgcaattagttaatgacttgttacataagtgtgtgttaaatttattggtatttaatgtgtttatattactactctcaaaaaattgatatacttagaattttgtagagaagaataatgattttactaatgcaggatttgaaaaaaaaagtgactcgactcgagtgaatgtaaaaagttaccttttgtctaagaaaggctcattacttcctttcgtaagtatgttaggtatgtgttgaatcttgggccaatcttcacctgttccttccttgcatcgaggaattacaatattacatccctctatgcacaaagtattaagacgctgaggtagcccttctgttaagctctctagtttctcaaggtaaagcaactccaaatgacaaagataagtgttgtgttgaaatccttcgccgtttaaagccttaaggttataaaagtcgaagatctttagataacttaaagtaggaggaagtagccattcctcaggaaatgagtccaccacacttccacatcgatgcaattctaaggtattcaaggatgagagcctttgtaaatcctattcatgcgattttccataaagcatattacaagatgtgatgtatagagattttaaagtagaaggtactcccatttctgaaaatgactccaatcttgaacaactaattatgttcaagacttcaagagaaggatatgaaatgtcaatatgtgtactttttggaaatatagtcaccaattcatcgcaagatacaacattaataacttctagatatggaaagctaccattaggtaatgccacatttagctttccacattttcttagatcaatttgctttaaacaagaaaaaatccccctattttggtcattggtgttggcaaacgaccaatccaaaatatttgtccaaaataactctaatcttattaagaatagaaatggcttattcaaaaaaatacattgaatttcttcattcatatcaagacaagaaatacgaagacaactcaatgaacttagttgttggaatgataacaacgacaagcaacaatttttacaatccaacctaacgtttcccaaattagagtacgatggatttgcaacccaatctggcaaatttgtaccattgtagccaaagattgtgagtttcttcaaatttgtatgtggttggagtgcgttaagtacctctatctcctttgttgaattgtcattaactttacctttccatgagaaaacaagcttagtaaggtactcttttttctttaagttggcttccgaaacatcactcacttctttaacatactgaagccctgaaatacataatcttccgtgcaaattctccaacttacccaactctttgatccttgacccattattttcacacaaaacaaaatcacttaatgtttgaagattcaccatattacaaatctttggtggcatctcttttaagggtgtgtgtttgatcataagatggcgtagattggttaacttagaaatattggtgggcaatcgttggagttctttgcaacctgacaataacaatgtttctaaattgtacaacacgcaaattgaagtaggtaattctttaactcctgagtaagatacatctagatacctaagatgcttcaaattgcctattgaataaggcaactctttgatacaagattttgacaaagaaagtgttcttaagtatcctccatcccctaacaccatttcaagtggtaatcatgtcatgtgtgatgagtatgtatctcgcaatggtaaagctaacaaggtgcgcaaaaacttcaccttcggaaagctactcagttctatcacttcttttttcatgtatgataaatggcgtgtcttacttgtaagtttgggtgagtcttcacaaccatcataaatgaaacaacattgcccggatgcataaatagctaaatcatgaacaagatcgtgcatagataagaagaaaaaaatcgtgttgatttaggcttctttggaaaaatgatcttgatattaaagcgtttaaatactcttcaccaacatcttccattctttttccttttgagttgcaaaagaccttctgccatccatattaaaatta

SEQ ID NO: 220211 - DNA, 2560 bp, Cannabis indica
tacataaaaagttgacaagcgaaactggtgaatttgttaatgaaccattagttgtgtccattaccatcccttgttctagcatcattgtagaaacttgagctgcatcaacaaagagattattccacatgcccatattggtaacaacccaataaagctcttcaattcttcaacttgatttacactacaaagcctccatggattgaaggacttcccactagtactaatctcatcaccagaagacatcacagctgccttatcaagaaatctgtgtcaaattgagattaattattagaaacaataaatggggagcacaaacaaaagataggaaatttaacaataattacttcaatgtattagtgcgtttgagtttaatgcagcttccttccatatctgaattgttttcttgtgattcaaaaagaagattcttgtctttaggcatctcgagatttcgatttcgacaggatgcaaccaaaacttggcacattctagtaattggacttccattgggtttttgaaatctataaaagggtgttccaaatagaaaacaagcaatggcaatgcccatacacatagtaggaataccaaatcctaaaccccacccaacattatcttgaatccatgcaagaaaagtagttgctatgaaaattccaatggacattgtaaagtaaaaccagttgaagaaagatctcttctttgatctctcctttaaatcagtattatcaaattgatccccaccaaatggtgaaacacatggtttgatcccaccagtccctaaagcaaccaaataaagtccacatatgaagaaaaaagagcttggtcctggtagtgatgctgagagagtcaaggcacacaatccctaaaaaaaaacaccaaattcataagccaaaagtgctcttttcatcagtaagagtacaccaagatgagaattttactatgaaatagatggtggagaaaacagcaatggtccaatattttcccaagtaagcatctgcaacaatggctccaataaagggtgtgaggtaggtagtcccttgccaaaccgaaacagctttcgcagcagccgcatttccttggtgcaattctttagtaaaataagtaacaagattactagaaataccaaagaaggacaacccttcacaaaattcagcacctgtggacattgatcattgttcaataaaatttcatataaatgaatgtggaatgtaatccaaacaaaacttaaagtctaacaactttaactgtcataacagcatgtccggccatgggcatagacgagctaggcttggacacactaacctcagggtccaaaaaaaaggttttttcattttaaaattacacattttttttttactgatttttaaaaatattacatttttctctaaataaaggccaaaatattttacaccagttagaattattattgttattaaatataggggcttttttatttttactagcgctgcaaccactttagaaattcaaaaccgtaaaaaaaaaaaaattaaaaaaatagtaaatagagtaattcctgttaaatataatacctataatgaagaagcatgctttccaattcccagtattctgtttcaccgcgcgctttccattggcgtcaactgagctatcgccggtataaagctcggtgtctccgccattcttaaacaacaaaacaacattttatgaaatgaaatgagaatctgagcagaccaaactttatagcttttttaaattgagtccccacaacttattattattgtttacattcaatgtagttattttacattttgcatttggttggttaatttgacaaattttcacttacaacaaacccagttttgggttttatctaagaaaataaatatggaaagacaaaaaaaatgcttcattattgtttccaatatgaaattcaaatatttatttgaacatcaaattgtggatctaaaaaacaaacaatggaaaagggagaagtaattaactatgtcataatattatagtgaagtactaatatattaatgggaattacctgaagaagaggaatttgattttccaagagtgagctttgttcttctaaagtttccatttcttgttcttctgatatatctttcagactactaatattaaatacagtacagtttcagtgaagaagaagaactataaaaatcaatgcgaagaagtgctcaattattgcagaaaaataaataaataaaagtgatcaattaattattattactattttattagaaagaaaaattatcattactattattcttttttaaagaaaaaaataatacatatactaaaatatgaaacgtgtgggacattacaagaaatatactaactcccttcaaaaatatgtcaacggaggaaccattgtagttggcattttattaattagtgatatttttataattattattaagacttgatattaaattacacttagcatgtttactaaaatggaatgggatcaattcatttgtttactgaattttggagggaaaatttacatggtatactaatttttgttatttttttacaaaaatactgtcaggcgatatttttt

SEQ ID NO: 220212 - DNA, 2202 bp, Cannabis indica
ctcaaacttgattttgtttttcgacacccatgcccacacacccaccaacaacaaggcaaagctgaaagaaagcacagacatctcactgaaatggccctcacactcctagcacaagctgagttaccactgaaattctggtgggatgctgtgacttctgcagcttatctcataaacagacttccaatacaaaaacgtgattataaaaccccctatgaattcctatttcacaccacaccagactataattttcttaaagtctttgggtgtgttttctttcctttcttaaggccatacagatcccacaaatttgattttaaaacttctgcatgcctgtttcttggatacagtcctgcccacaagggatatcgatgcctacatccctcgggtaggctatacattgcaagaagtgtaaccttcgatgaacagtgttttccctacaaaactttgttttctactcctacatctaacacacatgtgtcaccaaaactgcctcaaacattgcctctgccacaaccacttcctaccccagctatgtctactgtcccaactcccactacctctgcatccaacaccagtcctaatccatctgcatccactatttctcctcctcccccagttctcagtccactagtgcccctccaactcaagttgtccgtccttctcaccccaatgtgcatcctatgcaaacccgatccaagaatggcattaccaaacccaaagtcttagcagctgaactaactgttactaatgatgatttctgtgaaccaaaaactgtatagcaggccttacagtctcctaggtggcacaatgctatggacaatgaatactatgccctgaaaagaaatgggtatacaaaaagaaactttgagcagatggttccttggacaaacttaaagcccgacttgttgcaaaaggctttcaacaaactctaggggttgattactttgacactttcagccctgtggtaaaggctagcacaatccgaattatttttactcttgcaattacttttggttgggaaattcaactaatcgatgtgaacaatgcatttttgaatggtgaccttaaggagacaatttacatgtatcaacctcaaggatatgaggatcctcaattctccaaccatgtatgcaaactccataaagccatttatgacctcaagcaggcccctcgggcgtggtatgacaagctcaaacaagctttggataattgggggttcaccaactcggtttctaacaattccttattttatcttaacaaagacaatcaatttatcatggttcttgtctatgttgatgatatacttgtcacaggtgccaactcgaacagcattcaacaacttattcagaatcttcatcagcaatttgcaataaaaattcttggtccagtcagctacttcttggggtttgaagtatccaaaactggttccaatcttcacctgtgccaagctaaatatgcccatgacattctcagaagaaccaacatgcttgattcaaaggcctgcaccacacctatgacccctggatacaaactttctaccacaaccagtaagcctttttctgacccgactctctatcgaagcactgtaggggctctgcaatatctcacccttactcgacctgacttgtcctttgctgtcaacaagctcagtcagtacatgcattctccaactactaatcactggtgtgcgtgtaaaagggtgctcagatatatccttggaactctgtctcgaggcctggtttttaaaccagcaaaatggctctctttagaaggcttttctgatgcagattgggcttgtgatgttatagacagaaagtctgtcacaggtttttgtgttatgctaggaggcaatctcgttacatgggcatcaagaaaacaaaaagttgtctctagatccagcactgaatctgaatacagggcattgtctaccactgccgcagagttggtttggatccattctcttctactcgaactcaatatcaaattaccacaaaaacccaagctttggtgtgataatcaaggagctcaaatgctagcctctaatccagtttttcactccagaaccaaacatatagaggtggatgttcactacgttcgagatctggttttgaacaaacaacttgaagtttcttacataccctcgaaagaacaacctgcagacatgtttacaaaggctctcactttccctaaattcaattttct

SEQ ID NO: 220213 - DNA, 1702 bp, Cannabis indica
tttaatgagttgctttcaaatgatgacaaagatggaggtcccccaagaaatgatgctctaatgaacaacttccgaactactattgatctatgtaaccttcggcctataccttattgtggagactctttcacctagaaaaataagaaccatcacggtaatatcctaagggaaagacttgatagaggttttattaatagtcactggtcatctgtttttgctgaggaagatattcaccacttagatttttatcattcagaccatcgagccattgtttatactgtttctcatcctaatcaaccgactcttcctaagaaaagaaactcaagatttcgctttgaacaattttggttaaaggatcctgattgtagaagcattattgctgctcactggaatgactcggctaatgatcaatccttgaatccgttgctgcaaaatattacagattgtgctacagccctgcagaattggcaccataacaaatatggcagaatgggaagagatatagcagctgctcatcatcactcagctcagttacataatgtgaaatctagtgctactgatcatattcaacaaatggaaaatgctgaccgaatccttgatgatttgcttgagaaagaagagttgtattggcaccagcgctcacgtgttgattggcttcaaagtggtgattctaatacgaaattttttcactcccgtgctaaaacaaggaatgctgtcaacaagatcaaaaggattcaatcttctactgggggttttatgcatacagaggaggaaattagtgctgaaattgttcattatttttctggtttattctcttcaaatggggtcgataatgaggctttgaatcatgttctctccactgttaatacagccattacaccagatttaaaccagcatttgcttatgccatttacagctatggaagtggacactgcactcaaatctatggctcccgataaatcacctagaatagatggcatgtcggccatgtttttccaacatcattgggatatagttgggcctcttgttactcaaaatgtgctgaaaattctgaatgaaggtgaagatatggattccatcaattcggctttaatcactcttattccaaaggttaatcatcctaaacttgtgagtgaatatagacccatcagtttatgcacagtcatttacaagttagtgtccaaagttattgcagccagatttaaagatgctttgccccatgtgatatctcaaatcaaagcgcatttctaccaaatcggttgattacagataatgtacttcttgcttttaaattggtacattgtcttaagaacaaaaaaagaggtagaatgggttatgcagctttaaagctagatatgagtaaagctttcgaccgagttgaatggtcttttctgaaggaagtcatgatcaagatgggtttccatattaactgggtgactttggttctgaagtgtgtttcttctgcgcaactttcttttaatctcaatggctccatcaaaggcttggttgttccaaagcgtggtcttcgtcaagggattccgttatcaccatatttatttcttatttgctcagaagggctctcagctctattaaagaatgaagaaatgttaggaaatttgaagggtttgactatagctaggggtgctccagctgtttctcaccttctgttcgcggatgatagtttgctattttgtcaagcaac

SEQ ID NO: 220214 - DNA, 5207 bp, Cannabis indica
taactataatatacatgataaataagagtacaacggtaaaatccctaagtatataatagggataagatgagaaatacctcgtttttttgaatttattaatcaaaaataccctcaaattatattttattaaaatataccaagtttcctattacactcttaccctctacttaaatttaacacataatttacattaatataagagtataataaggacatcacctataaaatattttttatttgtataatgggataagatgagaaatacctccttttttgtatttattaatcaaaaataccctcaaattatattttattaaaatatacccaagtttcctattacactcttaccctctacttaaatttaacacataatttacattaatataagagtataataaggacatcacctataaaatattttttatttaaaattatacatatttttttaaataaatggttcaataatttttttttcctaagaggccggccatggctttgagcttattgacattgactgtagttaaacagaccacattgctggttaagtcatatttaaaattcaaatccaatggtgtaataattacacgctttttatcaatattatttattatatcattgatttttcatggaacttgttattcttgctcaaaaattcatcttcttgtattttcaatataaacaggaaaagctaagaaatagaaaaatgagaaaagcataaatgtagttattagaattgaaaatttattacaaattatttcatttaaatggaaagccttccaatcagagaccttaacattcatgtactacaaggagacacagtactactaaaccactggagtcaacaatggcttcttcagaaagtgagcttcaaggttaccaaccaccagatcagccatggcctggcgtgtttcgatagtgccacttccaacatgaggcaaaaggacaacgttttcaagaccaaatagctcctcaggaacctcaggctcattttggtagacatcaaggccagcgccccctaatcggccttcaaccagggctgatactagctcaggttcgtcgacatgaggacccctcccgatgttgatgagaacaccctttgtgcccaatgcgtcgatgacttcacggttgacaatgtggcgggtttcctcagtgagtgcacaagcaaccaccaaaatgtcggagttggcagccaactctttcacagttgggtagtatttgtagctcacacctggtttttctgatctggagtagtaagctatgggacagctgaatgcttcggctctcttcgaaattgctagcccaattctccccaaaccaatgatcccaactctttttccagtgaactaaaaagatgaaagaagaaaaaaataactaaatccaataataaagcaaatctggaaagaccattagagcaaaattcaatttaaggtcatctgcagtgatccttggatgtcaaacttggaacatttaataatagacaatagtcacatgcatttagtccaaaaggtcaagaaatctctaggaaaattgcaggcattaaaatgcctaatactaaaagtatcaagccagaaatgcaccttgctactaactgattcagaaaaattatatttcaagtaagcaactttattaaaacaaagttcagtcacatactactaatatcgattctagggataaagatgcccgaataacgattattttgaaatgtatctttccttctttacgccccccacatcaccatacagaggaagttatttttttggaggggaaactatgcgttttggggatctattagtgattcccgcttcatgtatgtgaaatgtaataatcccaaatctaaatgtacataattttttattggggccatccattcaactaaatagagaaatttgctgtaaatttattagtagcaaaaattctaatgtagtttatctttttgtacttatatctctataactgagggactaatattgcatcaaatatgtaacggttaagatttttgcggctaaatatgatttttaccgtttaaatatttacacaaggatttaagtgcaataaataaactatataagaatttttgctgctaacccaaaaatttatataaatatttaagtgaaacaaaatgaactacagtcaactaaataagaaatctctaggaaaaaggcttcttctgcagtcattaaaaatgcttaataagaaactaactagtatcaaacccaaatttcaagtaagctacttaattaaaaagttaattaagatttttgccccttaaattttaacatgtactaagtcatgtctcctgaacatttctgaccgttaaaaattctccggaactattgagattattagatttaagagcttttattcaattttactaattcattgattgtttacgtactaaatcatgctccctagactttgatatctaccaaatcatattattcgaactttgacatgtatcaaatcaacaatctcaaatagttcagaagagtttttaccgaactttagtacatgtcaaagttcgggaaacaaaaatcttaattggcctaattaaaataaggttgaatcacaaaccactaatatcgattctaaattatacccactaaatgtgataataatcccaaatcgaaatgtacataattaaactaaataagcataatgaaagcaaaccttggtggttaacttgtaatcacccttcttccacttgccggcccttacataccgatcactctcacacaatcttctcagaacagcaagcatgagtccaatggcgaggtcagccacgtcatcagtcaacacatcaggcgtgttggtgaccctaatacccttctccttacacaatttcaaatcaaccttatccattccaacgctaaagcttgatacaatctccaaattggggaatgtgctgatcgtatcggcatcggcaccggagaatgagtttccgatgatggctctgactgattcagcgttttcctttatgaattgggtcttgttgggtaaggtccatagcttgaagagattgaagcgcttctccagctcagtctcgagataagagttcatcgggatgggcatcagaacgcctatggactccatagttagggttttgaggaccgagtctgactcgtgaatcgtaactcagttatgtctcggcgattcttcccaactctgttttatggattatattttatgtctggacgagtaatgtgcgccaataaaaatcaggtgtacccatacgacgtcgtatcgtattggtacggtacgcacaaaaatatatttatataaaataattattagccaaaattccatcaaagcatgacgtggagctgattaaaataaaataaaatcacaatctttttaagaaaataaataaaataaatgaattaaaagactatctagaatttttgtccaccaattataatttatgtattattgtgctcttgaatttttgagtccttcaaaaatggtcattgaattattcacaagtattgtaagttagtcattctgttaaggtttgttacacgtagtaaatagaatattaaaatagttgttcagataattgtcacgccaatgccacgtcaacgtcacgtgcataattaaattttaaaaaaattaattttttttttaatttagttttacataattttttaaagagaattactctatatactatttttaatttttttttaattttacagtttgggttacttcggtaatttttatgtgaattttggttgtgatttatgatttctgatggttgctatatagatttcggtaaaaatacaaaaaaaaatatgctttaaagtgtaaatataaaaaaaatctattttttaatcattaattaatttttagtttaataatttttttgaaatatataatttattttttaaaattttatattatagatgtggcgctgacgtggtaattgactaaacagatatgttatcattttctttgtcacatgtgataaaacttgacttaatgactaatttataacactatgaatagtttagggatcatttttaatgagctaaaaaattcatgagacacaataatacataagtcataattgaagagtgtaaaaattctaaatagcctaaataaaaagaggcttctaagacagttttagagataaatttttagacttaaatcagcaggctcatgtgtgttttctagatgatattgtagtacgatttgtgtttataaccaagatcaaactaaacatatagtgtaagaactctgaataacgagttcagatgatcaaatgagagagaagagcaaggagaaggatgaagaagaaagtgatgagtggaaagtagaaaaatgctcaacaataaaggttggcatggcaaatgtatttatagacaagtccaatacaatattacaactgcttgaataaagatactaacatttttaactatcttccaactaacttgaagctaactttaactaactaatattaactgtctaaattagttagtctaatatccccctcaagtgacactggtctagaccaagtgtcatcttgtcatacaaaaaatgacatgtagtagctggaagtagctttgtaagaaggtctactagttgatcttcagaagcaacatatcgaacatcaagctaatgagctagaactttgtctcagataaaatgtatgtcaacttcaatgtgattagtgcgggcatggaatacaaaattagaaggaagggaacctgcaatgcaccaaggttgtcacaccacaaaatagggcactaaggagtgttgatgcttaattcagtaagaatagattgaatccatattagttcagaagtttcaagggccagggcacgatatccagactcagtgcttgatcgagcaataacattctattttttagagcaccaactaatcaagttgcctcccaaaaagatgcaatacccagatttggatctatgatcatcatgacatcctgctcagtctgcatcaataaagccttgaagatcaaaaaatgttgctagtttgaagaagaggccaccatccagagtaccggaaagatacctcaaggccctcttacaggcataccaatgatcagaggttggattttgcataatttgacttgacgtgttgacagcaaaggcaatgtcagccttgtcattgtgagatattgtagggctcctattacactttgatacatagtaagattttgcataggggttgttatgcaaagccttgcatga

SEQ ID NO: 220215 - DNA, 4578 bp, Cannabis indica
ttgttacttgataattcaaatatagtgaacatttaaaaagaaaactaaaaaaaaaatgtcattttaataaaataaaaatcataaaaggtttttactttttttttttgtgaaatgtttaaaattgttacttgataattcaaatatgtgacatttaaaaagaaaacaaaaaaaatgtcattttaataaataaaaatcgtaaaaggtttttactttttttttttttgaaatgtttaaaattgttacttgataattcaaatatgtgacatttaaaaacaaaacaaaaaaaatgtcattttaataaattagcgtaactaaaaagaaggcataatccacgcaattgaaggcatgagattttacaccatgcaagaagagtaggtctcacgatctttattaagactttgttgaacaactgttaagatcatcttattttcaagtcattgaatctttaatataaaattaaatctcttttttaattttttgagttctttttaaggatatatatatatatattttaatatatgattatgaatttattagaaagaggggccaagttgatgttgattttaattaagttaatctctgatctcttaatacctagctagctagctaattagtacaaattattatcataatatgacttataattaactacaaagaagatagtgatgaatacttaagaagaaaacaaagcttattattattattattatagataaagcaatgaatcaaaaatcaaaagaaaaatacaagtcaattcatattgctaccaaaacttaaggagaaaacaaagcttattattgtaaattaaaaaaaaaaaaaggttaaggacgtggaatagcttacctccttctaaatagtcaacctaacctaacttagtaaacaatcacaaaaatctcaaccattcattaccttacaatatgttacaacgaacttataactagtgtatttagtatgcatgtgatgacaagatttaactttaaaatcactaaaaaaaatgaaatgggtctttatttatgtaatttgtaggggtattcatcaaaccgcacaaactgtctgtaccgtaccatactgcataaaaatgttgtttaaaatcttttgtagtgtggttgcagtttgtatttttaccaaaccgcgcagtacggtgcggtttgcagttttgaatttaataataattgtagttcaaaccgcaccgcattgtatattacaaagtcactggtttttataatatgatatttattcttttttttagaacaaatatatataatatgtgtatattattttattttttaaagacaatttagtataatgacttgataataattatacatgttataatattaaaactttaaaagattttttttttgttttgtattattaaagctttattagtttaatttttaaatttttattataatgtttgataataataatagtgtaaaccgctcaaatcgtaccgcactacaccgcattttcatggtgtagtttttgcagttttaagatctcgcgatgcggctgcagtttgagaaattataaaaccgtatatgtagtttagttttaaaaaatagttacaactcgcaccacctacaccgcgaacacccctaatagtttgtaaattgtcttttgcatcaacacttaatatggaatacatataggtgtaattgttattgtgtttgtaagtaattgtgtaattactagtgtaattattagagtagtaattacactatatttaaaaatataataatttcatagttagtaatcataacaaaaaaaaattagtatttaatatttgaaataaaaagttttgagaattgaagagtataactgaaacttcttagggccagtttggcacatctgtcttatgggaaaaataattgtaattgtgctgtagaaaaaaaataagtgtatagcagaactgtagaaaaaaaaaaaagttcagttagtattttaatcaaaacaactttttcttaaagttgggttgtatcaactttaatttgtaattgtaacttcttctccaataaattatttttaaattgttacatttttatcacaactttgttaaaagtagcttttaacttttttaaaaatcttgccaaacaggctcttaattctatacttatgcagttacaatgtaattacatagtcagataaatacgtaaaactgtataattacttcaattacactcaatttcaattctcttgtggtataatttctctaaatgaaaaggtctccaatatcatctctggaaagttattcctaaaaaaagtgtctcccggatgttgttcccggacagctaacttgcccatctcagaaggagtcttgtggaatgatagttgagtctggaagggagttcccggatgactatcatgtccactccgggtccagtcttcaagaaagctagtctctctccggtatggatttctagttggctagttgtccttcttggaatggtagttctggatagttgacttcaataggctctatcctacccaaaagcgtcatccgcaagtacccttggtcagtgagtctggaagctcatatatgtttttggaggctctaatacttaagttgatgtggagactttgctcaaagagaagtaggttaagttagttatatttctaactaacttaacaacctcatttcttgcagccactagctttagaatcttgatcgtaagcctataaataccaccttgactagacacgagattcagaacttagttcagatgagattgagagtttgagagataaaagattgaaaggtaaatagatggaaagaaaagaaagatattgagtttgagttttgtaagaaaaatcttctatagataaagaagattatggggcataagtgtgagagttgaaatacttagtgaaaacttaacagagaatctcgtcttaactgtattgtacctattgttgttcaatcaataaaaaagaattttggtgttgttcaagaactaaagtaaagccataaattacatcaatatatcggatttgaaccagtatatattttggtgttgatttttttttattttttacatttattgcttctcgctttatgtactttgtttgcccctatttttatttgattattgttcttaatttgttaattttatcattgctaaatatttaattgtttaaaaattagttattttaattctacactgttaattataatttttccacatctctcttgactttccaaagcattaatttgttttcaaaagtccagaatgtgcctatgctataaattacaatatctctttataatatatgaagttatatatatatatatggaagtgtaaaacttggcagcagtccatgaaaatgacaactcaaaataagggtgtatagtgtagagaggtgtgaaactacgacaatttaaaatcaaagtctagtagtgatggtacatgcatcaccatttatgacactcacttataataaatgcaagaaacaaaacctaaatccatggtttctttgcatctttggatttagattgatacatattatgtgctatgtttggaagttaaattttgatgaagaaaaaaaaaaaaaatttaaaaaataaatgttgaaaataaaataataattataataatttctcatgattcaaacaaaaaaaaaaaaaaaatcatggtgaacacgaaaaactgatttttatacaatttttttctctacattttttgttattcactaaaatgatttttagtgtaaggagggaaagagttgaaagaagagaataaattatgtgtttggtagggaggaaagttaaaatgataaattttctctccaaatggacaaaatctagtacttccaataagtgaaaaaaaaaaaaaggagaaaaagacaaaataaatatattaaatatcttaaatacttttcaaaaaaaaaaaattgtatatatatataatgaggataatataataattttaataaataactttatttccatcattttaattctacttccaatatttcattcaaaaaaaaattctaagtccaatatcaaacaacatgaaagaaacttgttatcctctctttctatgtactctccatctttcttaaactctctctccttcctaatttctttccctatcaccaaacatcatcttaattataattagttaatgcagatttggccatgggtacagttaggttagacttatgcttagggttcattttgtctaggggcttaaaaaaaatttatctctttttaaaattacatattttttaattaatgttaaaaaatactataatttattttaaataagagtttaaaatatcttttttcatatatatcacttactaaattttaagggagaatggtgtgttagtattacatttaaaataaaattgtactaatattaacatatcataagtgtctcttagacttttaccaattctcaagtactaatgtactgaccaactaattaagaactattttttttttacatatataagacaataataggggtatcttttaccttttttttcatctgcaaaaaaattaaatagaaaatgggatatatgatttaatttaaatgttgaggaatattaatattggagagtccgaacatcaaa

SEQ ID NO: 220216 - DNA, 3818 bp, Cannabis indica
aacccctttattatgaagtgtacactgcacattgtgtatatgcatctcctttgcacagagcccatagttgtgttaagacaaacactttctatgtgaaataatagaatccggttaatgattagtgcactcacagattcatcattctgaatgactttccagataatcttatcgacgatcttcctgattctatctgcaatcttacccacttaaagtcgctttccttgaacaataataatgtgaagaaggtatgtacttctagaattcctatattacacgtttatgtatcatatgggtgttatatgttgactgctttgggtttccatttgttgtttgtccttcctctccgtgccattgccagattagaggccttctattgtttaaaccaatgtgagcatatgatatgcctaaatagaggcatgactgaaaaggcaaagaaaaatggcttcccgtaatatatacaaagttggcaccatgcaaaagattggctatttaagatttttgctctcatactatcaaaatgtctcctaaaattttttgtccgagaataattctaccgaactattcttagtgctgaaacatagagtttttgtaagttttatcttatatggtaaaaaaaatgctaacatggctgatgtatcattgccaaaatagcaccacatgtgtagtttaaaaattttaaaaatctattttcttatgagtaaataccattttggaccttgtgttttgcaaaagttatcaattggaccctctgtttgttaagaaaattgcatattcccctgtctgtggtgcactgttatatactgctactgcttaattcttttttctctccatttgtcaatactatatcccacgtggtgtattagttttctctgccaccaataattgggaagattccctttttctgttattatctttccgttatactttttcgttttcagtgccttgtaatcctttctagaatattctttggtatgtaaagatttgtatgtaaaaaagggttggccgcctgctctaaagagctggttttatttcattttcattcttctctattttttaagttggtatcagagccatctcagactggagataaaaccccgcctgtcaacccagctcaaactggtagcaacgtcgctaaccagtcttccacatctcagaatgcagggtctgcatcgaatctggttgttccacagtttggaagcactctcaatcaaccttttgctctcaaattggatagaaacaactacaccttgtggaagaatatggtatccataatcgttaggggtcatcgcttagatggatacttaaacggaaccaaaaccagacctactgagttcatctcctcaccatcgattgatggtcaacctggttttacagtcgaagttaacccagagtacgaactgtggattgtccacgatcaactcctcatgggctggttgtatggctcaatgatagaaggtattgcaacggaggttatgggctgtgctacttcttcagatctatggcgtgccttggaagctctctacggggcccactcacgagcaaaaatggatgaatgcaggacaaagatatagacagtaagaaaagggagtacttctatgacagactaccttaggcaaaaacgacagtgggctgatgtgttggctcttgctggggctccctaccctgaagatcagcttgtctcgaatgtgttatctgggctggatcttgactatctaccaatcgtacttcaagttgaagctagaacctcaacttcctggcagcaactacaggacattctactgtgtttcgatagcaaagttgagaggcttagcacactttcaggatctaacaaatctctcaacagtggtggtgcaccttcggccaacctggctaacaagagtagtggacaaggaggaggttgtctaggagcacatcgtggaggaagaggaaatcagtacaacagaggaagatccaatggtcgaggaaggggtggaaggtccagtggtcctaaacccacatgtcaaatatgtggcagatatagtcatgctgcttctcactgctacaacaggtttgatgaaacctatatgggatccactcccagcagtgagacaaacaaaaatcctcagaacccgtcagcgttcattgctacacctgagatggttgaggacgatgcctggtatgcagacagtggcgcaagtaatcacaccacttcagacaccagtaacatgagtcagaagactaagtatactggtaaggagacactgtcggttggaaatgataataaactcactatctctcatgttggatctagttttattcctacctctgctcaacccttaattttaaaagatgtgcttcatgtacctgagattaccaaaaactttgttagtatctctaaactaacagctgataatgatgtgactgttgagttttctgctggttgttgttgggtgaaggacaagggcacaaagaggaagcttcttcaagggagacttaaggatggactctatcagttcaagaccactccaaccgagtcaaatcaaagtcataacacttactccagtaaacaatctgcctttctagttagttcctctaaatgttttcaatcaaatgtaactcagtctttcatctgagcaaagtagtctttcaattaaggataagtggtataggaggttaggccacccatccaatagagtccttgatgtagtcttgaatcaaattaatgaaaagaattttaaaaatgctactcatcatttttgtgaagcctgtcaatttggaaaagctcatagcttacccttcaaaataaataacagtagagccacacacttgcttgaccttatacacagacatttggggaccagcacccattatgtctaacactaattataaattctacatacacttcatagatgaccatagtaggttcacctggatatatccactcaaagctaagagtgatgctctcactgctttcattcagttcaaaacccttgttgagaatcaatttgacaggaaaataaaaagacttcacacggaccaagccaataccaagcttgttgttgaaaatgggattgcctttgatcactcttgccctcatacttcagcccaaaatgggagagccgaaagaaaacacagacacattgttgagatgggtctaaccctcctagctcaagcacatatgcctctcaaatactgtgggactcatttcaaactgctgtttatttgataaacaggctacctacaccaatccttaatcataaaactccttttgaaatagtgaactctaggaaaccagattacaaatttatgaaaacttttggtgtagcttgctacccttgtctaaggccttaccaaacacataagtttcaatatcattccaccaaatgtgttaaccttggctatcactacataagggttacaagtgcttgagtagcactgggagactatatatccagaaatgtgattttcaatgaggatgagtttcctttcaaaactggttttctcaacacctacaaaactgagtctcctgttcaagttatggttccattttggtctgcctctctcaatactcattgtaaataatacttccacacactcatactcgcaacaaagccaaacaactcgaactgatagtatgcatcttgaggaatctcgaagagatgctactgatacaagccttgtctcaacagacaacggccaggtaagaattactagggctgtacaaaaaaatttgtaaaccgcctaaaccgaataacccgcccaaaccgaaccgaaaaaaccgataaaaattacaaaccgaaataacccgaaaaaattacaaaccgcccaatctgttaatt

SEQ ID NO: 220217 - DNA, 2189 bp, Cannabis indica
ttttcatgctctaaattgggcattagcaaaaacaacttcctattactcgtattgaaacagatgccttgcaagtctcctctgttttaaattatgcttctacgaacttatcttgtttttctgatcttatcatgcatgtcgttgtctgttgtcctttttccctcaggttttaattacccatgtcaaacgatctgctaatcaagcagcacatgatttagctaaattcgctttagggatgatgacattagttggataggagaaactccctatcctatattctctgttgttgtaaatgattcttaatttataataagagtgaattttatacaatttctacaaaaaaaaaaataaataaataaataaaacttgatggtgccaaaaaaataaaaataaataaataaagagcaaatgaattgctgaataaaaattaatcatattatattataattttcaacacattaatacaatattaatttcgaaacaagtaaaactctatattatgtagcccaaagaaaccgtccttccacaataatatttatttatttatttataaacaaatgaagtttgatcccaagtagtctttccaatactgccgcattctccattaagtctctaccatctcagttttgctgggaaatactgtcacaaaaaagcctcattcaattaaattaaataaacaaaaaaaatgaaaattggtgataattctcaaacaacaaatgaaaaataataattaacaaaataaataaataccttttcaatgagtgataaataatatggtttcactttctctacatccactctaactttgcttttgctgtagagatcgtacttgctacaaacaaaaagtaatataattactacttaaataaattaattaatattatataatgaaaacaagtgattaatatattttctttacttgaaaatatgaagccacttcaagttttctttatcctccttattcatgaattgtttataggctccacacctatgtaaaggatagaatgagtggtatctgacaatgaataatccagcttgaggcaaagtagtcccattttctttggccacctgaaataaaatattgaaattaaataaacatttgtttattaaagaatatggattatccttagtagccacaaaaattgacaaagatcagttaataaaaaaagaaaagaaaagaaaaatgtaccaaatacatgtagtcatcgtgtccccatgatatcattacattatctaatccacacccttcagaataaattccattctttgaattgaattcaggattataggtatctgggttctccttgaaatactgaaataacataaaaatgttaattatatttcatcaatactaataatcaaattttatgtcagaagctgaaatggaagaaaaaaaaaaccttgtggtggacaatagattcatcaaaagcacaccccagaggatgagtgtcacctgtaacaaaacatatttttaagatatttcaagttaagaaaaagacttttttataaagatataaaataagataaacataattctaataaaccaaatactcaccaacaacagcccattgaggaagttccccaaaaacagggagaagcagaacctttccaaggtctgaaaataatgcaaaaaaaatataaaaaaagtcaaattaaattaatatatattatctttccaaagctagctagagtttgattaattttataatattccttattttggtgatatccaaaagggtataaaaacctgactaaagataccactgtcacatattttggggagagaataagtcaaatgcagccgaatataaaataataataataaattcattacataaaaataatacattgtctattttggtatattttgtaccatgaataagggctgtcaagtggagccaatcttcatcagggtagtcttttctgatggcttcagcagtttgcaacaagtgttcaatttggggttcatccaaatcaggatcactatcatcaacaacctcattaagaagttcacaacattcccatatactcatttcaaccctgttcaactttccatactcctctctcattttcttcacctatacaattttccacatatattccaaaatttcaacatcatgatcaatatccaaataaaaaaaaaagttaattttgatcttaattggatacaagagagttttcttacgaagtca

SEQ ID NO: 220218 - DNA, 3869 bp, Cannabis indica
tttttcacattcaattgttatactttagttaattgtgatcgtgagataaatatatagattaaatttaaagttcaaatcaactactataaaaagaatataattgtttgaactttctaatttttataaatatgtataatatatagattatatataataaaaacatatatgttagacacttcatgatggtgagaatggtaaggctgaaacttcatgatagtgttgaaagggtgctgaaagacgtccgactagtacctgatctcaaaagaaatttgatcttttgttggtttgttagacaatcaaagatttcttgttaaagttgagagaggaatcatgaaagtttgtagaggctcaatgatggtaatgagaggaagaaaatcaaatgggatttatcctctggaaggtaccattgtgaaaaatataaacgcgtgtgtttcaagaaaacacgtaaatgaaactaaagtatgacataagagaattggccatattagtgaaagagggctacatgaaccacataagcaaggattacttggaaaagtaaggcttgagctgttggattactgtgagtattgtgtccctggtaaagcttgtagagttaagtttggaattggcaaaagggataccaagggaacactagattacgttcacaatgacttatgggaaccctcgaggacaccattgcactccaggagcaggtattttctttcaatagtgatgactactcatgaaagttatgggtgtttattttgaagaataagatggaagttcttgaaagatttaagcactggaagataatgattgagaatcaaactggaaggaaagtgaaacgactaagaaccaataatggcctaagtactgttcggatgagttcgatatgttatgtaagaaagaaggaatagcaaggcataagaccatgagtaagactctttagcaaaatggactcacagagaagttcaataggactatcttggaaagggttaggtgcatgctattgagtgctagattgcctaaagcgttctaggaagaagttgtgtccactacaacttatttgataaataaatgtccgtcaatagaactggatttcaaaacgccagatgaggtgtggtgagggaagccaacaagttatgaacacttgaaggtattcagatgtgtctattatgctcacattaggcaagggccttaaagtgtattttcttggggtatccggaaggagtcaaaggttatagactgtggtgtttggagcccggaatgagaaaaggtataattagtagggatgagacctttaattaatttgttatgggattcatttacaaacctgctcgaagtcaagccaatactgactgagaagaaattaaagctctaggaaccgagcttgagtgtagcctctaggaagggtggagactgaaacacctgtagatcatggaagtgatgattcagaagatgattctagaagtaataatttgaaaagctgtaaattggcaagagatagaatgcagagagaagtaaaggctccagataaatatggacatgttgatttaattgcattcgcatttcatgttgctaatcagattgtgcatgaagaacccactagcaatgcacaggaaatgaagagcaaagattagaagaaatggaatggagctatgttaaaagagatacactccctaaagaagaaccgaacttgagatgtaatatcgatgccagaagatggtaaagtcatcggatgcaaatgggtgttgaaatgaaaagaaggcattccaaatgtacaagaggcacaatataaagcaatgttggttgcaaagggattctcttagactgaaggagtcgattataatgagattttttctccggttgtcaagcacagattgattagaattttgttggcacttgttgcgtgtcaagacctcgaactagaacaattagatgtccaaactgccttcttgtatggacatcttgatgaaagaattctaataaacttgatgaaagaattctaataaatagcctgaaggatttgaagaggttggaaaggaacactgggtgtgcttgttgtgaaagtctctgtatggcttgaaataatattcgagacagtggaacatgagatttgatgattatgcgactaagataagtctgaaaagaagtaagtttcatccatgtatatatttttgagagagaaatagagatactttataactataactatacatagatgacattctgatcgccagcaagagtgtacaagagatcaaacacttgaagcgccagctaaaaatggagtttaaaatgaaagatttgggtgcgaccagcaagatcttaagcatggatataagaagggaaaggcagaaaagactatgtacttgaatcagacgagctacataaaaaaggttctaaatacctttgaaataagtaactctaaggcagtaagtactctccttgcacaacactttcaactgagtggtactcaatgctggtagatgatactaagaagacggagatgtcaagagttcaatatactagtgcagtgggctccttgatgtatgtcatggtttgtacaagaccggacagcgtatgcactgaggatggtaagtaggttcatgggaaatctctaaaaggagcattgggaagccctaaaatggattctacgttatttgaaaagaagtgctgagaagggactgatatttggcatgaatgataggaaggaaaacttggatgttatcaatggttatgtggactctgattatgcagggtgtattaatacacggaagtctctgaccagatatgtgtttactatgttcgggaaaactactagttggaaagaaaaccttcaaaaggttgtggtaatgtcgacaactgaagcaaaatatatggccttgacggaagagattaagcattatggttaactgggttaatggaggagctgaagctcaatcaaaaggttattattgttcattgtgataatcaaagtgcaattcaattaactaagaattgtgtgcaccatgagcgtactaaatacattgatatcaagcttcatttcatacgataggttgtggagaaaaaagctgtgaagatcgccaaagttatcactaaagacaatccttcagatatgataactaaggtagtgccaagtagtaagtttgagcattgcctgaagctaattggagtcagctgagcccagaggggttgagaggacaacagtatttagacaatgatgtattaagtgacttcaacttgaaaccaagatggagatttgttggttatggtttgcaagttttgtcgtccgggattagaagctgtgaatttggagagcaaataccagaagcttagtgtggatccaaaaagccctgtgcagaaggtcttgtagaatccaaaaggttcttcctgaatagcttgtacaatgtatggaatgtctctaccggatagcttgtctctagtttggaggtgcactcccagacagcattgtcagtcttgaaggttcattcaggaatgaagtcatgtacgtcttcggaaggcttgtatgttataatgcttccagattgtccgtactgaaagcgtgtattttaagatgacatgaattattattgctggtgatgagctggatcatttatggcggaataaatgtgccacgataatttaggagacatatttagcaacaatgcaaatctatatatagatgatgtagatctttgtaagttgttttttttttttttgtaataagacatgatttgcttgagtgaaaatcgtgattgtataaggtagagtctaaactagagagagaaacttcttttcgtaatctctaagaaatttgtaaagattcttgtaaccttgtaaaaactgatattaataaagatatggttgttgctgttccaatcgagatgtag

SEQ ID NO: 220219 - DNA, 4327 bp, Cannabis indica
ttaaccaatgccctggaaagaatatagcacttatccaaggtgcaagtaaactatgttgtagattcacatatcagttaaaccctgtgtactgatagatctaggaatatatatttaatcacataatcttgattactttccactgtgctaacgacacaataaacaagaacataaatgtgatatgggtttggatgaatttataaataaacaagtaaatgataacatgaaccaaatgacacacaaataagtgatgaaaacacttctgtttctttattgatatttaaaagataaagattacattgaaattggagttttgtttagggcataaaacccaacactctgatggtctctttcttgttacgtttgactatgaaggggataagagaagaatcctagatgggcaaccttggcattaccatagtcgattttgacctctttgatttctctcaaggaggccaaatgatgaatcctttcctaactcactccattggttttgcgcctttgctcaattcaaacatggcctctatttcttatttaattgctcccaaaaattcccaaagtattatgattcccacccctatcaatcctaacaatactatggattatgtgccttttggtacaactagtaacaactcttattctatgtcccactcttcatgccttacttcgatctccactgattcaatcattgttagtgatagtctggctttcaacaattctgaattagtgcatgcaacccactctcttgctgaagctctgccatctctggctttggtccagaataatgctaataatcaaacctttaggatggatgctcatcgacctgattctcaggttaaaggcaagggacttgcttgtgcctctggagttaaaaggccatcctttcaaaattttcaagccagtgttagaggcttcgtgcgctctatgctcaagtgtgctagggctggtgaaacagactctgctgctccttcttttgttgttgaacctgaataggtgggtgaggctgagcacattcgcccgcaaaaatgagtctcttgagttggaatgcttaaggtctagggaatcctcgagcattcaattagcttcccttcctggtcaaaactcataagccaagtcttcttttttcatggaaacaaggcttaagccccactctgttgttgggtttacaaggactttaggttttgcggttcctaggcagcatttcggggacttcttcttttgtggggggctgatgtttatgttaatattttgaactattcctctaatcatatagattgtaatgttggttttaatgttaatgtatgtagcactttacttgcttttatggttcccctgttagtcaccaaaaatactttacttggaaattattgcatgatatctattataatgctcttaatttgtcatggttgatcattggtgattttaatagttatctttttagtagtgataagattggtgggaatctccctaatcagccttcaatgtctttttttgccaatttccttattgaatatgctatatttcctcttccttatgttgataataagtacacttggactaataaaactattagtgaaaggttagattaggtggttgttttagagtcttggtgtgatctctatcatgataatactcttcaccatttaggttttatggttcagatcatcgtggcttaaagcttgttttagctaatactagctctaatcctattaattttgtgaataagagatctaagtttgaaaataactggcttgatcatcccaatttttataagcttgttgacactgcccgaaatgtttgtcctactctgagtcagcctaagaaccacttccatagtttcatttccaagcaaagccactgtattttttctcttaaaacttggaataaaaataaaaatcacctttttaagactaggattcagcaccttactcatgatataaacaatattcagaataaggtggttcttagtgatactaataaaaattgcctcactcagctacaatatatgttagatgtgatgttgtataaggaggaattttattgaaaacaaagggctagaattgaatggcttaaggttggggataaaaatactaatttttcgcatagatatgcttcctttcataagaaaaccaacagtatcaagtacctcaagattgaggatgggaatgtggtcaatactcaggatggtattgttggtttgataacctcttactttgctaatctattttcttcttaagggagtgatatttaagttgttacttcaatttttgcttcttagggacctggtcttgaggaacaggatatagggatcttagcccaggattttactgctgatgaggtgcggaaagctatcttttagctttctggggacaaggctatagatttagatggtcttaatgcatacttttaccaaaaaaaactagtctgttttgggtagggattttactaatgcaattctagattgtcttaataagagagttgatttcactaatgttaattctacccatattattgtaatccccaaaaaatagcatgctaatatgttgaaggatttttgacctatcggcctttgtactacgttttacaaagtcatctaaaaaaacccttgcaaataggctcaaactgattctcgataagattatatctctcccttttagagtacgtttgtcttgggtcgtgtcacttatgataatattatcattgctaatgagcttgttcatgctattactaataggagagttggtaagagagggtgagctgcactaaagcttaacatagctaaagcttttgatcgagttgagtgggactttctaacgaatctcatgtttcattttaacttccttgttcactttgtctctctcatcttcaaatttatttctacagcatccatctctttttccattaatggccatgttcaaggaactgtcaaacccacttgaggtcttagacatggagatcatttatctccctatttgttcattctttgtttagaaggccttttcacaattcttaggaattatcaaggtaggggtctccttcgaggcattgtcatttctagaaatacccctcccataactcatctcctttttgttgatgataacatcttgttctgttctgctgatcaaagttactgtgatgctttaaatcatgcacttgctatttactctaaagttcctgggcagggtatcaactttgctaagtcctctattttgttttcacctaacactagcactgatatcaaggaccttttctttcacacttttcaattagaaaataggccttttatcactaaatatcttggtctgtcgcagtgtctctctcgttcaaaatatcctgctttcacctttctcaaggataaaatatcctcaatcattcactcctggcgtcataaatggttctctaaagtaggcaaagaaacccttatcaaggttgttcttcaagctatcccctcttacgatatagcttgctttcgtatacccacaaacatatgtaaggaaattgaatctcttgtctccaaattctagtgggggtcctcggttgaaactcgtaaagtccactggaaaaattggagggttgtttgccaatccaagtttgtgggagatctagggtttagatctttaattcatttcaatcaggtcatgcttgctaaacaagcttggagaatccttaagtgtcctgattctttgcttagtttaaccttcaaagctcgatattttactaatacctcaattcttgaggctgctcttggccatagtccctcgctctcctggcgaagcattctttggtgtcatgacttaatgaaacagggcttatttagaagatgagtgatggtaagggcattaaaactataaggatcattggctccctaatgttacattcaaatcatactcctttctttcacccgagcccaacttgtcttattaggatttcgctaagctccatcaatattttgatgatccaattgtagataatatcctcagtgtttcaatttcaggcaataattgcaaggatgatttaatttgaggccaggatcttttaggtatttttgatgtcaaaacaacttaccacctggctctcaaatctagggattcgccttcttcatcctcaatcgaaggacgtaaacaattctagtcaaaaatttggtcttccattgctccacctaaagttaagcatttgatgtggtgtgtgcttactcactccatcccaatcgccttttccttattctctcaacatatcattccctcccctatgtgccccctttgccaactgaaatcagagacaatgaaagacgctatcttggaatgtcataatgaacaaaaaaaaaaaaaaa

SEQ ID NO: 220220 - DNA, 2625 bp, Cannabis indica
caagagagagagagagataatagtaacagcaaagtccaaccacatttggcattgactattctgaaatgacaaactagaaaaaccatgaaagtcatgaatcagaaaagccaaaagtgaagcaaacccaattcttctttcctcaaaaatggtggggatctgtgatctaaaaaaggcccaagatttgttgcttaaatatctcaaacaccaccttcttcacttaaccctcctctccttttgtaaagactccttttttttcttcctccttttcaccaagaactcaaagtgcccaaaaagagaagaaaagaatccgtttcaaagatttccctactttactttaaactatatgaatataaatatataaatataatttaataatcaaaaaaagacaacctttcaaacagtgaaacagaagcaaacacagagagagagagcctcagccaaatcgaaacgtctaaaaataaaaataaaaaacgagtctttatatatatttataatgcaattttgagctcggtggctgtaaagatatgattttttagcaatgaatgaaatcgttgggattgagattgaagagaatgagccaaaaactgagctcttggttgaagctctaatggccgacaagcatgctttcatatcatcgctctcattctctctatactcaaaaaaagtttcttccttttttttcattttttttaatttaattttttttcataattattttttccaagatcgattggaaaaagactcatggggacaagtgttttttttaaaaaaaataataaaaagataaaaaaaaaaaattaattgtgaactctttaggctaccaaaccaaacccaatcataattttctcgggaaaatatttctatgcaattttcttggttggaaaaaaaattactctgtattctaagttggcgggcactgaagtctatgagcaaaaaatttcattattttttttatttatttttttaaaataaaacaaaatgagtaaataatgatgatgatattaatgtctaatcttttgccacatcattgatgtgctctttttttcaaatataatttcaattaaaaaaattggtctaaattgtattttgttattgtgatttgatttttattgttgtgattaattttgtctttatgatataattttgagtgtttagtttatttttatgacatgattttgagtgttttagtattgtctgtgtaacatagttctattttgttctttcttgttctaacagagattggaaatgacaagttttctgtgattgaatgagttgttagtagtgcagttacttattttgtataatagtttagtgctcaagctacgatattgaatgaacttgatgcaataatttttactattatgtctttcgggcagtaaataaaactgaatataagtattcttaaagttaactgtaatgttgtagtttgagaattaaactgctgattatttgtctcttttttttttattttaatcttgattgtatttttaatgggaagatattccaattaaattacatactagtattttaatcgattgatattaataaaattgaataatttagtgaaaaaataaaaaaatatatatatatatacttatgtttgttaatgataaaaaaaaaaatatttgttgtttacatcactctatatagtaacataattttcatgattttaaaatatataattttatttatgtttcatatgttttatgaaaataataatacgtggggacctcaaatcataaagttttctttaataactcttgttgtatttaattattattcccaatttttttaataaattaatatttttttccttatgtgtaagagatcgattaatttaaaatttaataaataaccctactttaggggaatattcttttcttgtcaattcttaaacttttttttttttgtttccttttagatgttaatattgtttttatttaatttttttttcttgaaagaaatggaatgaagaaatacaaaattttcatccaaaaaacaattaagaaaaatgtaaattaatttattggacactttacaagaaaagcaactatcaaaaatgcaagaactatctccccttttttttattttttttccacaaaattatctccaaaaatttaaacataaaaatttgattctcaataatgagtttcttaatatacttttaatatcttgaatacatgatgttatagatataaagaaattatatttaaaaaaaataaatattgtcattttaattttggagcaatcactacatgatagtattatttaaggcataatatatttaagaaaaaaaaaatcaaataatgatagcatagaaggacacttgttgtaaatagtaaagaaaatatatttactttttaattaaataattatacgataaaaaaaaaaaaaaaaaaaaaaaacttacccacaaaattataataatttttatttaaagtaaatataaatattttttataacaattaaactccccaagacaaaaaatttggatccatgatagaattatttaaggcatattataatttttttaaaaaaaaatatcaataataactcgtaaaaagataaggtttaaataattatttgagattttttcattacattttaatttttttttttttgtat

SEQ ID NO: 220221 - DNA, 2104 bp, Cannabis indica
attcagctttcacatcatgagtcatcagctcaatccctataacttatggatcaatttacgtggatacgacatacacacgatcccactatcagtgtagttagcctcaatcccacgatccttgcattcagcattgatcccacgatctttctatttatgcgcattataacgatagaggaaactcttcctcctcaagtttcccagccctataaatagtgacgtatgtttactgggcaaggatcggtcgaaaagcagctaagataagactatattattatctaagaattatatattcagaaatactgttgtaagagctataagaaatggaatcttcttccttatcttaagtcaatacaaataacgaggattaagctattaccaaactgctcggggctgaacctctataaaattcctgtgtcttattattgctttatcatatatctgttactacatattgtttatcgcttataaaatagactcattgttgttggctaaaagcgaagtcaataagaaccaaaactagaagtagactgggaccctagaacgggaccagaactaagacttggacttggaactgtaactggacctagacctagacccagaaccgtaaccgaacaaggcccagactccaactcaaacctagacgtgaactaggacccagacccggatcccaatccagacttggactcgggacccgaaccaggacccaagctcagacccaaacatggaaccgaacacgggcacagaaccagagacgggacctagaactacaccccaatcttgatctcggacccaaactaagacctggaacccgggacctgaacttgaaccagattgggacccgtgacaaggatctagatcttgacttgggatccacaaaatgggtcttggaaccgactcgtagtctgtgtttggatctgggactcagactaggactaaaacacagatcttgacctagacctgggacccaaaactagaacctaaacaagaaccgccggactaggaccctggaacaagactaggaccatgacaaggaccctaacccacaccttgaattagaacacagacctagccccaaacccaaaccaagaccgaaactcaggcccaaacatggttgtgtacccagacagggaccgagacccaaacccggacctacatctgggacccgatcccaaacattgactcggacctcgaaagggatccgaatacgaacctagactcggacccaggcccaaacggggatcgaaacccgagacatagatcaggaccaagatcctaacccagacgcagacctggacccgtacccaggacccaaacttggacctagacccgaacccaaacatagacagggatccagacttggacccagacccggatcaaaactccaactaggactcagaccctgacccaaacctggacccaaacccaaacccaaacactgagtctgagtgtgggtctgtgtccgagtcctggtccagttacaattttgggtctgggtccagatcctagtgctggtcctattcttgggtcccgatccgcttttagtttcggttctagtttcaagtcatgtggtacagatcgtgtccaagcattgagtcttggatcccaagtcctgaggtgggtcctaggtctaggtttgggtctggggtcaactcttggatcccgatccaagttttgaggcccatgttttggccccaatttgggggcccaattcctcggtctgggtcccccatctatgttcgggtcctaggtcccagtccatgtccaagttcgtgttccagttttggttcaggtctcgggtctcggtccgagtccaggtcccagtttgggttcgagtccgagtttggggtcctaggtctgagtttggttcatggctcctaggtccgatcctggtttttgggtttgggtctaagtgcgtgtcccagtctaagtccaggtgccggtcttggtttaggtcctaggtcataggttccggtccaggtcgtagtcccggtatgggttctggtctgagtttgggtcctatttttagtcctgttacattcccaggtctgggttcttgttgggttttatgccctaaataaaattctatttcaatgtaatccagatt

SEQ ID NO: 220222 - DNA, 1253 bp, Cannabis indica
ggtcaactaattaggcttgaagtaaatattttccatagtaatttctgacataattttttacataatttgagtcaatttgctacatgtttacctaaatttcaataagagtgacatggcgatggcgagtataacgacatgttgtacaagattacttgagactaaattaatgagaaatatacaatgttgttacccccacaaggtatattttatgtatgggaaagagatttgacactactataaaaatattttttctcgacgttttaaacagtcgtttaaagtattcctgtcaatttatataatcgtcgcctatacgaccgtcgcaaaatgagcaaaataggcgacagttacaaaccgtcgctaatgtagatttctcggcgggttaaaactgtcgcctatagtacagggcacgattttaaaccgttgggaaatgtaaaaaaaaaaaagagaataaaataaagatttttctgccattttattctacatttgttttaaaattttacttaaattaaaataaaataactaattaattttattacaacaacaactaactttaaaacacattaaatctatacaataacaaaataatatatataataaataaaaaaaagtatataaataaataaatatatttataccgagctcggagtgagagagagagagagagagggagacgacgggatgtggtggtggtccgacttatgagacagagatgagagggacatcaacgagaggaggtggtggttcgacgtatgcgacggagaggagagggagaccgacgagaggaggggtgggtggagatgggtggacgagaggcgagaagaaagggagatcgagagagggaggaagacgacgagagaggagtgcgatggtgcagaggcatgggtggggttttggagagttaagatttttattttagggtgtggaaaatggaaaagaaataggtgaaaagaaattggtgggcatgtgggaaatgaaaaaaaagtaggtgggcacgtgggaaatgtggcaagaagtaggtgaaaattttttaatgggcccttattcccgacggtttaaaaccatcaggtatagtataggcgacggttttactatacctgataattttaaaccgggtataagggactcctaaaaatttgcattttattaaaaaacgttggctcttttgtttattacgattttaaactgcaggaatactaaatttttcctgacgactttaaatagttactaaatttttttagcgacggtccccgaaa

SEQ ID NO: 220223 - DNA, 1665 bp, Cannabis indica
tagttgatgacatcctgtccctcccaccaccgcaactccaccaaccctacaccctcttttggcaacacaccacttcgggaatctacactgttaaaactagttatcatctggccctgaatatcaagaacttagccaaaccaacaaccttaactcctaacagtgtccctccaaaaattaaacacttcacgcataggctttgccacaattctcttccaactaccaataacctttttaataggaaaagtaggaccactcctctctgtcccagatatcaaatatgccctgagaatactgagcgtgctctctttgaatgcaaatgtgttaagaatatctagtcaggtacgtcttttaagcctcttattaatgctatgaaaggaaagagtacttttgacacacttctttttcttaaatctcaactgcacaaaaatcagattaaactaatcctttgtgttttgtggaagatctagaatagtagaaacctctttattttcaagaatatacaagaacaacctcttaggattgttcaagaagcagaggaatatcttcgattctaccaacaaaacctgacagttataagtcacaacatctaaggacgagatcaacccagccaggatacttggcagccgccagatgaaggtcattaaaagctcaatgtagatggcacaatgtcaactaaaagtgcacgctaaggtgctggagcactggtccgcaactcatcaagtcaaataatagcagctttagctcagggtactgtaggacaaatgccaccacagtctgtagaagcttgggcaatgctccaggccctacactggtgtaaagatcagagaatcccatacatcatgttgaatcggactgcctcaatttaattagagagattaagttaagacacatcatgcttacaagttacggggctcaagtagaagcaattaaggaagtgttatctttcttcactacatccctatcccacacccagagaactagaaatgctgctgcacatcaccttgcccaagcgtctttagggttacataacacgtggacttggtatggaagtggtccctttccttttaatctttagctgttgttaggctatttttagcctaagttttggaatgattttatagttgttttctttgttaatgttatcttttggaatggttttacgcttgatttcctttgtttcagatccctgaggcattagagttcaaattctatcgattgatgaaaagacagagcaaactggagaaatatctactgaagctgacaagtatgcctcagtagtcacgaccaccattttccatggttgcaaccctttttcatggttgtgactatggtcgtgactatgaggcataggcagacagcctgatttttaagttttccctatggtcgtgactaggctttatgtagtcacgactatgggctaaatatgggaattttgggtagttttggaatttcgccatttagagatagcaatcctaatttctatttaaggggctcatgttacacaagaaggatactctgaggaagaacttgtggcgacccggagcaaaatcaccaactaattctttcttaactcttgatttctatgttaatttctattttgaatttgattaagaagattatgaactaaactcctatttggggagatgatgaatgttgattgacatt

SEQ ID NO: 220224 - DNA, 3995 bp, Cannabis indica
atgcgacactgatggagcagttcttgagacacgcagcccttgtaaagacccattgttttcctcagattgtagtaaccttgaaagaccttcagcactgatgagaaaaaggtatggcgatagcggatcaccttgtcgtatacctcacgtgggaactatttctccaagtactttcccattcagcagaaaagaataagaaatagactgtagacatcgaagtataagttccaccgtggttgtgccagaacccattttcaacatgacttgagtaagataaggccattcaacacgatcaaatgcctttgacatgtcaagcttaatcgcagcatatccttgggtgcctcgttttcgattcttgagtgaatgcaacagctcaaaagctataagaacattatcagttatcaaccggtgagacatgaaggcactttgatactctgagataaccaatggtaagaaaggctagattctcaatacaattgacttggaaaccaatttatagagaactgtacacagactaataggacgataccgtgtaatgagctgaggttctttaatcttgggaatgagtgtgatgatcgtttattgagaagagtaggatccgcaccattattgggaacatctaaaactgattccgtagcaagggagccaacaatgtgccagtagttagtgaagaacataactgacataccatcaaacccagggctcttatcatcactcatcgaatttagagcattgacaacatcagctgctatataaggtgcagaaatggtttctcgagattgtgcatcaattgtggttgggataacttccagtatagcattaattgcatgatcatcaaccccttggctgctaaaaatagactgaaagtaagttgaaatgatatcgagcaaggcaggttcacaggtctaagtattgccagcttcatctctgagttttttaatgcgattgttgacagatcttgaattcgcaagttgatggaagaacttggtatttgaatcacctgatttcatccacgaaattcgtgccctttgatgccaataatcctcttctttagctagcaactcatccaagatcaattctgaattttttaatgcagtaaagtgttgagggtcagtgcttgatgaattctgaagtgctgatacatgattatgagactcttttatttcctgtttcagattaccaaaattggagaaatgccacttttgcagatttgaagcacagtttgaaatattagtagtgagctgaattaaagggctgctggcgcaaggactccaattggcaagaataatctcagcacaagcttcttcctgcaaccagattttttcaaatctgaaccgtgatctaaactgtggagactcaggccgatcgataagggtggtgacagatgcttttaatgctctatgatcagagttataaaaatccaaatgtgttaaagatggagcaagaaaagtagtatcccaatgactattggtaaatccataatcaaggcgttctttaacatttccattcccttgactcttattagtccaagttgttcgatcaccttgaaaaggaatttgacacaatttgcaagtatctatagcagaatgaaaagcattaatctgagcatcaactcgccttgatccaccaattttatcctcatgagaaataacttcattgaaatcccctaaaaccagccatggagataagggtgatatgtcacagcaccgacgcagcagagtccaagttaagtgcctttgagaagcacaaggatgcccataaaacccaataaaatgcaaagacggcccatcttgactttccaaaaaacaatcaatgtggtttaatgagtaattgttaatggaaagagtaacatgggacttctaaaggagcataagcccaccacctagcccttgtcttggaacttcgatgccatgagggaaatgcaatttacaatgaaatctatctatactaccatattgtaacttagtttccattatgaaaagaacacagggagcttgctcttgaacaagcaagcgcaaatgcctgaatgcactcgggttccctaaaccccgggcattccaactgacgagaatcatggctgagtgaggtgttgcagagcaacaaccgttggaacttcaggctgggactcctctgaatccaaattactagtgttggaaacatacggagttggactgataccactcggtgctgaagagtccgactggatatgtatagcatttgatcgacatcgcttaagaacattccgaagagattccgagtcaagttgccttttaaattgcttattgggattaatgttttcgagttcatcatccaagataaggactgctttgcctttagcatttggcagaggaggttggaatgtggcagaaatatttgaggagacaatggtgctataacttggagatgtcataggaaaggtagcaggcataaatggtgatcgggtggatggcttaactgagggtgaattgggtggataagtggcaatcattggtgtaatgggaagatatgaagggaatggaataactggtgcttcatcagagaaaatagtgcaggaaaccggtgtagtagcaggtaaggtaatggttggggaagtaggtgtagtaacatgtggatttgaatgtgactttgaggatgatgaagattctcggttagtcatatttggtggtagaggaagtgaaatcttagccatatttgggatagcagcagtgaaagaattcttagcaagtctagtcattaggggccatgctccacctttgaaaaaatcttatctgtagcgatcataaccagattcaggaagaggagatccaatcatagcaggaaaatattcaagagaaggatcattgccattgtaaatatgctcaagaaacttatggcatgattcaaaaggatgtccaatggtgccgcattcaaagcaaaactcgggtaatctttcataacggaactctaaccagaattcatcaagtgagtccttaagtttcaccattttccctctgagtaacggcttggaaatatcaagaatggcacgaaaacgcagaaaaggaccccaaccttcatggacatcaacgtaagtaccaaggaggtttcctgcccattcagccattgctttagttttacttaaaaacggtagtctgtgtagttgaatccagaaaggagtgagggacatagcttcgggtgtaggtgattgaagggtagtaggtgaagataacacataagatgattttggaaatgccacggttccagcaataacactttcttaagatctccaaggcatccaaaagtaacaaggaaaagacccgaatgatgatcagtaatagtaacagggtattggcccttccaaaagccactcattttaatgcggaatgttttccagctaatatcccgagaggagatgactctagcatatagaacatgattcgaatgagaagaattaccattgctcaaaccaggaggaagcgttagaacttccctttcagattcagtgagatgtaaagtatgattcatatcatgcaagaggtgatccatgaaggctaagacaaaggattggaatgcatgaatactggctaaaatttgcagaaattcaaaaagaagggtggagggaacagttaaaattcaaatggagaggttatcatatacggttgaacaacaaagaaaaataaagggagaatattaaggatagagatcaaagagtctggaagttaaaacagttaaaaagaaaaaaggaaactaactaccacagagctttttaagggcacacatatctacataaattaatgtatatagtgtgttgtttgttattgttattattattcttatttaagtttgtatgtgtttttttttattatttttgatactttaccgtactaaaaatgaagtttaaatactttgttcaacatgtttatttatttattttttctatttttttatacgcgtgataaataattttttaattcttatttaataaggcattataaactattcgagttttttttttttttttt

SEQ ID NO: 220225 - DNA, 7427 bp, Cannabis indica
aaggtgagtaagactactggaatcttataagactatgcatttggttcggaggaatgaaaatgtaaaaataaaaatgggagtaaaaattagaataggaatgaaattgaataaaatttgaaatacatgaaaaaattgaaaaaaaaaaagttagaaattttttcaaatcttgcattggaatgttgtttttcttttattttaaaatagaataattattctaccaaaatagtgaaaagaccactttattataatgatcttccaatactttaaaatacaactaaacaaagcacatggaatgaaaattattttccttttcattccatttcattaagccaccaatatttatctttgaattcattgcatcaagtttttttttttggaacagtttttagtgaaaaattaatcgctttttgtatattgagacacagtaataccaaagagaagaaacaaaataaacacagaaatatgcacaagcacctatttttcaaattggatatctgaagaagcacctgttttgggaacctagaagccaagaaagaggattaaatttgcttttctttgcttttgctgcagattctttttgctctttggattttattttaataatcttggtaaaaatgttgcaggttgcatctattggaaggcgaagatttagtgcacagtttcagctactatttcgactttttaagggatttgtttttctatcatttttaactcttttcatcaccttaattgcacttccccatatgacacttcaagacattgtagcaatcattcttgccttcatgccaactggatggggattgctcttggttagttcattattttcaaagatggcttacattttctatcggttgttacagtttgaaaatattgtttgaccgtgtgctaataatcattattcttctcaatataatacagattgcgcaagcttgtaagccactaattgaaaatactgcattgtgggcatcagttagaacacttgcacgttattatgaagtaatcatgggaatgatcctctttattcctgttgcattcttggcttggttccctttcgtttcggaatttcagacacgaatgttgttcaaccaagcattcagcagaggtttgcagatttctcgtattcttggtggacaaaggaaggatcgctcatcacgaataaaaaaatagttcatttaattccaaaggagtactggaaaatctgtttgaattgaattgaagggattcatataaaatgtatatagtttgttgtatgcttttcttacatagattatattcagatacttcgaagtgattgataaatatgtatatttaggtggcgtttgtatatttttgttttttaattttttaatcataaaaattaaattagattatttttttaaaaaaaattgtttttgaaaaagaaaaatattttctataaccaattttatgttttaattttaaaaacaaagaacaaaagtgtgtttcataaagtttatcttaattttttaattttatttaagtcggatccgagtttgggtccgggatcgggacgaggtttgggtttggggccgggatccagtgtctgatgccaagacagaggcggggtccaggcctaggacccggtttagggctggagtccggatctatgtctgaggccagggctaaggccatgatgtaggtttagtggtactaaatcaagtacgtagtggaataataatttctgactatcatcgtactacctccttatgatcactatatgtatatacattaaatctcaaataaatacacaaaaagcaaatttacatcttaaagtctattagggtatccttgtttctttttgtaagttatttcctcagatgatgatgaagaactgtatgataaactgtataatgtgggctagtaggataaaatgtatatgaaattcttgttagattctcaacacatgagcaagaacaattctataatattcgagagaaaagttttaatcagattaatcatttttaggctttccaaaagttatgttaaaattcttctctctcttagaatttgatttatacggtatatattaaataaatccaataaaatttgtattgaatgaattatttaaattcaaaatatttattaaattatatttaattatttgaataaataatataactaaattatgttatagatatatatttcctataatcgattgagggaatctctcaaccacttgagggaatttctcaactaccttgagagaatatctcaaccatcacaaatatctataattacttttcaaattcaaatttaaataaatatttatcgtttaaattaattgttaggatttatgctctgaaaagcctataaagatatttcttgtttattaataagagttgaacattttgatatatacatgaatgttaaattattaataattaatacttattaatttatatatgaatataaaaaaaattattcatttatgaggttgtgacttgtaattgtgcggagaattaagattacttagccatgaataaaacagtcagcaacatatttattgacgctgaaaagtggcgaacactaggtcgctagattggcgagatgaataatgaatgtaaatatataatttagagagacaaaaaatttatagtagtacactccccatatcgcgatggtaatggagttacgtctactttgattttttatttctcacgagagtgtaattacagaaaaaagctaagtgtttaatctctggttttcggagagagatgctttgaccttgtgagtatttttttgaatatgaaaaatgagctgagagagctttctttttataggtgatgaatgcccacaaaataggaagaaaataaaaattagatgtttttgattgtagatgatgattcaacggtgaaaattagcttttgatggtggtagtcattttttggagcccgacgggactcgctgtaggcaacccggagcttatattcataactcccttaagggtaaaatttggtgtggatagcttcagaattgtgattgaagtgtgagacatgacttgataaaacattgaaatagcttcaaaatgcaagttgaatcgtgttaatcatatcaatattgagtttatggttgttttactgaaggcaattcatgactcagtgcccaggttgatatcgagcgtccaagttgacatctcagcgcctaagttgacaatgacgtcaacctaaacgttgggtaaatgtagaaacatccaagagatgtactttaagatgcatgttgactcagaatctggtcaactgtcagcgaaatcttatttatgattgacaatcaccacgtgcaactaagaaaaataaatagtaaagatgacattgataagagccttttaggctctaagattgttgttttctccatggttagaggatgttgtttcttggtaattgtagtatttttcatcgttttttggattatgcgggctttggaagaaaattgatttttatgagtaaaaattaatggatgtggtgtttttaagactaggtgatgttagcggataaaatgatgcgccaaaatgacatttttctagaattttgaaagtccacgaagactcgaaactcgtggggtgtcgctgctacgaaggttgaaggctcgccgtagcgagcaaaaagaaaataaaataataaaaagcgcctggcaggtcttgctcgccgcggccacacaatggcttgttgcggcgagccatcttgtggtcacatcgaggaggcatttactgggcatacaattgaatttgatctttctttaaaaaaggagatatctcttttttagtgatatattttcaagtattacaaataagacttctagggtacgaattttagtaccttttatctatgaaattgagagagaaattcaatgagagagcaaggaaaagacgaagattgtgacttcgagtgttctacatcctagttctttttcttctccttaaactcttactatttattatgactttgattatgatatctagttccgaggtagtttctttttagttaagagttatttcaaaacccgagacatgagtttttaatttcattgatgaatgttaatttttagtttccattatatcaaattgcttctattcttctatgttcaatgtcatgattattgttttaatcttgtttagatgattgctaaattaagctttactttaatctattatcatcttaggattattattcacctaatagtcaaggattctaagttgttgtgataaattgcaatttctaatattttcaattgtgatgaagaatgaaacctaggttaaatgaattctatacttcattaatttattgcctggattaatctatttccacaaattttaaagctttatctaagttaaataaatttcatgattcgtggatttactgtttagataaaagagttaattattgagcgttttgtcttaattacatgtaataaagagattgggataatttgactatttcattcagctttatctgtgggattaatagtttgattggaaaacttaaattacattcattaataaaagttaagaatgattgttgagggtggagaataacttttaactatttatctcatatcgtagtatcacatttaatttatttttgtttttatttatgttattttattctcataatcaaaacctttttttttttttaattcttgtcactagtttttgaataattgaataaacataatcctcgtgggattgacccttacttacatttataataaaataattagaaatattggaatcaaaataatagtaaatttgatacggcatacgacacacattaaatttttagcaccgttgtcagggactattattttattttattattcatatttaatttttgtcttactaacttgtttttacttgggcaaatcaggtgtacatgtctagtgcagacaatactcaaagagactatcaagagtaaaacaatattttgagtcatcgtctaattctcgatcatcgaagaatatcactaacaacccactttttcagcctcttggtcctgtcaaagagccactatcaaactaattctgagtttgattccgacgactcggttaattctcacaagaccaaaataggatgttgaaagagttggtcacgccggatcttgaccaacaaccattgtgcatccattatccatctttggatgttaattttgaactaaaattgggcctcatccacttgctgccaacttttcataggttgcctggtgaagaccctaacaagcatttaaaggagtttcatattgcctgctctagtatgaaaccttcttcggtgactaagaacaaatcaagttgcgggcttttcctttcacatttgttcccacaagataagatcagaacttgtcaaaagtaaacaccacagccagtagctccttctctgtagtagtgtagttcaattgggtgtcggctaatgtcttgcttgcataataaatgccaagaacaaaacctacaacaaaatcattggcatcacacattaactcaaaaggaagtgaccaatcgggggctacaataataggggcagatacaaaagccttttttaaagttacaaaagcttcatggcactccttggtgaactcaaaggatttgttctgctcaagtaaagagcaaagaggcttggaaaaaattgagaagtctttaataaacctcctataaaacttgcatgccccaaaaagcttcaaattcctttgacaatagtaggggtggcattttctccatagtctcaactttcactctatcccctttaataccctttttagaaactttatgacccaaaacaattccttattgcactataaaattgcatttctcccaattgagaaccaactttgtttcctcacatcttactaaaacttgctccaagttagctaaataagtgtcaaaagacttcccaaataccgagaagtcatctatgaagatctcaagaatgttctctgccaaatctaaaaaaatatccatcatacatctttggaaagtggcaggagcattacaaatccaaatgacatcctcctaaaggaaaatgtgccataaggacaagtgaatgttgttttctcttggtcttccgaagcaatggcaatttgattatagctagaatacccatcaaggaaataatagaattcctttccctccaaacgatcaagcatttgattaatgaatggcagcgggaaattgtctttttgtgtggtcttcttcaactttcgataatccattcaaatacgccaacctgtcactgttcttatggggatcaattcgttgttttcattagctaccactgtgactccacatttttttaggaatatattaaactaggctgacccaagaactgtccgaaatggggtagataatgccaaaatccagccacttgattacctcatttttaaccacttccttcatgatggggtttagtcatcgttgttgctctacagaattgtcgcaacaatcttccagcagaatcttatgcatgcacattgaaggacttatacccttgatgtcggccatggtccaaccaatgactcttttgtatttattcaaaacatcaatcaacaagagttcttttttagcacccaacgtagtagaaataattattggcaaagtctctccatctcttaaataagcatacttcaaatgactagtctatggcttcaactccaactcgggtggttcttgaatggacggcttaggaggtttgaaattgtgctttgataactccaaagattcaaaaggcctcctaaacttagtgaaaagttgctttgactttacccaaataactttggtttcttcatcttcactcaaagcttcacactcttcaagagaacttatcaacttttcatctttccaagcttccttgtgaaatctttcaaccacaatagaatcaatcacacttaaacgagagcattcctcaatctaatccgaaaagctcatggcattgaacacattaaaagtcactttttgatcattcaccctcatagtgagctcctctttttgcacatcaatcaaggttctctcggtggctaggaatggtctccccaaaataatgagaacttctttatcagccttataatcaaggataatgaaatcagccgaaaaaatgaacttatcaacttgtaccaaaacatctttaatttttccatccagatgggccatggaacgatctgctaattacaaagtgacggtggttgtccttgcttctccaattcccaacttcttgaaaatagacatgggcattaaattaatactagctcccaaatcacaaaaaactcttctaacatctcgacctccaatggaaattggaattgtgaagctacatggatctttcattttaggtggaattttattttgcaacatagcgctacaaccctccgttaaagcagcagtttcaaactctccaagcctcattttctttgtcaaaatgtccttcaaaaacttta

SEQ ID NO: 220226 - DNA, 1274 bp, Cannabis indica
gatcacctcgtcactaaaagttgcgatcgtcaaagagggtgttaggcttccagagtaaaagcactgagattcgcattattacacttggaaaggaatatgacaagctccagctcgctatcaaggttgcctctgctctattccccagtgagatatttcaaaacaatatggtttacaacgtgcatgtttaatacatgtttgttttgacccagttaaagcgggatattcacagctgtgtgatattcaaataatcaccacatttatattacgtgatatgtaatcagaccctatgatttcagggataaatgttgtaaagattgcgttcaaccttgtaattaacttccaactatgtgattatcaatagttgtaggctagattaaaagggggaggaaagaaaaaaaaataagacgggggggaggccctgaaaaactatcagaaatctattaagattgactcatggactatgcaaaattttaactgtaaaaccacgtaaaaaatccattgtgttcatactttttcctttactgtttttacttttctgtttgagattatcaatattaggctcaaattttggttaacgaaaatctgcgttaacataaggcatggaacacactgtacggtgtacatgatggggatcaaataaagcctccatgcctctatagggcatgggcaagtaataggtgtacaaagggtaatggagaccaaatccacaggtttgagtacgtatgaactgacacttgaccgcaactaccccttgcattgttgatttccttagtacaaatcagaatatatatgttttagcttttgggacaacttatatcaaggtcaatagtgtaattataaataggatcctctttgattagagagactggggttgaaaattatactttgtaactcatattaacgaatcaatgcaacagtagcatttctccacttttacagagctcttaagaacttaatagttaatcatctttaaactttatctttactttaatttttttgccttaacttggttgacattaccatcaacaatatcattggaacacatttttatatttcaactttgtgtaatttatttttatctctattagaaatgttgttatgcaataattaatatgacaataataaatgtaatcttaaaagttcaaatatataaatgaactttttattttaataaatcacataataactttgatccatgtatatcttatgaaaaaaagacaaagcacattagatattgtgacatacaaatattaagagcaatattaccaatggaa

SEQ ID NO: 220227 - DNA, 1827 bp, Cannabis indica
tgggatatgattttgtcccgtgatgtactttcacggaatgtatttcgtggtatattagttgggtctcagggtacattaaatgagtgtaagggtacgtttctactttttaaccctaactacccctagatcaatctcagccgtcagatcaaataactcacttatctgacggctgccgtacatcacggattacaatccgtgaaagtacaataacaagacaaaatcatatccctataaatgttatagaggtttagcattatgataattttaacttttaaagttatcaaaaaaaaagataattttaacttttaagaagaaaaaaaatacccctcattattcaattaagaaaaaaaaaaataataataatttttttaatgatgacgcataattgaatatataatccaaagagtaatatatgattataaattctaaactttgccaactaaaataggggcactaaattgttttagcgatcaaataatatgataaaaaaataataaaagtacagttgtgcataatatcatttaaaacattttatcgctattgatataatttagtatcagatcttacattaatgtaataatttttataaaatatcgctaactattcttaaaatactaccatggtaaaaaaaaaatgttaaaagacaccagtaatgcctagccccacctaaatgtgtcaaatcattattggtacaattaagtattagatcttacataatttaatataatagctattatttgtgtttctaacaagagacacgtggattctaaatagaagtcaaggcccatcagtgggcagaaacatcatgaatttggtcgagcccaatactgacttggccttctgggaaaacaattacgattcttgctcaggcaagcttccgctaaggctagtcaatattcgaaaggatcctagtttcgtgtattcggaagaactctttagcgtgtgtctcgaagccagcagtaatttctcgtttattgttacgtgcataataaggaaatcacttttctcaagctaaaatgggaaattacacaattaaggatcaaataattaatatcaaattaattatccataattaagggaaacggtatgaacatatatgaccacaatcaatatgccaagtcagcatgggcttcactattgataagcccaaagtggtgtattatctgtacaccccattagagagaaagagtaactaagtatgacatctattactctataaatacgcattgaatcattcatgcaaacggttgaaatttcttaactcacaagcttgagaagagaataaagtgttcatattcattgtaatcctttaggctttttcagcctatgtcataataatacaaactcgtatactaaggctcatcaacaccccaaccacataaaaacttcgagtgttctctttatattttattctttgaatcgcatttttttagctcgaatattaaataatttatttttcaaaaaatcttggtaaatattttggtaattttattgagagctgaagaaagcaatgataccatgattaccatccacgattatattcagtaattacggtacgcacccgaacccagtctagtcttcactatactgatcctaaaaagagtaacactaatcataattaatgataaaacaggagatgcaaaagatccgactaaggggaccagtaaccacaagaaggatcatactagcaagaaacctatccctaagatcttatggataaagacgatgaatcaggaaagaatgattatgatgctcctgaagatgatcatcaagacacacctgaggatgataatcaaaacacgcctgaggacaatcatcaagatatgc

SEQ ID NO: 220228 - DNA, 2734 bp, Cannabis indica
ttatgagtcttgagtgtagtcattgttttgctgaataaaagtttaccccgtttcgagtttcgagttctttcttgtactaggagaattgatgtttcttactattagctagtactataataattcttatctttgggctcaatatatatatatatatatatgtatacatatctatggcaatgggaggatgagtgagtgaagcatgttggaggtgtagcattgtgtcctatgaaccacttttgcccaaaacacttaaatctcactctatgcaagatatataaatatggcatgaaagaagtttctcttgtgaaatgtcttgcaaacaataccaatgggcatatttaaattattgtttttatgtattttattttaatttattatatcattttagaattacaataggtaaatttgcagtaaaaattcttaatgtagtttgttttgttttacttaaattcttattgcaaaaatttttacgttcttgataaatggattaacattgtaacaaaataattgcatcagaatttttgttaaaaaatttataattttctcataaaagagatttttgttaaaaattttttacacaagatcatatttttcactcaataacgttcatcttttgtgatatgataatatccactactatcataaaacgacatcgttattgcagaaagtaagtaaagctaaaattgaaatgtggaatactcattattagcattcttcatttctttcctctttcacccaacataggaaaatcagtcctatttgcaccattagtaccctcatattattttatttggcatggttttctgccttggaccttaaaatataactgttagggtaaaatttcatcgaaaattatttagtttgtttatttttatggaagttgtgtttcatatttttcaaaattgtctttagaggagcattgctataagatattacttgtgtctagccagggctggccttgagtaataacgggtcaaagaaatttttgtgttatatctaaagtacgagtattattaggtattttttttttataatattttacaaaaaatataatttttttcaatgtaaaaaaaatatactatataaaaactttggaccttgagtttgggtgggccctaggcacgagtgtagtccaccttagtccaaggtcgagtttgtgtctagcaccacctagatgtactcccttgtaaatagttagtaatattctataataattattaaattaaattatatgagacctgatatttaattactccaatagtgatataacaccataatgtatcttttaacatttctctcttttaggaatgagaagcgaaaataatttttgtagttttcaaaatacaagatacttttggttaatgatttcaaaaattgtttaagattctttttactaaaaaaacttcaatatttcacacctcgatacaaacccaaactccaccacgactcctacacaaacttcgaacgtcaaccccaatcctagtctcgaacttggctttgtaccccgaactgaacccggacacagttctatacctcagaccgagccttagactcgaattttgtggactcgaaccccaaactctgccctggacctgtctttgatcccgaacgtggaccctgaacccgacctcagcctcgtgtcccgaggtatgtgagagaaaatgtaaataaatatgttggacaaaacaataaaaattatttttaatatagaaaacaacatttttatatttttattctttaacttgttttgaaaaattattttaaaatatttagtcaaacatcttctattggtttttagaagaaaatttttattttaaaaaggaaaaatagtttttagttatgaaatcaaatatcctttaatttttatgttatatatatatgataaaaatatatcaaaaaagaaaaggaagaaagtaaagaaacaccatgagagatagagatatcgaccataagagaacgaaggagagagatagtcaattatctatgttgctattgagtgagaaagaagatatagtaattatagaaatgaaagacaagtagtatgtgcattcaaatattatgtacaatttttatcttttcttaaggataacaaaaagttattacaaaccttgttaacaaagaagataattcaagaaccaatcttacaaaaatataaatataaatatagaaaatcaagtcacaaaagtacactcgaacctatacaactaaaaaagtaagactttgttgcagtaaatatgtttgcgtctatttgtttagaataaatactaacaacactcaccaacattattaaaagtcaatatttatttacaacgcggtatataattcactatcggtttttaatagaagtgatattatagattataatgtttaagtgcatattttaagtgcacacattattactcatgattttattttagatttaatggatcattactcattgattaattatacatattagtttaaaatttatttcttaaaatggggtattgaatattgttatttttgtcaataaaaaatgtgggtttagtaacaagatgtgatttatgttagacatttatatgtataaactgaaatatatatgtttatgtataaaatgcggaattaaatcaaacatatatacactatgaataaggatcgaaatacctccagccattgattttttgagcattagtcccacactaagctttgatctgcaaagaaaaactggttgtatgtgggtaagtcgggcgttcct

SEQ ID NO: 220229 - DNA, 3473 bp, Cannabis indica
gattatcatgtcagtctaaatcgggtgtactgaaaaatcatggtacttaaactttgaaacatataatcatgattatactctactgtgttgacaacactaaaatcatgaatgactatatgttgtggatttaatataatttatacattaaatataatttcatcaaagaaatcatgtggaccatgcaacatatactgattttttgatctcttattaattagtaaattattgtattaaatgggttttatttagggctcaaaacccaacaattgtctcccccaattaaccaaccattgctcatcgaccttaattgccttgacattttccttcactgaaagattgtccacgtcataatgggaagaaatgaggaaaacctttcaaaggtttttggtggttaggagtttttccacttgaaattccttggatgaaaagaagttgtatatcctctcctccaactttagggtgaagggaaaaaatctcacaaatataaaaatgtattagaatacaacaaataggaggaaaaataaaatttaaaattcaagaaaaggaacaaaacttacttgctatgttgaaatccaaactaagggttggaaccctcttcaataggaagccacaagtgtagaagtagtagtctctgaagtcatgcatttacttcatggagctggttagacaaggaaaactcatagagtagtgttttaacctgtgaaaacctactttctcattatgtcctctcatgggttatgatttgatcttgtaaagtacaagacctcctccagcatcggtgtaggtttgtcgtgctaagcacagaaaacataccaccccaacaacaggggtacacctcgggaataaactgggaaggtgatactccaaaaatgatacaaaagatagagaactaacacctcaagggcaaatgtgcacccatttcgacatgagcctagctctagacgccaaagaccccttctgcgcacttgttatgaatctctccctaaatggagagtctattgtggagcagtcctagaacactatggagccccattttggtctcatactttctaaaattgttataaacctaaacttattgatatgttggtccatctcccatggactaccatttagaatcaacttcggagcaccctttagctctatgaattcctcctctgtgtaaacttcctcttggtggaccttcttaggcatgatttctatacaaaagaagagaacctaagcatttagccaccctaactacctatcatagaaagggagtagggggtcctcccccataaactaattagagaggtcctaattagactaactatgtagaaatgagaactcccagagccactcgttctagataggaagtcaggaacaacaaagaagaagagtagaacaaagatcaacgaagagcccaaaaccagaaggattttgggcatgggaaaatttttccaacacatgtattggaaatgctcgactccaagaatttgtaacaaggaattcaaaaaatagaaatggtttgtggtgcctaaatctaattacaatgacaatcaaactgataaaatccctaatcacatgctagaacaaaacatgcgaaaacaacttataacattaaatcctgaaattattatccagagacaaaaagagcaacaaacctgatgtcaaaagtggagatgtcaaactaatcattattgggttcagctggatgagtcgatcgtacatttcacagaggcagggtactagggtgatcaacaagttaacttctacgtcaaaatctagattgatgctttcctcttcttgtgcaaaactcacgagcattgtgagttgatgatgtcgaagttctcgcactcgaatcatcaatataaggtgaatgcaaaaattgacagcacattctagggtgacgaagaaaagttagctcttgattcagttctttgtcttaaagagttattagaaagttagaagctttaaagggtttaaaagttacaaaatgaatgaaaagttgtaattggaattcgtcaaatgtatttatacttgaaaagaacaaccaacatgagaaatgatggatggtccatgatccaacctccataaacacaagcttcatttgatggcttgggagttcaatgatccactcacatctccataattgattctccctaagatcaaggcacacaggtaatgatgaagatacaatttttcaatttttgcgccagaaaattgaacagctgtcaaaatatagccatttttggaaagcaactcctcattggttgcgcccttccaccatcatgtgatttacacggggatgtactacaatcaaagatacaagtcaccttttgggatcgagtaacacctaaaacctcatgatattatccctcatcctccacatgttcatattgaaggagtgaagcaagcttccaccatacgtaacattctagaagctttgagtgtaaatgttatcagtattttccaacaatgaaaaaaatcaaggttaaaaaaatgggcccattagtaggttcctcagtccagataaagtgggccaatcccatttagacaagtctttctaggaacctatcaagctctgagaccatagagcattccatcattgacaactcattcgtggaagcaagcctggaactgtgagggcggaagggtgagacagtgtgttcctagaagactcatccattatccgtttttattcctgcacataaataaggaaacaatagttactagatcttgaaagaggatcttatcatgctaaatgggaaaacttcctaaaacagatatcaagcaattaattcacagatgattgcccataatcaaagaacacggtgttaacaaaatccaagcaaatctactctacctagtcagcaaatcctctccatcatgggctggacttaacgaagtagcccaagtgtgttattcactgtacgttccccaatagaggaaaaaggaaacgtaaatataattctcaaactactataagtacccataaaatccaatggattaagggttaaattctcttgcaaaaacttacttaggaaaacttgagaacatattcattgtactcctaaaggcttttcaagctaacgaactactgagtaacactaactcatggactgaggctaactaatgccccaaccacgtaaaaaattgtttgtctcttttcacattttctcttttaattatttgtttattgagttcttatcctatataaatagtatccaaaaatcttgataaacagtagaatatgttttcaagctccattttaggttttttatgtttgattttagtttttgggcttgtagttggtgaaagctcaagattgagttcttgaatcttgagcttaaagctttaatgttgattttaaaattcttgagttattgtgaatgttgagctattggttatgttgagacttgatacaacactctgctaatattgcaagcactagtgatgcatttgacaaattgctccttatttctgttgatgaattt

SEQ ID NO: 220230 - DNA, 2353 bp, Cannabis indica
gctacatcttcaaatcatattgaagttattgcattacatgaatataaaatatacactaatccattattttaaaaacaacagtattgaatttaaaattataataaaagaatagtttaaattaacataaaaaaataaactaaagaatttaatgttaaagacaacaaaactacagtctaataatagggatttaaaattactaagaaactaaaaattcaagtgagtgtggtggagcttcttcattggtttgagttggcatcgggataacgtattaattttcgtaaatcttctgtatttttcagctctgacacagatgtgggaatgatggatgaactttgtggccaaatggatatttttgaagtggatgatagtacaactcatctgggtttgccaaacaatatggggagaaagaaaatatttatccttggtttcttaaaggataagctgaaaaagagaagggtgggaaggtcgattgctttctcgtacaggcaaggaggttttgttaaaaattgttgctcagactattcctaactacactatgagtgtctttcttttaccccttgttacatgtaaggagttggaacaacttatggcaatgtttaggtggaaaattggttcttctcaaaggagaagtactagttggatgagttggtcctgtatgtgccgacataagcatatgtgcgacttgggattttgtaatcttcaaaattttaatcttgtcttgttgggtaagcagggttggagattactcattcaaaaatcttctttggtgagtagagttttcaaggcgtgttattatcctaatggttcgtttcttgaagcttctgtggggttcattctaagttttatttggcacagtgtgataaaagcgaaacatctagctcttgctagtgctaggagaactattggtgatgggtctactactagtattttgcagtgtccttaattgccttgtgaagataatgcctttgtgagtcctaaccatcctgctctgataaacaactctgttagtagccttatgagaacatatacacgtgattggaacttggatattgtttcaaatctttttgttccaaaagatcaaaagcttatattatcaatacaattgagttcttctttggtgaatgattagtggtcttggaagtttgagaaatggaatctttacactgtaaaaattgctcatctttatttataagagcttaaaggtggatggacggaaaacaatgctactggctattggaggaaattatgaaatttaaaaattccccccaaagttagtaatctagtttagagtgcaatttctggtgttgtattgccaacttgtgttcaactatccaagagatatgttgtgaataatgtttgtcaaattttccatacacatgatgaaactattttccatccgcttgttgaatgtcctgtggctcgagcttgttggaaccgttcggtcgtgggtgttcataattggaccgacattaattttggtgtttggttcatggagtttgcaaataggcttggtaatggagttttggaagaagtaatgatgaaactttgcaagcagtttagtttgtgtccaagctattgagaataatttgcatatgccttcaaaatttagtttgttggtttttaactgtaagagtctcatgaattattttagtaatgtttctttacattttgttgaacgatctacaaataaagcaatccattagttggcacataacacttgtttctctctaagtcgtgtttttcacgctactgatttattgcctgtattacgtattattgtaatgggagacttttcttattaatgaaagttatcctttaattcaaaaacaaaatggagaccaacttgcaaaaactcatataatttaagaacatgcagtacaaataatccacaaagtaaataaataaattcaacaaaactatcatcatttaagagtaggaagttaatgttgccaaaaacttaaaatttggggaccactttgttaaaaaagaataacatttgactacaaacttgcccaaacttatatatttgtggattaaattgtaaaaacaaaaggtttaaggactaacttgtcaaaacctatttagttttgagacatttagtacaaataaacctaattagtattaggggaattatatttacatccctgtaattattaagtgcaccccaaaattttgaatatattcttatccttttgtgaaatgagaaaaatagacaatttaagtttaatttcttttttaaaattatttatttttaataagtacactcccttactaaaattaagtaactttaaaccgtaaaaaaaaaaattatatttcatcaatgaagcaacacaatagtactccatccaccaat

SEQ ID NO: 220231 - DNA, 1980 bp, Cannabis indica
ctctcttcgagtgcatgtcgacaggttctctcaatgtgcatgccaagaggttctctccaaaaggatcccgagaggctctctctgagtgaatatgctaagaggctctctccatgtgcgtccctagaagctctcaccaagggcatgtcaagaagctctttccatgtacatgccgagaggctctctccaagagcacaccgagaagctctctctgtgaacattatgggtagagcttatttctgaagtcttaaattaacatgtttataattattataatataagttaaattgtttaaatttatgagataaaataataatcaatattctaaaatgtgggcgttttatttaaaatataatatgctttgtggaactttgaaattaaatttaagctaatataataataattatactcatagccacaaagaataggttttcttcatattttatttatttatttattatattttttaatttgactatttgagcaaaattattaaacggacatggttggcttgactacatatttttttatcaaaggttttgacaacgcataacgcttcacatacacatcattaattactcaatttcaatattgattagtcgtctattcaacagtgaacgtatcataaaatactagcttgtttgtaaattaaggaactacagctgtatgaactcctatgatgttgcagttgactttatttatccacagcttcgcatgcagcttcttcttcaattggtaaaggagatagaccacacgaaatatggatatcgttgattatgtcatttactaatcaatgatcaaaattaattttaaaaacaagtcaactatatcatgatcttaataaaataaatgaaaaacttctgatgtaatgtaattagatgatattcatctaagtataggcaaatgtatgtgatcataacgagggtatgccacataaaattatggaccaaatgtacacactcgttaccatatttacgtacttaggaattatggtgataacagtagcaagatcagatgtgggagaacgaattgccaggcccggttgtccgacgcattgtggaaacgtcagcatcccatttcctttcgggatcggacgaaattgttacgcaaacaattggttcgaagtggaatgcactgcggccaaccctgccctcatccttaaacgcaccaaactagaagtgcttaatatttcagtcaaccaggggaccattcagactaaaagtcccataagttttttcaattgccaacacaaagaaagtcgtaataataaaccagtactgaataatttatatggatcaccctttggattcagcggtgacaacatattcattgcagtgagttgtggcgtggaagctattattgatgcagattcagataactcaatcattcaagttgggtgcaagtccacctgtagtaatagtaatatattaattgaaagttgtgatggcttagattgttgtaaggctactgttcccatttatcttggaccttcatttcgcatagttttcaggcccaatgattcttccaatgatgatgagtgcaagtacgctttcttggtcgatgaaaattggttggcagaaaatcaatcaaaagatttgggcaaatttagaaatatggatagtgttccagtgattctggactggataatggattattctttggatgataagatgttatcttcttcttctgagtcggttgtgtgcaataatataactatggtagatcaatctatcaaatatcagtgtacatgcaatagtggatttcgaggaaacccatatcttccccgtggatgtcaaggtaaacctcttataaataattattcatttgcattcatattcaaaataatatataccagtcatcataatctctttagattctaactcaacaatagcataatatcaacccactaaaatataagtaaatagtataaaccacaattaaaaatttgatggaaagaatatatgtgtattatattctacaaaa

SEQ ID NO: 220232 - DNA, 3912 bp, Cannabis indica
tgacctttagtcattctgatcttaactcagcaacaatagttactagtacgcagttttcatagtactctaaggagagaaccagtgggactgagagacagaggaatagatcattgttcctgagaaccaagttcatggtattaccacccattgccagcagttcaacaatacaattgcaatgaaccgaaaccaacaaatttgattcaccttatactactttcagaaaaaacagaaactaaaaacgatgctagaatatctaaatcaccattaattgcaatatcacgaataatttaattagcacatctatatcagtagacctacacatatagcaatatgcattacaagctatgtttttaagcattatatatgtaagttgataccacttcctcataaaaaaggacaataagaataaattaaactaaatactgtattaaattgaagccgcaggctaagcatgtacacatgtggctctgtattcacagattagtgaagagcaacgacttaatttagaaaaaaaaagatccttcaagaatctatctaaatcacaccagattcaatttgcagtctgaaagatctcataaccaagaaaagaaattagggaaaaggaaatatgaatacttaatgaaataaacaaattaaatgaactgacacaggtaaatacaggcgtgctgtgtccacacagcatatacatgttttacaacattcataaacattaacttagcatcatagaaactagtaatgtgctaccaaaagaaacatcttccgggatttcataaattaaagactaattagaatttttgtccccgaactttgacatataccaaatcatgtcctctgaacttttaaagctgttaaaaatctccccagaactattgggattgttgaatttaaagatttttgttcaatttcattcaattttactaattagcctaaattaaaataagaggaaaacttacaggttgtgtaagtagattttaaaacttaccccaaggaagaatgggaaactcccacctttgtttgggaactgtaatgacatatgaagcaacctgtaaaaggattaaaagcattaaaaaatctcagcagtagatgattttcgagaaattattacgacatctaaacttttcttaatctaaataccaaagttgaggcagcaagggaatgagaagaacaatgctctgtagatatctctcctttttcataaaggatatccataatgtccatgcatgcttcaaagttcacaaggtctccaatttttgccacttccctgaactccaaattaaaaaaaaaaaaacaattaggttaggtagatttaactagttatgtacaaggaagagaaagatgtatatgctgaattcagaaagtaaaaatttgaggaacatgaaataaccttagctgatgaaaaagctcttcaaggaatgtaaaagcaatatctactgcaccaatctcaaaattcaagaccttccagaaaatatgaaagttcataacatctcagctgtacaaaaatagctcgaaaactttcatcattcagaagtgttacctgcatcaaaacaacctcctacgaaattcacatcaaacagtggacatgggaaagaaagttctcttgaacaatgtaacgaaaagtaacttactgcttccaagaaatcccgattcgtaaaatgctgctctttgataaccttgtcacccaaagacttgaagcaattaatggacaatggtctggaactgtgtatctatgaatcatcaataatttgacaaagagcaattagttgtggcaactagaaccctgcacaaaaatcaacaaggataaatgatgaagacccactttgctggatatccataaggaaacaagtgcaaacaactgcaaattgctttctctcaacggttgcaaaagccagtttgctatgtcacctccttctttgaacctatacaagtacaacactgctctttgtgaacattagattatttaacacaataaattagccaataataaataatgggtcatctttcattgaagaaaaataaaaaccctactccaaatgcttgtttttttttcattcatgacattgcaaacagagtatgtgcagtgaaatcatcattattcttcgactaattatatgaaattgcagaaatgaaagtgaaattatgaaaagagaaagaagaagaagaagaagaataaggtttacctggagctggagaagcgagggtagaatctatcggcgaagaatgatagcgcagtgtatttgacgatcggactcacttcgagtaacttcaaattgaatcaaccacaattatatacaaaatttatagacagatatgaaatgaattcttccaagataattgataattagatagaaaacagaaaagccttacctgagcagattcgataaggaattcgagaagacatggtcgtagagccaaagctctctccttccacatctctctctttctctctttgtgaaattgtaatgtttagattaaagaaaaaggaaaatgaaacaagaattaattttgttataaatattttgtctttaatatcccgcccaaaaaaaaagccttatgttttgtaaaagcttagagaaagaaattgaagaagaaagatttcattgcactaaatgatcaaatgaaacaataagctagctaaacaagaatcagttataactaactcctaacagatgtaactaacaataccagaactaatcttgagctaactaactatatgacagttggaattaactaaatgtccttaataaccccttcaaattcagtgtggaagaactgagcacattgagtttgtcttgaagtataggaaactggttgctggagattggtttagtgagacaattaacaacttgatgtttaaaaggcacatgatgcacactaatttctttgtcgatcaccttgtctaatttcaatatgcttggtcctaacatggagaataaaatttgtagcaagcattatataacttaaattgtcgcagtagactgtaggagttaagggggacttgatctgcaacttagtgagaagagactgtatccaggtaagctcagagacaagacaatagctgccaaacttcgacactaagcttcagttcaagatcttgagatggttgtttgctttctagactgccaaggaatcaaaatttcaccaaggaatatgcaaaatccaggggtagacctcttaccatcaaggtcaactcccaatcaacatcacagaaggtttgcaattgaagagaagaggttttggtcaagtacaaaccatagtcaagagtctttgctagatatctcaatattcttttaacaactaccaaataaacttgtaatggattatggataaaatcggcatactttattgatataagctatgttaagtcttgtgattgtggtatattggagtgccccaacattgagagagtcttaggccataattcatgggagaattttaagtattgactctttgcatttgagctcttcatagaagatcttgaaagtacttttgttgagagagagtagaatggcggttggagttttgattgcttgaatgtccgaaaagtagtctagagtgataactaataataattagttaattacttagctgttaattagttagttaaaaacaatttgttagttggtctgtactctgtttcttgtaacagaatctttaactgaatctttccttttgtaaaacattggctataaataaagttctgatgctaaaggataatgctaatgttttctaagcattactcctaaaggctcttttgatttctctctctctgctataattcttcatggtatccgagcacctttgactcacgtccatggcgtcctccggcgacaactcgtctcctgtggatgtaaccgaccctcggcctacaccttcagttactcaacaacaacaatggaatcccttctctcattc

SEQ ID NO: 220233 - DNA, 4232 bp, Cannabis indica
aataatttccaacagaaataccaaccttgaaacatatttacatataagttttcaagctttggagccttaactctcatctcgaggagaccaactaaaccaactccattccttgaaatgaagttcttcactattttttgcttttgcgtactgttgatccctcggacgttccaagcaaggatcttatccattagaaagaggaggctctcccctcctcctttgctatccagaatcatccctacttgttcttcaatctccttctcttccctcaaatccgtagccgtctctaactcatcaagaccttgataagagttagacatttcagtattcttcccaggttccttagtcttgactttccaaccatttgtgaccatttggaatccatcagcctctattttcgatttagtctctattttcggatgatcctttttaaccacccactcctgttgcttaccctccttccttcgacactcactcatggaatgccccattcctttgcaatgggagcaaatggtaggtttccattcataagtgaccgccactgatacattggatccaaattcatcttcaaagtaaatcaaatctgggaactcttattgtatagagacttcaattagtactcttggatagcttagcttgtccctcccctttgtaacatcatccaccataatcggaacacctagctgtccaactatcttgaacaacgacttcttcccccaatatttcagttctagatcatccaattgaatccaaatgggaaattagttagtctattttttttcaggtcgagacatcaaatctagttgtatgcaaagtatatgattgtaacatatcttacagacttacatagtaaacttagataacaatatatgtacttatcatagttttaaatataatgagatgtcttgctcacataaaatgcattgctcataaatttatttgacatatatagatatactatgcttatactcatacattttggcatattaaaataaattttcattttttgtttacatggtagcctttttatgtagcatatcctattgtatatgctaataaatcgattagtttattttgacaattttttagacttccaatttttgcaaattattattacgaaaataaatcatttctaatacactctaacagaagcaaatttgaaaaagtaaaaaaaatggggcagaaaaaatatgggcatgtgaattaagcaagctttggaagtgatggatgtgataaacatagacaataatgatgtcatcattgaaaaccatgtttaaaagctatatttattaaaaaaaaaacaattattttgaaaacgttataaaaaaatgtgtatattaggtattaaataaaacgacaatatttttaaaatttaattgtatttaatgttctgaaatgtaaattttctattttttatggtatattctgataaaaagaatttgaggaatgttatcgttaagttcctattgcaatctcttagttaattttcgtgttaaaaatacgaaatattcttttcaaaattcctttatggcagtattccttacagttacatcattcctgtaaattttttaaaaaattcaagtagtttacagtgccgaaagtaggtttgaagttttttgaatatgcgtggtatactagaatattaagaactctatttttagtatcgtaaattatttgcaatttttaaaaatttatagggatcatattgaaactataacgaatattgttatgaaaaaaatataaaaaatattttgacatgtaatttcaagcgtagaagttgactaaaaagttataataggaggttgtaattagctctcagtttttttttttagggagattatttacactctagaaaatgagagttttttctttaggagcaaaattgagagttttatgtggagttttatttccaatccaaaatcttataaagccactcaatttttataaatacaattgttgacccgaaaaatagtcaattgatgcggagtcatgaaaaacaataataaaaaaaataaataaaaggtagcaatgatgataaacatgacgatactagtttttatagagttcatcacagatttcaacgataataacttactctttttttagttgtatttatctttagttctacactcaagtgagtttcttgataacaaagagaattacaaatatttttctttagagtttttgcttacgaaagattgttcaccccttctaaggtgatggaaggttagtatatatagggatggaggaatcaatcagcattaattgcacaaatttgcaccccaattaattttctatatttgtggaattggataagatcgaatcattagggatctttagtgttattctgatttatgcaccatgatgtggcaatagaattggatgacatgtgtcccatattttcgatacctgggtggaggaaaatataaatgactacacaacatttgtaacattcaaacatctgagcaggatggttgaagtgatgtccgactaagatgcatatgtgcttatgccgagcgaagcatgagagatgacaattccagagatgaatctcgttgtgtccaaacgcgaagacaatccctataattacgagattgagttagagagtaacaacaacacattccagtttcctatttcttagattgtaattatggaattaatgtagtttcctattttactcattataagcaaaagggaaactatccctcatgtatcaagtccctataaatagtggctagactcactatgagggggtggagagaattgcttcagaaatacattcaagagtgaaacgaatgacctaagagagaatgtttctcaaagatcaaattgtaagagctttcaagaggaagaacacttcgttccttctctcaagtcaatacaaatataaggggagtaggctattatcatacttacggggtcgaacctctttaaaatttagtgttcactttattttactatttttgctttcttttacttatcttgtttaatttttatttttgactcattgtcgttggctagaagcgtgttcaacatttaagtgctttcattgagagaaaaaacacaagcctttgtcttaagttttaacaggtaaacaggatggttgtacaaacccgtaggggagtccttgccgattagagtgacccaatggtgacaaatcccaatgtgcaaactcctagaaatatgagaggaccaccagggacaaaccccatgtaggttaatacacaacctaccaatgtaggccatggagtgacttcccctctggttgggatcacaccaggcgtacaagagattgggaacaccagttcggtagccaaccaaaccactcccaaccctaaggttatgtctactactaatactcaaaggctagctggaggcgacactaaactctaaaatatgcaagaagcacttgggctcatgcaaggctataataacactccgcatcatggttaggaggacctacaagcagccataaaccttgcatttgacgagcaaagacgtcacttcataaaatggagggaccagaagatggaaattataatggtacatcaggcagccatcgatgatcgtacaaggtcggccaccgtactgataagaagggcctaccagtcactaatcaacaactggctactacatcgagtattcccttgaacggatcaaaagggtatgcaattgcacataccgtacaaactcacagtggtcagccgtccaatctaagggcacaagtccaaactatgggccaaacagtagacgaccagatactacagacggtcctttaggaggaattacacattccaacaacttcactactaccgaagtctgaggccaacctatcggccaaacaagtcagacaccaaggccacctgttacttcagtgtttgataggctgggtaccgcacatgacctcaaaactgatctaaattgtagaaggggcttggacgaataaaatgttccaccaactgtccaaccaggtatttgtacccaagatccaattcaaagagatcccaagtgacacaggccggtcaacaagccgaacaagttcatccacttgtgcaagcacaaatagatcaacttaaaagtatattacaaggcctgaccggcccaaaaatcactgatctcgaactcgaccaggcatgcagatcacctttctcgtctgaaatcgaagttcttgaactacccccaaagttcaaaatgccaacctagaaaatatatacaagaaaagaagatcctttatc

SEQ ID NO: 220234 - DNA, 2410 bp, Cannabis indica
atagtggtacccctttgttaaatatggtttgtaccaatcttgaaatattttttcacactaggcgcaacgaatttatacaactaagacgtgaagatgtagaaaggtttaacattaaatttgtctaaaaggtccccctaatttgaaattttaaaatgttcttcttttcagtgtaaattttaataagtgtttttcttactcttacacttgttagttctcttaaaatcttatcctacacatctcgaattatcgtgaaatttcaaaatgagaaagccaagaccatcgtctatcacttttctattggacacattgagagaaaacgtagttttcaagcactaataattatttttatcaaaatagtgaaaatcacacttttttaatagtggtatcccattatgaaatgtggcccgaacccatcttggagtatttttctgcgctaggcataatgaattcgtactactaagaagtgtcacgttatatttgtttaaagtggcccctaattttaaaattttaaatgttattcttttcaggataaattttaataatatttttccttactcttacactcgttagtgttctcttagaatctcaccctacacatctctaaaaatattgaaatttcatagggaggcaggaaagaccgttttccatcatttttttatgggacacgtggagagaaaacgtagtattcaagcactaataaatatttttatcgaaatagtgaaattttcacttttctgattatggtatccctttgtgaaatgtggcttggacccatctcgaaatattttcctgctaggtacattgaatttgtactatacgtgaatatgtagatatgtttcgtgttaaatttgtttaaaatggccccttagttcaaaaattgaaaatgtcctttttcaagggtaaattttaataagttctttccttactcttacactcgttagtgttgtcttataatctcaccctacacatctcgaaaaatcgttaaatttcatagggaggaatctaagaccattgtctattacttttctattggacacatggagagaaaatatacttttcaagtactaataattaattttatcgaagtaataaaaatctcacttttctaatagtgatacccctttgtgaaatgtggtcctgacccatctcagaatatttttcctctactcacaatgaattcgtattactaagacgtgaatatgtagataagtttagcgttaaaattgtttaaaatgaccccctaattaaaaattaaaaatgtttttttttagtgtaaattttaacaagttttttccttacactcacaccattattgttctcttaaaatctcaccctacatatctcgaaaaatcgtgaaattttccaagagagaagccaagatcgttgtctgtcacttttctatttgacacgtggagagaaaacataattttcaagcactaataataatattatcgaaatagtgaaaatctcacttttcagatagtggtacccccttgtgaaatgtgacgtggacccatctcgaaatattttttcttgttaggcacaataaatttgtactactaagacgtgaatatgtagataagtttcgcattaaatttggttaaaataaccccctaatttaaaaactgaaaatatataaccattttaggtttttagttttaaaaactgaaaacaaacgtgtgttctataaattttattttctttttcaatattttattttatttaagtcgggtctggatttgggtcggggtcggggttcgggtctggatctcgttctggggctgcttctaaggtaagagtttgggtccaggtccgggttggggtctgggtcagtggccgaaatcgggatactggtctgggtctagggtcgaggcaagaatttgggtttggatctaagtccacgcccaagatccaggttagggtcctagtccaaaatattgattaagaaaaaaaaatgttgaaaaaattttaaaagtgactttttgtttgttttcaaaatttcattctcaattaaaaaattaaaaagtgcaaacaatcttatagaacatgtttttagaaaatatttctacttttttaattaaaaaataaataaataaataaataaaaattattaccaatgcaccataaaatatatataaatatcttttgtatatgtacatacataatttaattattctttattattaaaactttaattaaatatgttatttttgtttaaacaaataaaatatttaattggttagacaattatatattagagtttgttcaaaattataagtaattttatgtagtaaaatgtatgcgagatcttgattgacaccacttgaataaataatattttttgttaaatattttatgtttatttttatttttaattatatgtaaaaaataattttttttaatttttatt

SEQ ID NO: 220235 - DNA, 4727 bp, Cannabis indica
tctcatttacaactgctacttttttattttccttttgactttatattgttcatagacaacttcaatcaatttggatttttttttttaaagtgaagtgagtttgcaattgggtttgcaatatatcatgtatttcgagatggattctagttaatcatacacatatatatacccctcaagtaattttaaagaataagactttgtaattacttgaataatacttcaactttattaataataattgaattttaaaaattacatcagaaagagagattacaacatttttatgagtttactagtagtagggtcgcaaaggcttaatattctaatggttctttattagcgaactgttaagccgagccaatttataaaccccgttctaactattgcctcgattacataaggaccttcctagtttgggttaaatactcctgcaaatgcatgtctcgtgtttgcaaacacttgtcttaacaccaagtcaccgacattaaagagtcttttcttcactttcttattgaaatatctcgtaactcggtgctggtatgctgcattagtaatttgcgactcagtacgtttttctttaagtagatccaaggacaatttcaagagttcttggattttttcttgattttagaaattttgtctgtgtgttgcaatattaacttctactggtagcattgcttccgagccaaatgccaatgagaacagagtatgccctgttgttgttttctcagtcgttctgtgagcccaaagtacttgtggtagttcatctacccatctaccttttacagcgtccaacttctttttaatagtatccttcaagcttttattaacaacttctacttgtccatttgcttgaggccttgagactgacgagaagctcttaataattttgttcctttcgtagaactcagcgcataactctccatcaaactgagttccattatcagacactattttaatgggtattccaaatccgtagattatgttcttgaatacaaagtgaagaactttcttgcaagctatagaaactagaggtccagcctctgcccgctttgtgaagaagtcgacgaccaccactacgtactttgctcctccttgcccagtgagcaatgccccaatcaaatcgatcccccatatcgcaaatgggtatagtgaggtcatcattcttagttctgtcagtggtacgcgaggtatatgtgaaaatctttgacatctatcgcaccttttgacaaattcgtctgcctttgtttattgttggccagtagtatccttgtcgaattattttctttgacaaactctgccaaccttcatggtctccataaaagtcttcgtgtatctctttgattatctcgcttgcttctatggggagaacacaccgtaggagaggcattgaataacccctcctatacaattttccttctacgatcgtgtagcgaggtactgaatataagagttttggtgcctcatttttgtttgctagaagttttccgttgaatagatagttaactatgggcatcatccatgtaggcaaaccgtcaatcatctcaacctcttccttttcacatatacttggttcgcttaacacttccactggtaccaaattcaagttattaagttcgttttgcgaggccagttttgccaaggcgttggcattaaagttttgttctcttggaatttgttcgatttcaaaataatcaaacttttccaagttcttctgaaccttctccaagtattttgccattcttaaaccctttgcttgatatttgcctagagcttgatttacaattaactgtgagtcactataacacaccaaattcttaacttttaacactttagctattttcaaaccagctatcaaggcttcctcgcactcttctgtctattcgaactttttttttgcctcgcaacacattgaagaatggtaggcatttgtcaattgattttaagatgaatctatttagagctgccattcttcctgttaaggcctggacttccttccattttgttggatacaatatttctatcaaagccttaattttctctgaatttgcttcaatgcccctcgcgttgactatgaatcctagaaactttcctgaggagactccaaaggaacacttctttgggttaagtttcatattgtactttttcagtgtctcaaagcactccggaggtattttgtatgatcttcactttttactgactttaccaacatatcgtcgatgtagatctccatgattcttcctatttgcttttcaaacatttcatttactagtcgttgatatgttgccccaacgtccttcaaactaaaaggcatgactttataacaataaagtcccatgttggtttcgaaacttgtatgctcttgatcagggacatgcattttgatctgttatatccagaatatgtgtccatgaatgtcattagttcgtgtccagcggttgcatccaccaattggttgatccttggtagtggaaagcaatcctttggacatactttgtttaaatttgaaaagtcaatacaagttctccaagttccatttggttttgggacaaggacaggattaaatatccacgaggggtagaatacctcgcgtataaagtcgttagtaacaacttatccacttcctctttgagtgccccttgtctttcaaaatccaagggctgtcttttatgtctcttagctgggtaatttgggtcgatattcaagtggtgacaaataactttagggtcaatccctgtcatatctaaatggctccaggtgaactgatcttggtttgccttcagaaaacttattagtagtttttcatccaggtttttctcaaggaatacacactttgtgagattttttggatctaaaataacttcctccaattcctctattggttataacaggttcttttcatcttgaactcgaggatctagatcctcatcctgtttctcaccttcctctattatgactgccattaactgatggccggcttttttatttttttagctctatgcgatagcatttctgagccagtagttggtcccctcacactacacctacacctgatgatgtttggaattttaaagacaggtatttaattgaactaactgctccaagtccaattagtgtaagacgacccaacatgatattataggctgatggtaggtcgacgactaaaaaatattgcattaaggtcgtggataaaggcgactcgcctacagttaatgggagttcaattattccctgactggcgacactatccccagtgaatctgcacaaattcaccatgcaaggttttaacttcgcattttgcaatcccattttctttagtgtatccttgtaaaggatattcactgagctcccatcatccaccaacaccctttttattcttttgttggcgagatggattgtattacaagtgggtcgatgtgtggatacctcacgtgctttgtgtcttcttctgaaaacacaattggagattcctcagtgttagctttctttgatggttttaaagcgaaaactaaacacccattttttatttccttaacatatctcttttgggcattactactttctccaccaagatgcggccctcccgagatgaccaagatgttctctccttctacaggaggaggttgtaatctttggttgtctgggttattgggcagatttggttggttttgtccattaccctatcattttacatactgttgaaagtaaccacgcgagataaggttctctatctcgccgttcaaccaacgacattcatctgttgtatgccctatttccttgtggaatttacagaattttgctgcatcctgtttgtgcctcacacgtctcatgggttcaggcttgcaaaatgcaaccctatgctcatgtgcgaggaaaatattttcctgagtttcattaagctcggtgtaaatagttgaaattggcacatacttatcgtgcttcttttgctttttcttatctttggcttattctctagagtagtcttttctcttggcgctagagcctccaagattgtcagctttcgtcgagacaatgcttcctgagagagtgctgggttaattttgtgagccagtctttatcaatttcatctcgttccttgcttcctctttttgtacaaacacttgagctctttcattgaactcattgatgttttttactggatgaccctgtaagtcatcccacagttttcctccagttgtcgagaggtcagtcgtgatccctgcttgaagagcagtaagctatatactatcgttcaagtttctaactctaacagcggctgtatttaaatgacttaagtaggccttaagtgactcgcccggttgttgcttcacattagtaagggaagacgtttcaggtcgcctatctcttgctgcctgaaattgtttcttgaaatccttagacagatgttcctaagaggtgattgagtgatgggtgaatttattgaaccagctgctcgatgccccagccagtgaggtggggaataaaatacactagttgctcgatgccccagtcagtgaggtggggaataaaatacaatgtagattattcgtgacattgctggctcacattatggtatttaaaattgttgaggtgagcgaccagattcgtagtcccatcgtatggcgagatgtgagggttctaaaaaccttggggaaattcgtaattcataatgattggatggaaaggtttaagctcttcacctaagtcgtaaatcaggcagtttccca

SEQ ID NO: 220236 - DNA, 3577 bp, Cannabis indica
aactaaaattacgtggaccactaaaaatttgccatgtttacaagtgtgtacacgtggacagtccaccgtggcacttaactgtaatttttggatggaagtatgcagagcaaaacggaactagggtttaggtagtttagctgccaaaaatttggtttttgtggttaagggtgttacaaaccgtaaacttcaggtggtttagccgccaatatccctatttttacctcatggtataaggaaataaattatgccaatcaaaatttaaagaaaactaattgtataaaacttttgcagctgcatgtgttgaaaactattatattatattatataataatattattgtattagtatcttttattttttttaagaatttttttttttgaggaaaagtctatatctattagaaaaaataaaaaaagtacaggatacaaattacaagtgtaaggagcaactcttccataaagcttcttgatctaggcctaaagctttcctaggtaaacaatgggcagcttcatttgcccctctttggatatagctaataaaagctttagggaaataagatagcaagcttttgatttcaattacagagctattaagatgcagattgtgagtatcattattacaaatataatccactagaaccttacagtccgagacaatgctatccggataaaaggaatgagcatgacaccaagaaagagcaaagtataaagcatgagcttccattaacagaggtggatgaattccactccaaggcatggccaaatttaaaagaacttctcctttgtttgtttgaatggacatgccgaaccccattttgtgttgttgaacatcttgtgcagcatccaccgagagctaaagagaggaattgggaacaaatgatgcatgtccatgggagatcaatgaaatatcctgaggtgatcttgttgtagaacaacgtatattgcagctttggtattggtctatatagtcttgtacctcatgtagtacctgaacaggaagagaagataaaccagcatgtagccaactgttcctgcagttccaaatcttccacaacaaacatacaaagtagtgataatttccagcagtaaaagtggtggcagcaatgtataataaatcaaagcaagtgagtgaaatatgtttttcaataaaatcaataaaactagttaattcccacacctcctggacaacaggacatctgaatagagcatgctctagggtctcatcatgatagtaacaccagccacaatgtggagaagaaagagttttccgtttaaaaagggtgtggttggtaggaaggatatcatgtcagacacgccaaagaaagtgtttcagctttggaggtaaaagaagtgtccatacaactacttccaccatgtgtgggaagtattgttatctgaaggtgttggttcatgttggtggatctgacgatgggcttggtggtagccagagtttaccgtgtaggtgccatgagatgtaaaggaccaataatatgcatcaggtgtaggaagattggaaagaggtatggtcaaaatagcttgagatacatcttcacgaaaagtggcttgaataagggcaaggttccaatccttggtaggggtgagaagatatgacactgtcatatttgcagctgagtgatgtctaaggtaatgtaatttaccatatcctggaatccaggcatcgttaaaaatggagattgtggtacaatcaccaattgatcttcgaagacctgactggagaacttcttcgccccacgtgatactagtgatactagtccaaacaagagaaggcctatggccctttccagcatcaaggaaactagagtgtggaaaataacgggatttgagtaaagtggctacaagagagtgaggatcctaaagaagccgccaagcttgtttagccaacatcgcctgattgaaagctttcattgagcaaaacccaaggcctccatggaattttgaacgacagaggaaagaccattgtttccaatggattttacgattgtgctccgttccgccgcaccaaaatcgggccatcatggattcaagcttataatgaaaagaggcagggagcttgaaacaagccataacgtaggaggggttggcttggacaacagatttcaagaggacttctttaccccctttagaaaaaatcttggaattccatttattaaggtgagacaaaacccgatccctgatgtagttaaatgcctccttttttgttctgccaaaagtttgaggaaggcctaaatatttgtcaaaactatctctaacagggatgccaaggatagtagcaacattgtttttgatctcattagtggtatttggcgaaaagaacaaggctgatttggtaaaattaaccatttgaccaaaggctgagctataatcagtgagaattgtcttgatggtagtcccagcttcgggggaagcagggctaaaaaggaggctatcatcagcaaagaaaaggtaagaaatagctggggctctcctggagatttttattccaagtgaatgtctgtggggctggggctgttgagttttaaggtgaatgagagttgataggccttcagagcataaaagaaataagtaaggggacagcggatccccttcccgaattcctcgggaaggcttaatgtgtccaagaacctgttggttaatggagaaggaaaaagttgcagaagagacacaggcaaggacaaggtcaatgaagcgctgaggaaaagaaaacttctccattactcgatggataaaaacccactcaacccgatcaaaagccttggccatgtcaagcttcagtgccatccatccaagctgtcccgaattacggtgggaaagagaatgcatgacctcctaaccaatgatgatattatcagaaatgagacggttgggaaggaaagcactttgggaagggagattatgctactaagaattggtttgagccgattgaccagaacccgagatatgattttgtagaaagtggaacagaggctaataggacgatagtccgtgatctgctcagggttaggttttttagggataagaacaatgagcgtctcgttgatagtcgctatgtctacatctccattaagaaagctttgggctgcaatgataatgtctttacctagcaagtgccaattcttttggaaaaaacaaccaatgaagccatctaacccgggcgctttctcattcgcaagttggaacgtagctctcttaattttagcctcaaaaaaagtggcctggagaagctcaatttcatcctcctttagacactcggtaatgcccgataaaacagattcgatgatatcatcctcagataattggctttggaaaagttgggaaaaataatgctaaatggttgccagaatagaaggagtatcattagccatggagccatctgagcgttggagagaaataattttgttggtttgacgcctcatggaagcgatacgatgaaaatatcgagtaattttatctccaagccgaagccatgtgacacgggaacgttgttgccagtattcttctgttgggttttctgccctaaataaaactcatttcaatataatcatatttacttattaata

SEQ ID NO: 220237 - DNA, 1850 bp, Cannabis indica
caaccaaacgccacctaaatattaatctcccaatcttttacactgacacaagcttaacaagaatcgatgatgaaagtaacacaattttcttctttttattatgtctgcaaaggacacctagcaattttcttatagcatattttccaatgagagccataaccatattttacatgggaacatgctagaaatagcaaaacttctctttcaaagcaagtgaaattattaggagtgtgggactattaagtgagcaactacaggccccacatcacaatttgggtgagttccctgtgaattatctatagatagcctagcctaaattgacacgaagttctcctggcagtctagcacaattctgaaggctcaaatccaaatatttacttggggaatctgagctttaatggccagtgtcaatgtttcttgatcaagagagcatggtttcccatttctgtttcactagagactaccacaggaggagcattcacgcgcctatagccattacagaaaaaccatgctcaatcctttttctttctagtagccagcttaattgatctgaactttgggtgttcataaaatatctaatccaatatgcaaagtgcggatatctgcacttgtgcacattgaatgttgattgacatataaaaataacagatctaattcaatactcgtatatttatatatattttaaaaaaaattgtatatacaattaatattttaaatagtgactttaaaatataatacatatatacaaatatggaacacttcttaataggtattatccatttaactataaatattaattttaaaaatatcaaaccattgaatttagatctaataatgaataatgaaatcacaaatttgaatttatatgcttaatttaactacttaattaaaaaaaatatcaaaaaatacatcttttttacactatatcaaaaataaggttcatacaaaaatatttaactcaaaactaaactttttcttttcttatttttcttgctaaaaaaaactttttttttttaattttttttttaccgtatggaacaatctcagcctatatgatataaaaaatgagaggttttttataattagatagaaaaatcaagcatgaaaattcaaaattttctaattttacccattcatgggtaatacccattaaaagtgcacacatacaaatatattttaaatctttagtagatcaaatatattatatccttatttataaagaaaatataatctaaaataaaattaaatatttttttatacatacaatttatttttttcttcttttgaaattcttattttttgttttctacattttaatttgttgttagagacataaaacaacaattatttgttttattttgttataagttaaaaattaataaatattaaaaagtaacaatctaataaaactgattcaatctgtacttttgcgaattgcattagatttgagttattatgcgaattaaattggattcaaaatataaaattcgtacttagtgcaaatcgaatatactataacgaaatagtgcaaatcaaatgtactatgagcgaaatagtacgaattggtttcgatgaaatgttggctttttctttcttttgcacaaaactaggattggatcagtgtttcttcatcaccagagcaaatgaaatcattttagctggaacccatattaatcaacaatcttcttcacaatgctacaaacttactacatagctagcatccgtcgctatggagggcccttgtgatgcttccaaaacgttgatgaagatataaaacacattagattaaaaatttgcctacagaaaacccacaattttagatatggggcactgcaatcttcaacagttaa

SEQ ID NO: 220238 - DNA, 3797 bp, Cannabis indica
agacaatgggatagatttcaatcatccatgtccacacacctcaaatcaaaacggtagggctgaaagaaaacaccgtcacatagtcgaaatgggcttgactttactagctcaagcttccatgcctttaagatattggtgggatgcatttcaaagtgcagtgtatctcatcaatcggctgcccactaatgttcttaaaaaccagtcaccacttgaagcactatactcgaaaaagcccgattataagtttcttagagtgtttggagtcgcgtgctatcactgtcttaggccctaccaatcccataaattccagtatcattctactaaatgcataaatctaggctatagtagtgcacataaggggtacaaatgtctaagtagtacgggtagactctacttttcaagacatgtgatctttaatgaaaatgagtttccatgcaagcatggattctttaacacacacaagagtgagcaacaagtgtctgtaaacgtcccatactggtcagcctcttttccctatcatgatcctacagaaaactcaagaaagagccaaccaaatgacaaaccagctggtatatctcgtggaaatcagtcccttgaagagagcttctctgcacaagaacaggtatctcatcctagtccctatacatctcatcaaaatccctcattgattccaaatatagagcaggttcatgaagaagagcctggctcgaatctcagatcacaagaatcggatgatgttgatgagcaagcagcacctttggcaccttcacatcccatgataactagatcaaaggctgggattttcaaacccaagacttatgtgggacaaaccaagtctgactatgatgatgatgagccaaattctatcgaggaggctctagcacatgctggctggaatgaggcaatgaacaatgagataagagccttaaagaacaacggtacttggattcttgtaccaagaagacatggcatgaatatagtgggaaataagtgggtacacaagatcaaaataaatgttgatggcacaatagagagattgaaggcacggttggtagcaaaaggattcactcaaagaccgggaattgactttggtgaaacatttagtccggtgattaaaccatcaatagtccaaatcatcctcacaatagctatctccaagagctgggagataagacaactcgacattaacaacgctttccttaatggaaagcttgaagaggatgttttcatgacacagccgcaagggtttattgacaaggacaaaccaaattttatgtgtaaactcactaaatctctatacggtcttcggcaggcacccagggcctggtatgatcagcttaaaaatactctaaccagcttgaaatttcagaattataaggcttattcttctctgttcttctacaagacaccagatctgattattatggtgctgatatacgtggacgatataattataacagggaacaactcggagaaactgcagcaattcatctccaaactaaatgatatgtttgctctcaaagacctcggctcactccactacttcctaggaatcgaagtccacagagatgaaaccgggttgtacttgaaccagtcaaaatacataaaagaactcctcattcgaacgaagatgcaacacttgaagccatgctccacaccaatgacagttggtaaagcactgtcgaaaacagagggagagttcttggaaaatcctacagcctacagaagtgtcattgggggactacaatatcttgctcacactagaccagatttatccttcgcagtaaacaagttaagtcagtacttgcaagcccccacaactgctcattggagtgccgccaagaggatattgagatatttgaagggcaccatacatcatgggttgcatatcaaatactcaaaacaattgaacttgactgcttattccaatgccgattgggcatgttgcccagatgacatgaaaagtgtggctggttactgtgtacatttgggggacactctgatttcatggtcttccaaaaagcagtcggtggtgtctcgttccagcactgaatcagagtatagagccttagcacacgatggattcaagctttgctgaaagagtttaatttcccacttcagagaactcccataagctggtgtgataatatgggagcaagtgcacttgctgcaaatccagtctatcatgctagaaccaagcatatagaattggatgttcattttgtgagagataaggtcttgaagaaggaacttgaagttcggtatgtgccatcacacgatcaaatagctgattgtctcaccaagagccttactcatcatcgatttcattttctaagtgacaaacttggagtggttgaaacccctctctgtttgagaaggggtgttaagaaaatgaattaatcctaattacctactgttgtgctgtcaatatttgctgtgatagccgttagccatgtggtcctaagaattgggaattgtcagaggttgttagaatattccttttactgctttcattgtaatccctttctgtacagctgtaccaaatctaaaatattctgtaccaatcatttgtgtataaatacaattcatgccagcatctattccatgagctgagctttacatattcactgctatttaattttttactataattgctatttctcctttcttgattgtgaatttatccatatttgtgttatttacatgtttaagattgatcactttttgcatgatttatgatccgaattcaaaatttgaaaagtgagaattaggaattctaaaattggataaactaggttttgatgtgaaacgaaagtatttgcatagcctaagtgaccttgagattattgcttaatgctgattatatgttagtctgattcagagatgattagataacatgtgatttagggcctacacaagatctgaaaaagagttaggttaatttttataacctatcattcacattgagaaagagaatagtagttaacattaataattgggtaattaaatcaacaagattcttttccttaatttctcatctttgattaaatatttttattgtataattttattttcttgttaatcttaatttttatttcaatcacaactttttggttaccaaatagaattataagtctgatttagtgatattcagttcaattccttgtgggatcgacctcatctgtgtgagtactacttgattacatacacttgtgtggctattcatattttttgtaacaagtttttagagcagttgccggggaattgtttaaaaattgacattacaaaaattagattaaattctactatggtcaattctttttgcttattgctaatctgtttcttttagattgtctttttttatttcatggattgggggtgcatgcgacgtcaaggacaaagtataatactggctattgatcctgaaattgaaaagacctgtagaagaaatagaagaaacaaaaagtaagaaagaagcacagcaagagctgaaacagaagaagttatggctgataacgctaatttcagtaataatgacagcaacaacggtaataacagaggtgtcgtagaagaccaggcaaacggtcgtattccacctgaccgtagtctgagagactatgttcttccaacattgacgggggttcagtcttgtataagaccacccgccgtagaggctaataactttgagataaagctagccatactccaaatgatgtagtcttcagtccagtttggtggaatgccctctgaagatccaaatttgcacctgtcaatttttatggagttatgccaaactt

SEQ ID NO: 220239 - DNA, 2484 bp, Cannabis indica
tctcaggattaaaatctattgacttaagatcatctaactgatattgacttagatagatataatggtaagtttatgatatcttatttaatgtcaatatcggtccagtctgatgtacactccatacatccgacactagtatactttgccaatgctttgaaaaggagataacacttatccaatatgtaagtatactttatcactgattatcatgtcagtctaaatctaatgtactgacaaatcatgggacaaaaactttgaaatatataatcatgattatattccactgtattgacaacactataatcatgaacaaccatatattctaaatttaatagaatttagacattaaacatataatcatgaaagcaatcatgtgaccatgcaacatatataaaatttttgatcttttattgattagtaaatctaattattgtaaaatgagttttattttacgacataaaatcccaacagttatgttgttagtgcttcatagttctcgtaattcaaccaatacttttcttaaacatctctatggaacaacgtctaagtatattgttgtagtacatctcacactcttccattaatattaagtgaagtatatgtgagatgcttgttacaacgtgccaagagcgaggtgaatcatgttgaagttgttgtctttatacttttaacatacacgggtatatgggtcaatgagctgcaaaactcattttctacttgttctaaaaaattctataatgtattctgtttatcctgagatagacttatttatctcactagtctcatcagtcggtagttgttactcgtatctcgccattgcttgtatgatggtgagttcaaataattctatcaattgtatttctcgaggcgagtcatctgaatgtatttattgatgcataatttgagctggttcatattctagctatgttacacaggtcagcaccatattgttgttcaaaatatgggtataacaccagtaacttctcatctccacgaactttgaagactttttggtgcactaggatcccttttaaactttctatccatagcgcaaagtcccctattctatcaaacttctccaattcaaatctcgccattgaaaatgttcattgtttctttaagaattgcagcgaaaagaatcttgattttgcattcttgatcgattaccaagctctaattgtgggaaatttacaactaaagtgtagaatcaaatcaactaaaatttaatcaacaaacaaatagagatgccaagattaacaatttacacacaataatcagagattaaaaataggaaagaacaaagtattaaaactagatacgattaaaacaataaaacaataaaatcaacatcaagatatattctagttcaagtccaatagttcgatgtgatctatggctgtactctagttctgaaacaacactaaatcttctttattgattgagcaagaacaatgtacaatacagtcgaaaacgattctctgttggattctctcaaagtgtttatcttttacacccttatccaagaatcttcttcatctacataagacttttcaaacaaaattcaaaaccaatctctctatttcctctctacctctctttctacctctcaatctttctattaagatcacctctcgaaacttctctgatctcctttgtagcaaaatactaagtgttggtggtatttatagatcctaaagtcggtggctgcaagtgctaagttgttaattagttacgacttaaaaaacttaacaaactcctcataacagaatctccacatcattataagataaagagcttccggaagagatatacgctttctggaagaaagaccaaagcaaaccctgaaggggcttcccggataggaaaggtgccagctggagtcgactatttgtgaattcctttcaagaggaaacaactagccattcggaactcctttatggagaaaggctagttttcctgaagactccatgacatccatcattccacgagattttttttttgatgaacaagttagacttccaggaacgccctcctgaatgacatctaacctttccatgaccagaataatttttggagatctttttatttaaatgaattataccacaaaaaggaaagtgagagtatatagtaataagctaagcacaacctaatgcggtttgggtcttcttctcacaaaaaagagattccaaattcaaatactcctccccaaatgcagcaggacgactcgttttatggattcgtgtatgcaccaatttgttttgcttgattcggataactcaagcttgctggtggccttgtgttgagtaatttggaatgctaggaatgataaagtttggtagaacaaagtgatgggggtcgaaagcattgtggcgtctgcaacaaacttccttaatcaatggcgggttgctcaaaattcgaacaatgagctactattcagtggtttcattctgggggatggggtggagcaatggtgtgttccaagcg

SEQ ID NO: 220240 - DNA, 1489 bp, Cannabis indica
taatttgatatcttactaaactacatatataaccgcacgagaagctcggtttgtttcctaattattatataatgcactcttttttaatttttttttgaacaatgcttttattttttaacaagaacaatgcactcttttgattagtataatctcattttttttcttataggttttataaaaaagtgactatatttgcactcgatagatgtataaaagcacccattctttataactattaaatcaatttattttttaaaaatttatgcttgataccatttttcaatttcttacattattaagttattttttgtattaactattttacatatttaatttatttttcttttatttttttttaaaaaaattaatattttttttttaaaaaattaatatttttttccttttacatgtaaatttatttttattataatagattttttagaagaaaaaataaaaataaaataagaagtatataagtgttagaaaaatattttatattaattttaaaaaaaaaaggaggccttaattaaataattatagtgaaagactaatatattcaaaaaaagaaaaatagtttgaggtttaattttaactatgttaaaggtagattataaaataatgtacttacttgatcatatgaggggaaaaataatattatgtcaaaagttaggagtataaactaataatagtagtggcaaaaaatcagaaggcaaaaccactcattgttataaaattttggtagtttaacaaataacttattaatagatagataataagtaaacaaaagttcaaagtgagataataatttgttcccccttgtttattgtaatatgcagcactctttcccgaacacactaattaacgccattagttttggacttattattaatattaattttagaaatccaatggagacacagaaacatgatttccctcacaatgaataataaaataaaaaatggtgtaatttttattttttatatataaatataatagttgaatgtacgtgccgagccacgtatcgctagtttcatttaagattttggtttttttaagattttaaatgtattttatttttaaagattacaaattttttgtttgaaaaaattaaatatttatatttgaaatattatttaataatgtattaaaaataatatcagtgtaattataaaattgtaaataaatttattattggagtagtaaattattctatttagttctttttttaacataatgtaagtttaaatctataaatattatgtaaagtattaatattatatgaacatctccatttataaagctaaaaagtgggtcaatgacagaattgatatatctgcaatcctgagaaaatattagataatgtgaggttaactttaatatataaagatttttctttttaaaaaaataaaaaaaaaaataattaatattctcccaagataagtttgttagagagatatgtggataagatgatttttttaatttaaaaaga

SEQ ID NO: 220241 - DNA, 2458 bp, Cannabis indica
aaacatttcattagcaattttatcattatatttttatataaatccctcatttttttagttttaaaacctttttacagttgtcatcttatgaaacaaaatgtaaaaactgtcataaatagtagttatattgtttctttctattaaagaaaaaaataggtctaaatattttttcaagaagaactacatcatcactcacaaattcaatttattttttcaacaaatattagttattatgtgtttaagaaattttttttaaccaaatgtaagcataaaaaatcaaatttccctattaaatttagaaatagttttctttttcatttattattttataataacaaatataatttctttgttaattctactatttttaatatttatcacaaagtgttatctttctatatattttaaaaataatatatttctaatttcaatactattacttacacatatcaaaatattatattttaaattatatctcaacaagcacaatatatttatataataaaaaattatagaagttgaacaacaccgcgtgaagtgcggcttagtttcctaatttttaataatgagatcttttaattttaaaatgaattgcattatgtaatgccatctggaagacgttaaagcaacatggagtttctttacctggaccaacaaacaacaaggggtgatcgtatctactccaaaagtgacagagtcatggcaaatcaatcttggttagacaattatcctaccgctgaagttggtttcctaaatgaaggtctctttgatcatacaccagctgtcctaactttgtatcctcattggcaaggtgggaagaagccatttaaatacttcagaatgtggaaaaattatcctgagtttgacgcaaagctccaagaaatttggacacaaattttacatggctcgaaaatggacatattggtcagtaagctaaaagccttgaaggaggtgtttaaagatataaatcagaagagtttttttgatttacaggatgccattttaaaaacaaggctggaattagagagcatacaagagaaactttagcaggaccctctcaatcatggcctacttgctgctgaacaggaagtgagggatcgatatgtacaagtgcagaaaaattactccctgtttctgcagcagaataaaaaatggcctggatccagaatggtgattcaaatactgccttattccatgcaagtatcaagcaaagaattcgacaaaatcaaattttctcaatagagcaacatgatgggtcaagagttcgtgagcctcaacaaattacagatcttttgtatcttactactaatctttgctgggaactaaattggaaggaagaaagaaagtgtcaagcagaattgtatgcaaaggccccactctctctcaaagccaagcagaaacatctttcttggaatcaggtagaatacttaaagagataaattctacaatttttactatagtgcctaaaatgtaatgcccaaacactgttaaagactttaggcaaagagcttgttgtaatgttgcgtataaaattgcaaacaagctattgtgctctagacttaaagtgattcttcctgatttagtttcccaaaaccagggaggctttatcaaaggaagatttattgggcataacattatgatatgtcaagatcttgttaggcattatagtagaaaatctaacaaggctagttgtattatcaaggttgatcttcaaaaggcctatgatactattgagtgggattttatagaagaaatgcttcaagagtttcaatttcctcagtctttcattactcttgtgatgaattgtgtacgcactcctaaattctctctcatgtttaatgggaccttacatgggtttttttgaagcaaggagggctaagacaaggagatcccatgtctcctttactctttgtcttaggcaaggaatatctctcaagaattatgggaaaaatgggagagaaacaagacttcaagttccatcataggtgtgctgaaatcaaattaaatcatcttgcttttacagatgatgtgcttctcttctgcaatggggattttaaaagtgtcctatacatgctacaaggcctcaagctcttctcgataacctcaagtttgcaaccgaatcctaccaaacctgctatttacagtagtaacatgcccagaacagagttgaatcaaactgtaaaagcatctggtttttcagttcaatacctgcctttcacctactcggggattcccatatgctctaaaagaatttcaagaaaggagtgtaccattcttgttgataaaatgacagccaggattaaggtatgcagttcaagaaatttgtcatttgcaggaagagaaatactaattaattctgtgctcttgaccattcactcatactagagccaaatcattatactgccaaagaaagtgatccatggtatagagtgttggaattatatttatccaggatctt

SEQ ID NO: 220242 - DNA, 2861 bp, Cannabis indica
aaactttgaaaatagtaaaatttgaaattaataaagaatataaatgtttatttttgctttgaacagtataaatgtttatttaaaataatattaacccaaaatagaaaaaaccccaatcgtaaatataaagagcctactagatattttaaaactaaaacgatatatccatttaaaataaaactgaatgatatatacatactatataaaactaataccagtttttctaaccattgtattgctataaaaagtatacaattgtctcttcgttataacatctgcaaagtaattcaaaaaatttcgaatagcaagtctaaagattttcgatttggcgagtacatagtactaatatatatataagtatacgatgaatattatgcattttatttgttttgacactgttatcagattcgttccttttcatcagtgtaattgtagtggccgagccgaagatatcaagttatcaaagttgtactggacgatggtagggtcgatctgacttcgaacgaagatgttgtcgtggtgaccatgaccaatgatggggtggtggagatggtcgacgacttgaaacaatgtacgtactgctattttttttttttggaagaacaccgaagttcattaattagcaagataaatgggaatcacagaaggaattctctccccttggactgtgcctgttgattggctagcaaccctagcacttttagcaagaccatccgcaaacaagttacaactatacttaatgaagaagaaactacaaatatcaaactgtttaataagatctaagatagataatgaaatgccaagagacttccaatctgaaggacattggtgtttggccaaggtggattacctgccaacaatctgaaagaatatgaacttctttccattcatttttagcggcccacgaaagagccatatgaattgcacaaatttcagcttccatgacagactcaattaaagattgctgagatttgaaggcccaacaaccattcgctctgtttcaccacagttgccaaaccagctgctcctttatgccacaatgcattagtgcagatgacctgattaaccactttgttactcagattagcctctacctctgtccttttccttttcaaactagtatttagatcaattgtttctgcacaattactgctaaaggtagcataatcgtgataaacctgctttactctcatccgaaccaaatcgatacttgctagaattcttttccatcaaaggttatttctttgattccgaatctgattgaacatacaaccagcataagtcaaaacctcctttctgttaagatttgggaaatttgcagcaagattcttcaagaattgtatcatgttgtccccaggaatgttatctatctttataggaaagatactcgagaaccacaagcctttagccaagctacaatctataaagagatgcaagctactttcaacagcagaaccacacaatgagcactctttttctagtacaaaatgaagtttatctttaattggaatagcttcatttaaaaatctccaaactagaatggctattctaggatgaatgttagaatgccacaactatttgcaaacatcattcttgggtacaaaccttaagctttgatcaacacaatatgcactcttaattgagaaactcccatcttctttgttcttccacacaatctgatctttatgaggatatggtagtctcgagattcctagaatgtggttacctaaattttctccaaaaaattgaagaactacttctttattccaagaaaaaccatttgataagtctgcaacagttttagtagtgaatctattggtcctaagactgtccattaggttcttaaaatcgataaacttcatcaaagggatctatggttgtttccaaaggttgattgatctaccatccaccaccaacgaaatcgaatccttagctaaaacactacgaacctctagaagacacttccataaaaaatgaatcactatcctttttacttacttccgaaaaactttcaaacttacagtatttattaagaaggcatttaagccagggtttatcgtctcctttcgcaatacaccaggccaactttacaagaagtgctctattcatatcctcaaatcttctaatcccctgaaagctttagttgagaaattttgtcctaggatttcagcacaagaaacttccttttgtccacattacatcgccaccaatactaacaaatcatcgcatccatttctcggcaaatagaaataggcactttttttgtagacatcgaataaatcggtactgaaaaggccacagacttgatgagagttaatcttctagcataagacagtagcttcatcttccatccttccattcttttcatcattttttctttcaactttctgtaatcttccatcttgtgccttttgaaaacaaaagggttcccattgtgtctttcttctccttgagattgattgattaaaggagattccaaaattttatttctcctcccaactgacatgttgtttgaggagagaacattggatttcgttttgctacattcttgggcagaccacttctcatgtatagtcaaacagtatagaagatgttttgcctctccattatttactcgagcaaataagatcgtatcacctgtaaacataaggtgcgagatcgggggggctgatctagcaatctgaatgccatggaaactgcctttcatttcttggttttgaataatttttgacagaatttcttggcaaagaaggaagaggaaaggagataatggatccccttgtctcagccctctttgcggcacaatcattttgagaggggattcattgaagagaagcaaataagtcacatttttcacacaa

SEQ ID NO: 220243 - DNA, 2712 bp, Cannabis indica
aaaaaaaaagaagaaaatatatatatataataattattgtgaataagagggatgttggacacatagtttgtaagcttctcaatcatagctattacattacaaccatgaaaactcttttgattccaagcaaggattgttgatattagtagagagaggtaagtcatgcaagtatattaatcattgggttgtgaaaagtataaaagagtagaattatgatgttattcaaacaaaaaaagtttaatttgcatctatgcattgtttttcaaaaacaaaaaaaacatccgaattaattattagagttttgaaatttaaatttcggttacgataattaattaaaagttcacaggtggcagcggaaatttgattgaaatgaggcttatttaattgtttgttagttcatgtgtttttttctcagtttttagccttactcgtcgagtaaggatttagtttgagggaattagttagctatatattttagcctatttttcagatcactttttaaagttagttttcttctttgttgttattttttgtacaattttatgcttgtttttctttgatttaggttctcgggattttaaagtgtaaaattagttaactaagggacatgaaaaatcatgttgaatttatgaagcgtggtcgcgacaagcctatttttggtcacgactaattgttgttgcgacgaggattagtgtggtagtggcaaggagctttggcagaaatgatgtttttgactctctacagtagccgcgactagactacctgtggtcgtagcaacaactctgtacgggtcaaggaattttttgtcttttcttgactttaagttgtaaaactaagttttaaaagggaggtttcgaatttttatggattcagtcagagaagaaccttagaaaacaaaagaagaagactatgggaggaagtgtggcgatccgatcgagttctccatctaatttctttctcttcgctttaatttcttatgttttattatttttttagtttaatcatggatttgaatgttgagattataaactaattttccaatttagggatatgataaatgtttgatgattttattctaaaagttaatgggatttgatatttcttctttcttgattgagtgatttattcttctttgtgcttattacatatgtttgattgaccaccttatgcatgatctataatctcaatacaaactctgaaaagcgagtattgagaatgctctaaatgaatagacatagattttgatgtgaaacattcacataacttgtgtaacccttagattatttcttaatacaaattatatgttttcactcttagagatagatgacatatatagtttaggaacttcatgatctaaaaagaatttagggtttttttttaaaaaaaaaaatataacaattggataattgaaacaactcgatttatatccttaatttctcattcatatttgaataacctttattgttttctttaattttttgtcagtctttattattttctctcaaatattatttttcaactaaatagaaacataagtctagtttaatattaatcaatttgaattgggttaaattgtgagtactacttgataagtgcacttgtataatgtaattttttgtaacaaccttaataggccttatgtgtcttaaattaagtgactatgtgtttttgggcattgggcaggacttcattttaatccaattgtttcgttacaaaaatattagattttgaacaaaaatttacaattttactgtcccacaaatttttttcaaaaataatgtctttttatataacaaccgtaaaacaacaaaacagaacaattaaaaacaacagtggaacaactaaaaaataacagtaaaacaacaatgaaaacttaacacagtacagtacaatataaaaaaaatatacagtgtttttgaaaaaaaattcgccccataataaaaaagaaaaaaagtgagaaattgtaatataaaatgtaaaaattaattccaataaaatattaagcaaaattttaccacttactagggcgatatacatgttacgtacataaatctaataggcagacttagtatctggtcgatctacacatatagacgagctcatggctctattcaactaaccccttttgttatgaataaacaagagattcacagaaagagcattaagatattcaagcaccaaaataacaaattaaccatgttacaaatgaatcagagaaatgaaatatagcagcagaaaaactgtaaagaaatgctggaaattaattaataagagtaaatagcatatacacagttttatccagattttggagcataaaggtctcctacatcccgcttggcttgcccatcaaatccaatattgagtagagattataacacttacatgcttaggatgaagaacaactctctctctctcacaagttacagagtttttttcctcactcacagctcaaatattcttatagaatttgtcatttccttcctatatatctagaatttaggaaccaaatcttccatatgtacatattcattctccaatgatgttggcagccaaggacagccacatcagcaatgatttgatcagtgctaaataaagtttcaacataaactcagcagccacgtcatcaacacacaaattgtcgaatcaccatattcctcacacctttgatacaagtcttggccatgaatattgcataagtaagtttgcactaga

SEQ ID NO: 220244 - DNA, 2453 bp, Cannabis indica
ggcatcagaatgtatactgggttatgcacgacttctagagaatgtgctcaatttcccttctgattctttcctgccaggtccgtgctcagcttcattctagggtatggggaatgggagttgtttcagaggaaattgatttgaaatatggtgaaaatctaaaatatgacgagggtggattttttgcttcaaaacttgagcgttgtttatgccattgaaagagagctgataaattctgctaatgtcaagaacatctctgaagatgggactggaaatatggaacaagatatcccacatcaacttgactgggatgttctagaggaaatagagacctctgaagaatatgagaggttggaaacagaggaggtatgctattgttttcactcttgtagtttttggtttactataattctttcccgattccaccacttttcagtcttttactttactatgaaatattttgtccttatccgcagcttgaagaaaggatggatagaaactctggtatatgggatgagatatatcggaatgctcgaaaatctgaaaagcttaagtttgagatcaatgagagggatgagggagaacttgagaggacaggtcagccagtctgcatttatgaaatatacagtggggttgcagcctggccatttttgcaccatggttctttgtaccgtggactaagtcttgtgagtactttatgtatatttaatatttatgttagtaagtcttgtgagtactttatatataattatatatttcatatttatgttaattttgttcatatccatgtcaacttttttactttccttgtatttttgtacaatctaattgtatgttaagttaaaggaacttaaaaacattatggaattctaatctatagattggtttagctagagagaggggatctaaaacataaaattactacttacaaggctttatttcaagaatcattttatttaacagtggctgccccttttttgctctttttgctttggtttgtttcttgcggataccctgtacccctctttcttgtaatttcgttcttgatatttataatacactctttcttacagaaaaatgtagattaaaaatgcaaaattaccactgagaagtcagagaagttacaagtgacaaagcactcatttgtggattttttttttgtaatgtgtttatatgtgttatattgtacttgcataattgagttcttataggcgtgtcttttgtcttctcacccttatcagaacttttcaagttagattaagtcataagtattgaaatttgcactagaagtttgttgttacactacttattgaaattatcctacgatgtatgtggcagtctaccagagcacagagattgagatcagatgatgtaaacgctgttgctaggcttcctattttaaatgaaacctatatagggacattctttgtgaaattggaggaatgtttgctattgacaaaaaaggtggataacattcatgggagaccttggattgggtttcaatcatggcatgctgctggtaggaaggtatttaatttatttaatgaattttacttttgacttttatggaattcccttaatttattccgtctattttttctggtaagtattagaaacttttcaattatgccacaaagatgctgctgaacctgataatgtcatctttatttttcgttgcaataaatgctgctgtaatatttcttttttcattcttgaaataaatgtttacggtttccttttcatttttgagaaagcaggtttcattgtctacagaagctgaaaaagttttggaggaaacgatacaagagaacactagaggagatgtgatatatttttgggcacgtatggacatgaatgaagggtttcaaaatgcacttacgttttggtccatgtgtgacatcttgaatgggggatactgcaggtatgtattttgacgtttggtttaagtagtctttaagtatttgtatagaagagaaataagcgagtaactgcgctactttagtacctgcatcaggaacaatttaattaatgttctgataattttgggctgtgaatgaaccttttctttgcttaaaaatgcttcagaaatgcttttgaagatgcatttcgacatatgtatggcttgccatcacatattgaagctcttcctcccatgcctgaagatggtggtcactggtctgcgctgcatagctgggttatgccgaccccatcattcctggagtttgttatgttttctcggtatgattctgaggctcaagcttgctatttttattcttacaggcattttttcttctttattcagtgatactgaagcttgttgctgaatttgaatggagttaaattgacatatcataaatgaactgcagaatgtttgctgattctcttgatgccttacacaccaataatagcaaaagaaatatttgtttgctgggctcttcagacattgaggtatgtca

SEQ ID NO: 220245 - DNA, 1865 bp, Cannabis indica
ttttctctctcataaaatatgatatttgttgactcagtttttagccaacatcacgaagtcacaaatacaataataatggtttaataattaattaaagagaaaataatatagtataataagaatgggatttatagagattctataccaattttaatggtaatagtttatttgtcttaacttttctataaatttcttggttcatacctagaataatatgaacaagattcaaatgagctttccaagttgagaacaggggcaaccctggactaagatggccaggcctatgcctagaacccactttgcctaagaccctcccaaaaaaacctttttgaaatacatatattttttttcctaacgttaatttagtggtgtttgttctatgtgaatttttttatgtcctcacttggtgttatgaacttatattttaagtttttttatatcaattataataaatgaagataaataaagaatattttcttagttaaagatcataacaaataatgtggaggcaatgaatacaagatccttagggattagaagctgatttactgaatctggaccatatatgctcttgtcagtcatcgactaggattcatttcatgagcctagttgaagttgtgattatttctcctaaattgatattttcatcgggcaaggatgtgtcatgcaaggacaatgttgatcgtttactttttctcgaccaccaattatatttaagtgtgtgatccttatgtccactcattgtatgtaccaactaaatttattaaagtgatactttatcttgccacatgtaataactcatatgctacgacaagtaaaaaatcaagataagaaaaatatttttataaaaactttaaatcctttttatatataatttttgaggtgtatgttcggtttttgttgcgtttggattcactagatgaatactacaaataaaaaatgagattacttggtttgatgatattacactttgtattttggcatatgtattccttattctctttgttatcagtgtttttagatgactaataaacgtgctatctcagaggcccaatatgaaacaaggcccattcatagggtcctcaaagatcagaagcacggtccacccgtcaaagatgagtggagcttggcatgagctctaactccatccgagttgaatttataagaaggatccggaacttcgaagcctaatatctccctcaattaaaatttcaaacaagtctaagacaagaagggacactctcaagaggcatgcaggaatggaatatcaaacggcatttgtaatcactcaagatcacgaaagtcaacccagtggcagctgacgtggtcccgagaaattaggcggcttgtcccctatgctagaccacaaaaaggttcataggaaaagaaaatcacctttttgtccaacatccactactattacattctctctccaaactgatgacacacacgtacctgacagtgtcagcaacgtgtttgcgtatggacaacagttaccaacatattggacctcaccaaaattttgggcactttcaaaacaaccggtcgcccgattctgcctagtttctgtaactcaaaaactttcgagttataacccttttaaacttgttcaaatcaattataactttccagaacattatgttcatgcattctaaacaaaactataagctgagaacacaacataaactaaagaatccatactcatcgttaagttatataaacttaatgtttatttttagcggcataagtacccaacgtttataaaactgtaattttcctcaagtttcattagtacaaatgttttgaattattaaaagaatattggaagtaatttatactacatgtttctatctagacccaatgat

SEQ ID NO: 220246 - DNA, 5561 bp, Cannabis indica
ccttttgtactcttgcgaccctctccctctcgagataattaaagtgtcccttcttctcgtggaagagggttataatctttagtcgctcgagttattgggcagattgaactgatcataggcatcttcctgcccctttatatatcgatgaaggtgtccttacgatatgagactttctatctcatccttcaactgacaatactcttctgtggtatgaccaatatcaccatggtattcacattgcttacttggatcacacttgtgcctcgcatgtttcataggtcttggctcaccaaaaacggcttcttgtacgtgtgcgaggtagatcttttcccgagtttcattaagctcggtgtattcggtataaagagggatatacttgttgggtttcttgtcattaggtagccctttggaatcatcttttttcactgatcccgaggcttctgaatcaagttttccaacatcatcatgccccagttgtctcctaggtttcgtgatttgatgtacccgctcattcgcaaatggaatgaatcattttgtcttgaatcaagtcgttgatggaggtcacgcttttttaggttcagatgctctcatagatcactctcctcatgattgtggccggaccctgtccttcctctcaaggtttgactcacttttttcttcctacaagggtttgcacgagtttcattcttatgagactgaatactgggttggcaatttatgttcgatgttccacgtatcgtaggttgtacccctagtcttccctcagtttcctcaagttgcatcccttgagagctctgagcatatccctgggtcatctcttgcctcttgacttgtgagccacgaggtttgccttgtaaatctcttttctcaaggtcaggttgtttttgggtacaatctcccagcgttgcttttacggttgttatttcacgctccaactcggcattacgccggtttactttctccaatcggcgcctaagatggcaattttctaattccacgatcggtatatatctggttgggtcgtaagcgccatcttcatcaacctgattagggagtgaccgattgttgctcttccaaggttcgtcaagccaagggccctaatactgggtcttcttggggcttgcattttgttcatgcgatgattcagcagatccctggggactcaatggttcttttccgggacgatgattaaaatcttcttgaggaccattaccggtggtatcatccatcacttctatgtcatgaaagcaccaaactgttaacaaaattttgttaaccaaatttgagtctcacaatgataatacaacacagaaataataaagctatagaataatatagaatatgaacgctggatttttacgtggttttgtagttaaaattctgcatagtccacaagtcaatcttattcagatttctgagtagttttttcaaagcctctagtataagagttttttttgtcccctattttgatcttatctgccactatttataattgcatagtggcagttaattacaaagctgaccaaaatacatttacggctattatctcgaaaatcatggaatttgattacaaatcaagccaaataaatgaggtttttacacatctatgaatatcctgcctttattgggccgagatgagcgcataattaaagatatacggtaattcgtatctcatagggatgcctcgtcgaggagggagccaagatcactttgattgcgatcagctgcttgtcattttagcttctcgagactaatattctcttaaccctgatggttatactttctggggtcgaaaagatcttccttgcatgcaaaacatcttttagcgagataattgcctcgctattttttatcttgactcgccacactatctgtactcagtttgtatatcgcatgatatacgctaagtatttttagtgttgtcgctttctctttcatgcagcgaggttgaggcctcgtcatgagcgtatgcactcacatggtttctcgtcaatacataaattagcagtttgtatgtttctgtctcgcagaaggttattcagccagccgagttataaacctaccttgggaattatatttccaacgagttgttccatgctaagcatacttgtcgtttgtgtgtttgagttcttcccagcttgacacgtgtcctcctttgatgtgcttacaaaacttcgggtataacaccttccttgctaaatgggaatggaatatcttaaatggttgccagtctctgtgttgccggattctgactgctaaataccttagagggcaagatttccttaactgcatatataaagactctgattcttggttttagaaaaatgttgttaaaaccaagactatcttgaggaaaggagcgtgtaaaatagtggccaacgggagggacactaatatttggggggatccgtcgattccccacataaaagacttctaccccaagccaaatggatctcttgatcctaatccttgtctagttgcagatttactctcctctgagggaggatgggacattcataagttgagatttcttttcaaacaagagattgtttctacaattttaaaaggtgggtcccccagatctcggaaaagacaagtagtgttggactcttgaaaccaacggtcagttttcgtgcaaatcggcctacctgacccaggtcatggagagtgcccccctctgtgaggtcactcctttgctctagaacaagctctagactagtaaaattctggagcgccataagattctttggtggtctattctttccaatgctctcccggttcgggtagcgattaagaagcggtttccgatagaagacactagttgccctttgtgcgggatgggcgaggagtctctagaacacttatttctctcttgtgatgtagcattaaatgtttggagatcctcgccttggggcatttattctgtttgtgatacttgtatccgcttgtgggattgggtcaaattcatctgggacctaaaacataaaggaattgatgctgagaaagttttcctgtatgcttcaattacaatggacacgatctggcattcccgcaagcaaaggttcataacaatgattcagttgatgtgaagaagtgtattgactctatatgtacttcttttgcagatcttaaggattctctttttccctctcccgagccttgtcggacggaggtatggtcttctcctcctgaagattggatagaaataaactgtgatgttaaggtgggattggatagcatgtgtactgcagttgttgctagagaccatcttggtagggtggtttggatccaaacagctcatctggacttctctgatgtgttgtgcggcgaggcggatgcctgctgcttggctatctcgattgcgaaggatctgggctttaagtttgtcattgtggagagtgactcgagggtagttatcaatgctctcaatgggaaggtatcctattgggctttggataactatgtctcattttgtattagttattcttcctacttttctagttgtattttctgtaatattaatagaaattgtaacttgttgcccataatgtggctaagtaggcattttcctacaagaagtttggagttattccttttgattccattccttttgatttggtttgtaatgaccgtgaggtctaacagtatttttatctagcaatataatcacgcttttcttcaaaaaaaaaaaataaataaataaaaaaaaaaaaaaatttcgggtattattctgaaaaaaaatggtggtattacatgattcagcaatacgacgtcgtctcatttctatcaatggtttaagcgtgaaatagtcggagttctggccgttaatggcgagctacaagattctcaaccgcctccgccgatctattcaagctaactatctctctcacaagcgtgattaccaccttctcaacattcttaactctaattctagctccgtctcttatgctcttccgttttcttcccacctcggcaaacccaacctcccgttaaaaaatccgtactcgttgttgctcaactctcgagctattaccactcagtctgaagatgattcggtgtttggagaagctcgagctgttgataaccaccactcgatcactgtctcgcccgagttgattgcagaatccaatgttatggatgaagctttatcaattagctgtgaagagtcaatgcttccagttcgtctagtaagctcaatgctggatggatttcatgaatttagtggcttgccatggtgagtttccacacattgttttttctttttactatattttgatttttttgcttatctacctattgctttgaatatgagtgtgttcatctatattggttgcttttgttatgtgtattcaattataggtgggtagttattgcttcctccacattggctctcagagctgttctgttccctttgcttatatttcagcttcataagttgaaacgaattggagaattgtttaataaatgtaagtgttttttgtatcttcacttcaatttgttcattactcactcaattatgtcaccattagtttaggtatcatgtatatcataaattaacttcctttggttcttattatctgcatagtgccatccccatttccagagcctttatcaggaaaaggttatattgatcatctttcacacttcatgaaggaaaagaaagccattggctgtccctcatttttatggttccttccatacgtctgtgtccaggtaaatattttcttaaagtgtaggagaggagtgatgtttgtctatgtaagttctatttgtaaatttatttattcattgttattcaaaatatatgcaggtgccatgcttcttcttgtggatgactactgtacgaagaatgtcgctggaccatcaccctgggttcgattgtgtaagtctctgaagttttactactagacaagcataatttgatcaattgttgatacaattgtttacaaggttgtatagccagaactagcacaaatgttttaacttattttaggtgaaaagcatggagctatgtgaaagtttcttttgattggtctgatatattttcttcgtatttgattgactatcattattgatttcttcttctcagtcatcattcatgtgtatctttaaggcttttttttttcttcttttcattttaatggctttggctgatttcagttgattgcatcttttgtgtccaccgtcatacaggaaatctctaaattttataaccatatgttgcatatttatatagcattcatggatttgttaaattaaattttctacggtgttcatgtcaggggggtgcattttggttccagaatttgactgaattttctcatgggatttcaggctccatattccctgtagtaattgctggtttgcactataccaatgttcaggtattcagttggttaccaattacagctgataactacagttctaattactttgtcttagttatatgttgatgtaagataactagtctacaagcaaacaaaagaatcttaaaaaaaaatctactctaataggcagatagtatataaagaatatttttactatgagtcctgtcagcatac

SEQ ID NO: 220247 - DNA, 1472 bp, Cannabis indica
aggtaaaatatgtattgccataaatacattacttttatttacttttataattttattagtatatttaactataatatgaaattatgtactatttttttattattacttgcaatataaaattattattttttaatgcaaattaattttttttattaattttctaaattagtcaacaaacaacactttaactcaataaaaacatcatttctattaaatttagataaaaaaaaatgatgctctaacaaagcaattagcaacagatcgtttaataaaaaataaagacacattgtttaacaaaattattattttgataaattgtgagtaaaaacattagttaaattttactttaaatttttcaattgtgtgcattagaacataatattaaaaattgatacaaaatttatcaaattaatttttttaacataaaacatacatattaaacatacgcatgcatcatcaatatgtggtgatgatgatgtggcattccatacataatattaggattattattgggaaatttaaattcatatgcatttattaggccaaaatttatcccctaattgttagtgtatcaatattgttagattagattaattttgcattaaacccaaaattacccctcccatatttcaactcactctctccatccattctctctcgccctctttaagagaaccgaactgccacgaccatcgccaccatccaagactaccgtcgccatccaagactactgccaccatccaacaccactcaacccactaaaaaatcaatcggactgaccctctcgactctatttcaatccgtcctatcccacgccaatctccctcctcaaccgcgaacggagagaccactgtcacgaacggagagacttgtatgagtttattgatttaggattaaaatgtatgatgaatctatgtgatctgtgagcttatgttagatttagggttgggtttggttggatctctgttttgggtagaaaaccggttttatgtcaagttcgatgcaggttcgatgcaggttcaatgcatgctcgatgcctttctgttgttaaaatgagtaaaggttgaagacgtaggtttgatgtaggcccgatgtaggtccaatagtggctcaatgcctacccttttttttttttttatcttttttatgttattgtacataaaaatgggtaccgtcggaccaccatatcagacttatgtctacaacctttactaatttcaacaatagaaagacatcagacctgcatcggaccaccatcagaccatatcctacatttatgggtaacatcgggccaccattgtacctacatcttcaacctttgctcatttcaacaatagaaaggcattgggcctgcatcagaccaccatcggaccttcattcctaacttccagattacactactattgtacccactatcaaatctctatcgtaccccactcgtaccataataaaaaaaaaaatcacaaaaaatg

SEQ ID NO: 220248 - DNA, 7599 bp, Cannabis indica
gagaaccagacttgagcctcttgcccaaccggctaactagaacaaagtcattgccacagagggggcaatgtcccttaacacaccatgagaaccagacttagagcctcttgcccaaccggctaaggcatcagccactctattctcagaacgaggacaaaagcaaaacacaacctaatcaaaacacttacacatacatagacaggattcaaacacaaggtaagtgccccatgcgagaggcaaacaaccaagattgagagccatcactgcaaccttagagtccgaaaggactttgatctttagaatgttacattgacgagccacttgaagagccaacatgattgccaacagctccccttcgagtatcccagccacttttttgaaatcggtagctacccaagccatctccctgtcttcctcagccctctgaacagccgctaaaccagcttcatcgtttagaattgaagcgtcagtattgaaaggaaccaaatcggttgagcaaaaaggatctgcaatatcctgagaagccaacaatgaaacctccccagggtctgcaatatctctcaggttcatctcttgcacggaggcttggacatctgatatcaattcctcaatcgcgaaaggccgattcttaaaaaacacattgtttctccatttccaaatcgagtcacaagcacaggccacaaacaactggagactctcatccttcacagttgtccaccacaaaccaaagtccataatagtgttccaatgcagatcatctattcgaatgccccatttactatgaaacaacactgccttaaacgcactacagacaccaaacaaatgcagcaccgattcatttgcattatgacatagcacacaatcctcctccagtatcccaattcgcatcttagtgggaaaaacatcagaccatattttccaaagtaaaagttttagtctaggatgaatcgatgagcgccaaagcttttcccacaccttattcggatccttgaatctctcttgttgactcaaccaataaccgctttcaaccgaaaagtttcccgactttgaagctttccaaaacaacaggtcattactagatactaaaggccgaatgctcatgatagcttgagccacatcctcctcaaaacaatctctgataatctctgaattccactcacgggtcccatccaaaaaaagatcagaacctttgacaaaggcatgtcttctagagtaagtgaaactgtttcgaacttcctccatagacaccccaggaacccaaggtctctcccacaagtccgaactaccatctccaatgaggaccccggccccattcttacaaacttttctagcctccaagattccttgccaaacccaggaatctcccaatctcttctccaccctccaagcatcaagcccctgacagtatcttgattccaacagtttcacccatgctttgtcagctctagaaagcatcccccaactcagttttgacaaaagagccaaatttatatctctaaaccttcttagcccaagaccaccacatctttttggttggcaaatttcactccaagtcttgaaggaacgatatctctatttttcagcattgccaatccaccaaaatcgcgccacaatcctatccaactcatcacaaacagccttaggaaccatagctgttgacatagtataacaagggatgctttgtaacaccgatcccaccaatgtagttctcccgacttgagacaaattctttgccttccacccctccagtcggcccaggaccttgtcttcgaggaagtgaaaatcccttcttttcttagccgagaagaagaaaggattgccgaggtatttttcttcgtgactaaggccgttaatgtccattgtactcttgacttcttccctacacctcaaaggagtgttaggcgagaacattactccactcttctgcttattaaccttttgccccgaccaacgttcataccgagatatacactccataagggttgccgcattcttcccgttcgcctgacaaaagaaaattgcatcatccgcatagaaaagatgtgaaataggcacagcttccctcgagaccttaacaccactcaactccccatttgcctccgctcttagaattaatttcgaaaggacctcgctgcacaaaatgaacagtaacggcgacaaaggatctccttgtcgcaaggcacacttaggattgaagggagccaaaggagccccattgaggagcaccgagtatgaaaccgaagttacacagctcatgataatcttgcacaccttttcactaaatccattagctttcaaaactcgatgaaggaagttccattctaaacggtcgtacgctttactcatatctgttttcacagccatcaccccatgcttacccttctttcttttcaaactatgaagaacttcttgcgccatgattgaacattccgcaatacatctacccggaataaaggcggattggaaaggggagacaagtctatcaataacttctttcaaccgatccgtcaaaatacgagatataattttataacaaaaattgcatacttatcgaacggaattgatcaaacctggacgcagatgtaaccttgggaagaaggcacaagaaagtatgattgagttttgcacataccgatccctcttcaaagaatccttgaaccatctcgcagaccttgacccccactatcctccagtatttcctgtagaagatgcccgagaatccatcgggccccagcgatttcaaaggataaagtgcaaaaaccacctgcttgatttcgtcagcagtcggcgttctatagatgttattgttttcctcctccgaaaccaactccgagaagagagagtcaaagtcatcatcgataaccgtattctgaatttcatagacctgaatgaactgattcctcatataattcccaatgtcttcacgatcatggagccaagtgctatcattattcacactttctttcgtatttctgcgtctcttgatcaccgtagaggcgtgaaaaaattttgtattgccgtcatctttgcgaatccaatgctcccgcgacttttgtttccatattctttccaaatttgcctccatttccaagatactcagctgcacagtagcttccctctccaaattttcctttgaaggcaacttattttgaatttccaccagctcctgtttaaactttctcagcttctgatcacaaaagccaaatgagttttgattccacattttcaaatctctttttgccttgcccaatttcttgatcaggatttcatcctttctcccattaaattcatatttccaagccaaatcaatcaccttctcgcagccgggactccaggtccaaacttccataaaccaaaaaggataattaagccttcgatgttcttcactggtcgatagcaaaattggagagtgatcagatgccagaattggcaaattcgatacttaagcatttgggaaatgggtacaccaagctgcctccgccaagccccgatcaagacgcttccgaacatttttcattcccttccttgcattacgccaggtacaacgaaccccatggaaacccaaatccactcctccaatttcatccagaaaatcccttagaaaagccccctcccggctatggaattcccttcccccaactttttccgatccttctagtattacgtttaaatcccccagaacaacccacggctccctacagtccgacatcaactcagttgcccatttccaaaattcaactttctcctcagcataaggagtcccatataagcaaaacaaatgccaacacacacttccttggtttgcaggaacaaaagcatggaacccagtagcaaaaacttcctttatttcaattaatccaagttgtctccaagccaaacaaaatcctccaccaatgcccaccgaagggataccagccacattaggaaatcccaaacgattcaaaaccatagtcatatcccctactcttaccttggtctcggacagaaacaccacatccacattattttcctggattaaactccgaagagttctctccgtcgtgggcctacgaatcccaagacaattccacgataggcacctcataatgacggtgggggcatgcttgaggccgcctcctcgccatttccaaaatccaattgagaataattatcaatacaattttccaaaacaacttccaaattaccttcaaactcgttgatctcacattgttgcgtttcagccctcttcctcgcacgccgtgttttaacaccagaacctctgttaaacatcctcggccctagaccagtttgacgagagctcttgcgccttttcttctcaccacattcagcagaaccgaggcagaacttcggggtgactgcagcttcttcctgcgacttgccatttccttcagcttccaccgtggacggacaacttggtagttcaaagctggtgacagcaggccacggatggtaccaagtatggggcttttgtttttagttcccagaaattgcacaatcatcatagagagatcgggagggttacaaatcaaagaggcttgggccttatacatatcagttaagtccgggacgtacaacttgaagaagagttcttgggcttttgggtcatcattgggccatttaagagggataggctcagggaaatcatggggcttctgagatctacaaagccatgaatgaggaatttccaggctttgggctataatcggcccaatatccgggatcctctcttctccatctgggcctaatgaaaagttaggattaggaagctctaaataaccaggcccattctcaatattcaaaaccctccatctgtctatcccccacgttttcaacattttgaacgccatttccatcagcaacggatattccacctgtccttgtacaatcttcccccgtacccagcataataggctcagtggtggatgtgccctcctgcacatttttttgtttgtggccacctgtcattgtactatcttccaccttgtccttatctatgccgttctcctcccccggttctggaataaccaccgcagagtcgccggaacttctcgacattttttccagcactttggcatggcgcttccatgtgtttcttcctctatttcttgtcaactcccattcaggcacctcctccctctcaataatcagctgtgaagttccctttcctttcatattaaaacaattacttctccttgttttactcttaatccaagtttcatacattggaacagtcggaccaatcttagaatagaccatagtaggctgatccgaacaaaccttttcccaatgcgcaagccttccgcagctgaagcataaatgaggtaacttctcatatttaaattggaccaaagagtccggcttgccgtccgccttgagaaagaagccagacgggaaaggatgagataaccaaatctcaatattactcctcagataacctctccgaactagttcttccttgcttttctcttccttcttaactaagttgccaacttttttagcaaggatgggaatattctcattcgataaaaatcgtgtaggcaggcaatggaactgcacccaaaacgatgccacttcaaactcaccactgtgaacctccccctcaaccggccaaggtttaatgttaaggaggacaccattgatgatccaaggccttctttccatgacaaaatggtaatcatcttcctcatcaaaaagaacccaagaacatcttccccacacttcttcattctccaaaagcgcagcctgcgccacactcctccaaggattttcttcaccactgaggctggcatgttcttacagcccactaccttaccaacacacgccttgctagccaccacatcttctagtgtaatatcctcaaaaagctccagcatttccatctcaagattactatctcgtttcataatctcttccttctccatgtctacagaaactacttgaatctctttgcccttttccccatcacaaaagaccacaacaatgaagatgaaaactttaagcacaagactcacacaggaaatgaaacaagcaaacaaaagactcggagagactaaaaacttgggaatagaattagaatccacaaaagagacttgtcaccttagcattcacgctcttacaatagtaagcagactcgacattggagccaatattactcggtttgaagttgataaatttaattgcgcacaaatgattttggagatgacaagaagatgatgaaggaagttcatattaaggcacacagtcccatattattgagtttaggagatgaagtactcaaggaagtgtcaagtgaagacactgcagtggggctatgggaaaggttggcttcaatttacctgaagaagtcattggccaacaagctttacccaaagaagaaactgtacacaatgagaatggatgagacaaaggatctaaggaagcatcttgatgaattcaatcgaataatcttggacaaaggatcaaggaatcttactgcttaatacattaccaaagagtggcgcactttgtgaacaccataatttatgggaatgaatcattgaccatgacagaggtgaaatccgcctaactccaaagaaattcagaaaagaagtaaagatagatcaaatggctatggtgatgggttgtttgttagaggcaaacaagaaacaagggaaaatagagggggttttcacaaatcgaatcacaaaagcaaatagtacaaaggctctaatcaatcacacaaagcaaggtccaattccaaggcagggaaattagtgctactattgcaagaaagagggtcatttcaaagatgaatgcaggacattaaagggtaaactacaaagagacaaaaacaaagaaagaggagatgctggtgttgtgatagatggctatgaatcagttgatgttttggttgtgtctagccaagaatcaagtgactcatggatacttgattcagcgtgttcattgcacatgacaccaggaagggaactatttgacagcttcaagaaattaaatggttgatcagttctattgggtgacaacaaagcctgcaaagttgtaggaattggaacagtgaggctcaagctgcatgatgaccaggtcaaaacaattcaagatgttaggtatgtattagatttaaagagacattcactttccaatggtgaattgattgaaaaaaggtcacactataaagatagatagttcttttaaggtcatgagaggatgattatttgtcatgaaggggaacttaagaatggcatctattatctaaaatgaaaaaccatcacttgtgaaaatgacatggttgttagaggtcctgacatggaaagcactaggctctggctgttgggtctttgtgccctaataatcatgattttatgttcaaaagtttaattcccatgatttgttagttcactagatttagactggcatgataatcagcgataaggtatacttaaatcttggataactgagagtgctactcaattccaaatctatagtggcgcaaggcgaaattataagttgagaatttacttggtgaattttagatctacttattgaaagctcggttatataggcccatggtcccctcactagttgagataatactacttgcagact

SEQ ID NO: 220249 - DNA, 4181 bp, Cannabis indica
gtcagttagacgggggagtgtatttgctaacggactagtggtttaggtagttttaccaccaaaattttagatttgagggttagttgcaaaaaccccccttactttaagggatttcgccgcaaataacccaaaaattaattatatggatcaataaaattgtgtcacgtgtaaatttgtatacattgacattccagcacgtcacttaagagataaaaagagatcgaaaaactcaattgttaaccgaataataattttgagaattttaccgcaaaaaactaaatattaaaattaattgcgatgaagataaaagtatggaaggttttgacaaatttaatcttttagttattaaatgttaaaattgagtctattaaaatatgcataataaaggaaaattctataatgcaccccttaaaatagatatattaatgtacctttatctgttttagcatccaaaataatttttagtcaaatttttcttatggtcatgtacgttatagttatttaagacatcctgtaaaattttaagaagttcagaaaagtttaacacgccgaaaactatgttcaaacagtatgttgcacgcgtaactattttattttatacacgtgtaaaatagactgtttgaacattgttttctatattgtaaattatttcgaattttttaaaattttgtaggatatcttaaatagctataacgtatatgaatatgaaaaaaaatgccgaaacaagttaagagtgcatcaatacatcccttttaagagggtgcattgtagaatcaccccataataaatatgcaattattttctttcaaaaaatataaaatatagcgtgtgagtgtaaattttcctaaaatgtggatgaacaggttcagtactaagaatcagtagtacggctcacgtaagcacagacatcagcagcattattaaagcttgaaaagcagccacgacccacgacccacaagatttcatttcatttcattggtcaatgcgttgattcttcttcttccctttcccctttcagtaattgtttattgtaaatttcattcattgttggggagtgggcaaacttattacttatatatatacctggattgggtgtttattcaatcccacaatactcatctgcccaattacaaattaagaaagagctcaaagggtctattattgcatcagtttcctaccgaaggacatacaacccaaacccaaaatgacttctggtccaattcaaacaaatcttcttatgacgccttacaaaatgggaaagttcaatctttctcataggtgattatcttttttcttttgattagtaggaatctcatatgggtcttcttcaatgtttttgttttatgtctcctgattaaaaaaaaatacttaattagtgtaaattgaaataataataaacagttatattacactttagtttctaaagtcagattagatgtcatgatggcatctgatctttgactctggtgttggtacattttgtgctgttgatagtcaatatgatttttctttaattttctttatttgtttctctctattcctttgggcttactgtacataattttaatctgtataacctttgatagagcattggcttctttttctagttgggaatccaaatcttatttgtctagaactaaaaaaattgttagtaaagtcttaattttagctaaatgtgtgtacttgatgttgatttcttccagggttgtcttggcacccttgactcgacaaaggtcatacaacaatgtccctcagccacatgccattttgtactactcccaaagaacctccaatgggggtcttctcatttcagaagcaactggagtttctgatactgctcaagggtaattctactgatctatttattgcaaatacttttattttaaattcatgctttctattcacttgaaagttgtaaaatgtttgtgtgtggtttctattatatttaggtaccctgatacacctggtatatggacaaaagagcatgttgaagcttggaagcctattgttgatgctgttcacgctaaaggtggtgtctttttctgtcagatttggcatgtgggcagagtttcaaatgcaggtgagttttaccatctgctataagatcttaatatacaatatgttggccaaatataagtatgtacgaaaatatgattgtatagacttgtgacactgtatatcaattagctggaatgagaaattaaaatgcagacttgtctggttgaatatacgtgaaatgtgaaggcaaactttattttttcttagtgttgctctagtgcttctagacatatgtattttccttttcggttgaacattattgattgagttgtgtcctaccttattggtatgaacaggtttccaaccaaatggccaagctccaatatcctctactgacaagtcattgaccccccaaactcgatcaaatggcattgatgtcgcagagtttgatcctccaaggcggcttagcacagatgaaattgttcaagtagtgaatgattttagactagctgcaaggaatgccatggaagctggttaattcctttctcttgtcaatcaaatagtcaatgatttcatatgttttttgttgaaaattttgcagctgacataagttgtgtaacgtatttgacaggctttgatggagttgagatccatggagctcatggttacctgattgaccagtttttgaaagatgaagtgaatgaccggacagacaaatatggtggatctttagagaatcgatgtcgttttgctcttgaagtggttgaagctgttgttgatgaggttggtgctgataaagttggaatcagactgtcaccatttgcaaactacatggaatctagtgactccaaccctgaggctttggggcttcacatggtggaatctctaaacaagtatgggattttgtattgccatatggttgaaccaagaatgaaaaaggttggagaaatggatgagacccctcatagtcttgtccccatgagaaaggctttcaatggtactttcattgttgctgggggttataacaaggaagatgggaataaagctttagccgaaaatcgtgcagatcttgttgcttatggtcgtcacttcttggctaatcccgatttgccaaagagatttgagcttaatgcccctctaaataagtatcacagagagacgttctacttgtctgatcctgttaaaggttatactgattatccatttcttgaaaccatttcttaagtactcaattatatccttgtagcatctcatttgttgtctttgaaatgatttgtatggactttgaataatatattttagagtactgtagaagggtaacatttgagaacaagaatgatttacaattgttgctttgatttgaaagaaaattaaatgaaaaagatagtttaccgtcgttgtatgtatatcagcactcgtccattatttctcacgcttaattattattattattattttgataagggagaaatgtctcttgtggagacactattcaatcaaaaaccaaacagaatacaacaaaggtcaaaagttaacaaagaaaggtaaccagcagcagcataaattgggatagaacactaggaagttgtttaagtgtgatttctattttgaaaattgtgtttttaaaggtgagaataagaaattgtattttgtcattttaaaaatttaatggtgttttgactcaagttttttaaaattatttttaaatattttttactaaaaaaaaaaaatacaatattctacaccatgatatgacatgaacccatcttatattggcagacttaaatcttaactcgaacccagatcccgaacttgaacgtgcgggtctgggttcgagttcgggatttggatccaaatttgggattcgggatccgagtctttgtcggggtttggagtaggggtctggttccggggtcgaaatctgactccgggtccaaggtccgggtatgtgagcaaaaatataaaatataatatgttaaaaaaaaatatatttttgaaaatagaaaacaacattttggtgttttctttttctaattttttaaaattcaatttttgaaaaaatatttttaaaaaatttggccaaatgacctctattaatttttaaaaatttaaaataatttttaagatatgaaatcaaacaacccctaaatttcctattagcaaacaaaaaggagaaagcaaag

SEQ ID NO: 220250 - DNA, 2845 bp, Cannabis indica
caaataatttaaaatttctgaaaaagaaaatacaattatgtagtttcaccaaattcattatcaaaacatttggcactctctattaattatataataaactcaaattgagattagattcttataatttgacacactttataaaagggtaacaagaattcattatcttgtaccaaaaagtattcttctaaaattaaaaaaccctaacatgatgatcttcaacaaccctcatcatcactttttccaaaagaccattccattatttgttgtagtcattttcttttctttactatctcacaaatcatcattatgtgagggtgaagaacttaccgtcaagacaactaacggtttagtagacacagacctaactcttcactgcaaatcgaaaaatgatgatatcggagcccaacttcttcactacaatgactcttttcaattctctttcacacccaatgtatggggaactacactcttcttttgtagctttcaatggaaagatgagcttcattggttcgatatcttcaagatgaaaaagagaaaaattctctatcttaatgaatggcttgttcatccaaatggaccatgtcaatttgacccagctacttaccagtatactctttgctatccttggaatcaataaaatatatgcattgatttctatttttcagtgtaaagagagttatatttctctcaagtatctaatattaaataagattgcaataacaattttgtcatgttaattatacaatactttttttttaagaagatacatttgaggccaaacacatttgttaatgattgctatagactatagttgagaggatccttctattctatgatctatcaccaaatatcaaccaaaaaaaaaaaaaagaaaaaaaaaaaagtcaggtttgcaaattatataggccctacgtccagtagtcactactatttttaaagtaattacttatcatcgtattttacttatagttcaaacttgctatcaatagtttgtatcttacttataatctcactacatttaaaatctaatcaccatattgaagattgaccaaatatatattatgaaaattaatagattttttttttttaataaaagccggtttgaatcaatttgttttactatatatataatacaattaaattaaataaaaataatttacaaaataaattataaaagaaataaaaaaaaaacaaattaataacatataggaagaagcacttcacttgtatatattgcatattaattaaatgtataattaatatctccaagagtgttacgattttcttttatttattttttttgtaattgctctgcaaattctatagtccataaaatttgctttgagtgtggtgttcggggttaccggattttgttcgagtttttttgacttttattgactacatgcaagttaatgaaaatttcattcaattcaaataataataataaataataataataaaataatataaataaaatgtcataaaacatattctatatttgtttgtactaccaaatgagaaaaattgaaagttgacatatatgagcaagaaaaccaacaagaatgatggatggagccaatgaaatattatatatattgcttttgatttacaaccctcaattttctatacaaatttccgtaaaataataaatctatattgaacttaagcggtctttcggcaaaggatcaattatagcttgttggtgtcgcttgaggaaggcaggcatcgattttcaacgaagatagctaaagtctggagggttggctgagccgagcttcatgcgtgattactgtatatcaatgcctgccttctctatcttaaatttatttattaataataataaattaggttcatttaaattattttctctgttgatttatttaattttagatatagtatttattgcttttttagacgttttcttgttttgatatttgaagtattttttgtaatgcagtgtaataattagtattttgttcctatcacttttattcaattttattaataccacgattatatatgtattaaatcgtatttctaattcttgtcggtcgaaactagtcttgtctatatcgacatggtttgagttttgtattcgtttgtaagtcgttgtgcctggtgatctgttattcgtttcgttatggcgggaattggagtaggagcagtatgcggatatggaattgggggggagggatgatgaggggtttttgaagtatgaggaaggggcggttgatgtagagaattttgatgataggtggtgtctactgggaaggtgtcttacaggtagatcttttgatttccaagctattcaacataaaatggcatcactgtggagacctgtttgtggtatgtttgttaaagattcggggcaagatagatttttgtttcaattttaccatgagatggatatagaaagggttattgaaggcagcccatggacgttcgatcgggtccctctgatctttgaaaaactgaaaactggagacaatcctagacttatgcctctgaataagttggatttttgggttcaactccatggcatgatatctggattcaaatcggctaacatagtaagggacattggcaagtacataggacagtttgcgaatcggatcctttaaactttcattacaactcatacatgagattagaacaccatccatcgtagcatacttttagttccaaaccaactcctttcgagcctttcataacccccagcacaacataacatcctccccacacttgtccttgctacacccttgcaaaatttgatcaagccagctgcgaaaatcaacaacaacaatcggcctaaccccaaccacaaccaaaagcctctgccagcatt

SEQ ID NO: 220251 - DNA, 5258 bp, Cannabis indica
atcacaagcagctcaattaaactcaaataatcatgcttaaacctctgcaaacaacaacaaaatcacagcaacaacaacaacctaaactaagcatgcaaaccataaaattcttccaaaatttccaagaaacaagaaaagaagctagagcaaggtttacctccactagaattactttgatcttgctgaaaatcacttgaatcaagcaagaaaacccagccctagcagctcccaagcttggccgaaaagagagagagagagagagagagagtttttgaaattctaaattttctaagttttgaactctttgaataaagagagtgaaaatgcaaacataacatttatttcagccaacaattaacctcattaaacacatattttccacttactaagtccactaaaggacaaaataacaatggggcaaaatgaccaatttgcccctccatgctaaaataacataaataacactaaagaggtattttgggaaattctaaattcccgaccaatcccgacattcccaatgtctaaataaccgtcccacaatactaacatactaagttgtgattttactgagccaaacaccgagttccatgttatcaggcaccggaaatgcaaaattatgaaaatcactaaatgatataaaatgcatttcagaattcaacaataactgtataaataattatttaaatagctataaataattttccataattaactgctaatttctaaattaaactaagcggtctttacaccttatataggggaaagggtcggtgcttctcgcttctggagacgcgaccaacgcggagctatctcaaccatctccttaattttcggaggtagttgaagtctaatttttatgataatatcccgctattttcatgggtttataattatctttgagcctttcatggaatttgaacatttgaaatagtcactaacgatgagggtctcctaagggtgtgacacggtcgttgaccaccttcggggatgaagcccatacttaagggcgacactcccgaaacccaactcgaggagggtgacaattgtcatcacgggggggtgaccccccgagacccaacttgaggagggtgacaatcgtcatcccggggtgaccccccgagaccccttgtacgttgtcagtagttataatattatatatgtagatgttctcatctacctttgagagtatcattatatctatggtgggatcagtgtcatctaccccttaaattaacttggcatttggatgtgtggtgattgtttattctgcttacaaaggtgatcgtttttcctttttggagacgcccaccttactcaagctaggggtaaaggtaaccgtctgacttccattctaacattcatgatcacccttcatggttaacggtcatgaccactcttcatggttgacgatcatgaccacccttcatgattaacggtcatcccaatattattacacataattatttagtttttttatttaaatatttaagaaaataattaattataattaattgatttaaaaaagaaagttttacttattggtaacctgctattataggtgaaaaaaatgtaactataatagttataataaaaatgtaaccattgaacaatcactcatatatatgtatttgggaaaaaaatggacataagttgttatatatgtctaaatgaatcgaatttagactttcattaagtgcaaacaactaggtctaagaatataaacatatactagctagttgtgctaattattattcttagataataaggacacttttatacaatttgcaaaatttagaagattattaagaaataaaattgccacattaactaatatatagaatgtgaaaatataaaatataaatgatatatagaaagtgacaataacttttgattctctaataacatcaaaaattactagctggcctaataaattactattcttttataagaaatatttggtacacctgggtttttcttatctgttttcctttttaaaaattaataatttatctacccattaataaataattaattttaatcaaaatttggaaattgtaaaatcctataaataatgtctaaaaagggttttttttttaatttttttcttctcataattaataaatatggaaagtcatatttaaataatttaaaatatttgaaaaagttaaaaataatactatatacaaactcaaattgagatagattccaataatttttaacactataaaagggtaacaagaattcattacatatcattacaatacatatcttcaataaaccctaatcatcatctttgctgaataatgaggagcatttcattatttcttgtagtcattttcttttctttactacttcacaaatcatcattatgcgagggtaaggatcaaattacagtacaaataactaacaatgtagtagacacagacatggttcttcactgcaaatcgaaagacgatgatcttggagcccaacttgttcactacaataacttctttcaattctcgtttgtacctaatatatggggaactacactcttccattgtagctttcaatggaaagacgagatccattcatttgctatttttaagtttgcgagagggagaaaagtcttcaatcttaatcgatggattgttgatcggtatggactatgcctatttgatccagctactggcagttttagtatttgttatccatggagttagaaagaccaacaaaagtagtaaagattttaccaacattatttgtatggtctttttttcagtattataaagagagtttattctctaagtatcttaaaaataaatgaaattgtaataaaagttttgccatgttatacaatacttattttattttatttttgttaagaatataggagtattctttataaatctatccaattctaatctaaagataattaaccgatctaaatacaatagattgccaaacattatatatatatatatctaattatggtcggatcataccaaatgttattagatcggatattgaatgaggtgttcgaaaattcaatacatccaatatctaatcaaactaattaatatttttcatttagtttggattagattttatattgttatacttaaaatatatatgtataaatgaaaacaaagacgattttttttggatggttgtccaatttaatacaataaatactagacttaaaatattggatgatcaaatctgatacaaaagaatatactaaatttaaaatattagataaatttgaaccatttcatgtaaatatagaagaataacattcaattaatagaatgagtggcataaatacttaagttgcaaataaatatctaagtttaatttttggcggtaataatacctaagttataattttagaacctttgtaggtacctgtctgttaagtgtaagtaaattgccatgtggcaattcctaattggtccaagtcattaaattttttatttttttaaaaaaattaatttaaatatgccaatgagaaaatgacacatggataataacaaaatatttaacaattaggtacctacagagttccaaaaatataacttaggtattattaccgccaaaaattaaacttaagtatttatttgcatctgagagttaaatttaagtatttatgctgcaaattactctaatagaattgatacaatccaacatccaatgaatgtggatcggttcagatgcttgaaattaattgggtcagatcaattgataaatctaacatccaatatataattaaatcgaatcttgggtaggcctcaagacattggatgtcgtccaatgaacatccctaattaaaaatatctatacctatatatatgcctatattttggatgtcatccaatgaacgactctttgagtcgagggtgtggagtttattcaggagtccagtgatcacaatggggttcctgatcctcctatcgctagtttaggtaggggtggtggtgataattctcatgatctaaaaaagaaagactccaacatcatctagtggctcgggttagaattagaggtttagagggaactagaattgaagtagtcgtcaggatggtcctgaaggccattacacttatccagagtgttcagtctgtaagaagcaccatctggatgagtgttaaggcaatgcatgttttcagtgcgttgttatgggatatttcaagatagaatatcctcatttaaagaaagaggaatccaagaaagaaacaaaacctgctccagctcaggtttttgtcattactcaagctaatgctgagctagcccatcagtagtgataggtcaactctctatcaacaactcttattactcagttttatttgatccaggagctacaccttcttatgttgatactagattaattgatagttataaattagggtttgaaactctactgctaattaataaagaattagttatctccaaaaggatggacgatagagaattgagcgctgacttagttgagctagccatagaatattttgaaatcatattagaaatagatttcctttctaaagatgcggccactattacttttgagaaaagataatgacctttcagcctgagagtgaggtaccatttatttttataggatcagttcagggttcttgtgttccaattatattaatcttgaagcttgaatacctattgtaaggtggatgcataagattcttaggggtagtgatagatactagcagaccttacacatttgggcctaaagatattcgagtggtgaaagaatattttctgaagaatttcatggtttatcaccataacgaaagatagattttgttattgatttagctccaggagtggaaccagttttcaaagcaccttacagaatggatctgatagaacttaaaaaaattaaaggtacaacttcaggggatgcttgatctaggctttattagacccaacgtatctctctggggtgctccaatgttgtttgtaaagaagaaggatagatcgtgttgactaaggatttagccaaccgatatggagtctgactaggattgaatttttcttatgactgtcacatgagaatgataataaatgtaagaggcacatagatttatagaggttcgacccttttgtttaggtaatgacctactccccttttagttgtattctctctgagataataccaagcagattacatgatgaaaccttgtaatttatggctaggctctctttagtattacaatgatatgtattttgcaggtgagaagcatgagaaaagagagaggacttat

SEQ ID NO: 220252 - DNA, 1784 bp, Cannabis indica
gtgggtgtaagggcccaataaaagtttgaagcggggcgttacattttttatctttcaaaattcaacttcaaaccataacgttataaaatagggacctctcatctctttcatccctaagagcatcttcaattggggttgctcatagagtgtctttgccacatgtacattttagttaatatttcaaattaattttattaatattattgtccaaaatgagtaatggtagtgtggtatcatttattttttttaaaaaaatatattattttattaccaattaagtttttgagagaacatttagaaatataaatttaattaaaaagtagtatgcgaaatcattgtgacaacttttggagttgtctattatcgaaataatttttgtaagaaaatgtgtcaaattttatgtggatgaaagaaaaattacaacaaaaaaaaatagaaagatatgtgtattttggcaactattgagtattgtgccattggagatacactagcagcatcagcttcgcttgaggtgagccaacctcgatggtgtgacgtgtcctctctatgacccaaacccaataacacaaccctgcttttcagcccaaatacagtcattcacatcacaacccccaagtttttaaatatctacgtcttttttttttgttataattttgttcaaaccatattactattctagtattattttttcaattaatttaaatcttttaaaattataaatttatatatagaattattacataaaaaatataaattaacactttatttacaaaaatacctgtataaggtgtggtcaatatttatacattttattttattttaattactaatatatcacttacactatcacttacacaatcagacgatagttgcagggtggatgctgcgtggttgcgcagtaattgcatcagacgaaggtttcagtcagatgatggttgcaggggtagttattgggtggttggtcgaaggttgcattagacgaaggtttcaatcagacgaaagtttgtgggtggttgatgggggttggccaaaggttgcatcagacaaaaatttcaatcagacgaaataattattagcaaaatataatgcaactattgtgaaacattaaaaatcagaatagtatttccacttacgtaactctgtctacatgtctttttataatttaatatgaacaaattcaccattagaaattcggaaaacagcgaaatacaccaggataaacattttacaatagtatcgatgtaattttttttttggattatacttgagttggattgtttgggaactcgagtttaattttttgagatttgcctttcatgaatctgaaaatttaagtcgggacattagttttatacaattaaactggatttccggttgaatattagttttgtagtagttttttttacattttttttatgaattcgaaacaacccctgttttgattgattctagttatcttctcaggtgaagtcaccggaattaatggtagttctctttctggttgagttttcgtttcggttgcgttgggttgctgcgtgattgcgcgatagttgtacgatagttgcccaaaaagcatggatcttgggttgtaggtgtgtgtaagtggtatttgtgtaattttttttcatttgggttgtatatttgtttatttggtcaggtgaaagtatttttataatattattatttttttagttaaactgaaaaaaaaaacccaaaataagattttacaaaaaaatatttatctttcttttatatttttatacttttactggtcatactttttt

SEQ ID NO: 220253 - DNA, 2070 bp, Cannabis indica
gggtctgggtctaggtcttagtcagatttaagttcccaaactcaaacccaaactcgaactcagacccaagtttggggtacgggtctgggtctaggtcagggtctaggtctaagttcgggtctgggtcccagtccatgttcggttccacgtctagatcgtgttttgggtcctggtctaattcctgttctagggtcctaattccggttcttgttctgatttcaagtctcgggttcgagtttgggtttttatcctagtcttgaaatggttccaggtttgggtcttgatacgattccgagatctagacatcgactacgggttgggtccaatcctcgagtcgtgggtcaagatccaaatcccaatctttggtcctggtcttgttttgattcggatactgggtcttagtctgtgtccgtgtctgggtgcgggtctaggacctagaccggggacgggtctggggtccttatccaagtcctacgtcccgattctgttcctaattttgtgtttaggtccccaatctaggtttgggtcctgggtccaggtctgagtccccaatccctgtccgggtcctaggtctcggcctggatccaagtccgtgtctgggttcgagttctgtccctagtctcgatctgagttttgattcgagtctgtgtttaggtttgggtcctagtcagattctagttcccagactcaaacccagacttgcactcaaacccaggtctcaggtacaggtttgggtctaggactgggtctgggtttgagtctgggtctagatttgagtctaggtatgggtcccaggtcgaaacactgactacggatcaggtctaagccccgggtcgaaacactgactacggtctcgggtcccagtctagttccactttgggtccaaagtctcagtccgggtcctaggtcaaggtccgggtctggggtaaggtcttgggtctcagtcccagttctgatgccagtgtcccgggtgtaggtccccattccaggtataagtctaggaccgggtcggggttcaagtcctggtccaagtctaggttcgggttttgatctcggtctgggtctagatctgggttctagtcttggtcctggttcgggtccatgtcccgagttttgatctgggtctaggtttcgaggcctaggtctaggtctgggtttgggtcctagtcccagttttaatttcgatttagtgtttgggttccggtatgggtctgggtctgggtcaaggtcttagtccaggtccgagtttgggtctgggtcagggtcatggtctcgatcccggtctgggtctgggtttgggtccaagtctatgtacaggtttctggtacgagtccaggtttgggtcttggtcagggtctcggtctagatctagggcccgacttttgatcctagtctgggtcttgctctaggttcgagcccaggttcatatctggatccctatctaagtctgagtctatgtcagggatcaagtcccaagtctaggtccggtctgggttcgggtccgggtctagatcccagtctgggtacacgaccatgtttgggccctagttccggtcttgctttgggtttggatctaggtttgagttttgttctaggtctgcgtccgggtcctggtcacgatcgtactcttgtttaagggtcctattctcgcggtcctgttcgggccctggtttaagtcctagatctggatccctatcacgtgtctcggtctggttctggttcaggtctttggtccaaggtccgagttttggttcgggatcgagactagggtgcggttctaagtcctggccccaattttctgtcccaagtctggttccatgttttggtttgagttgggctccaggttcagcaccgagtcctggtttgggttgggattcgggtccaggtcccagttcaggtctatgtctaggtgggagtccaggtcctggtctggttatgtttttgggtataggtcaaagtccggttacggttctaggtccaggtccaagtcctggttccggtccagttcccgcttcccggtctacttccagttcgtttccaatttcgggtcacagggtacgggttcgggtc

SEQ ID NO: 220254 - DNA, 3389 bp, Cannabis indica
gaggcatatgactcgttcaaaccagtgaggaattgcaaaacttgattctgattgtagtaatcaagaaagatcttcattgcaccacaagaacatgtggtgttaggttgaaattctttcaactcatcccaaagggatttgagttttgtgaaataagaggtgacggaattgtcaccttgttggaggcgatttaactgattttgaagctggaaaatacgagttccattaccttcattaaacctttcagccaaatcttgccacatatcagtggcttgatcaaagtacatgatactatgagctatgtcgggggaaaccgaattgaccaaccaggacatcaccatactattgcaacgtaaccaagatgggagaagagaattaccagaaacgggccgtggaattgaaccatcaatgaaggagactttgttcttcgcagcaagagccatagtaatcccacgcttccaagattgatagttaggtccggtgagaacggtggacacaagaactaatccagggtgatcaccggagctgaggtagaatgggcttgaaacatcatcgttgatggtgcgatcatgaggcctgcgattgaagactggtatcgactcgtttctgggagattgatcttcaagattgttgtcggtggtgtggtgagatctggatctaggattggtccttcgagtatctgcaacaggatcaggtgcaggtgcggaagtaatatcaggattttctgatatcggagggtctgttgtgggtggtggaacaccattctgtgatcttgttgaaggtctggccatggagagaggcagattcacgtctgataccatatgagaaaaacaagaccagatacagagtaatttgctctgttttagagaggaaaaatgtatatattgaactgaataaattgtttattacatttgaggccttatataggcaatctattacagtagtctcagctcaagagagcaaccaatacaacagtcttataacagaattcctaacagactaaccgactaaacaactaactctctaaggtctaatactctataagtacaaaataatacgtactatattgaattttgtagaaaatattagcaagacaaagataaacttttacatttattatatatgttattataattttgtagttgttgtgatgctgttttaaaattttttgttcatttgtttttgttcaccatatgaatataggatgaaagttggaagaccaagtaaaagaaaaatttgagttgaaaggtaggagaaaaataagtgtaacatgtggaaaaatgatataataatacgagtacttgccaaaactgacatccaaggcattgatgaaaagagtattttttaggtggtttggaaattaattcttataattcacaagtccatcttattctaggttgataaattgtagtagaaattatatgaaatatgagaataatttaaagatttactttttgatggcacaattaaataatattaatggggtatggattttttgttttgtttacatttttataggtcttttttatgccataattttgtaaataacttattaaatcccatattttatctttttttatcacaaatgaatgttggaggaactctgccgtttagagattttagttctataattttcaagactcgacagtacaacctcctaaagccacagcctttgcctttcgatttagcccaaacaacaactagaagccttgaagatccgactcagcccccatcaaatttggaagcctctctttagattcgttgatcgtcgtgaaggttccaggatatagattctaaccaagtgcaagttagtcgcatctcagttcagaattctttttcaggttgtagcgacgactctagacattcttcctctagattcgatcgacgttaggggtgaagtgaaagagttagtggatttggtggctaagcaagcgaggagagcaaggtttcagctagccaatgatgacgaacgagtagcggacgaagtgtttgggataatgtcttagttcgaaaaaggaattgaacctgaattgagattgattaagcttgtattggactattttgaaatcagaaactagtttgattataacaaggagatttgattcttagaagaagaaattagatacgagtttcctgattgcaaagagagaaagagagagagagacgttacgtacttgagcggtttggttggattgatgagttacagcagaggagtaatttttgaagaattcaatcatcatcgtcatcatcgaaactccaacgccgaagaggatcaattagatacaacaatgaatttagaggggtcaagtttcttttgaatccagatgactttctcgatgtccgatttcactagacctaatgtcagacttaatttggaaacaagcataattgtcataactaaatctctatgtttaaaattaaagtttttcatagtgcatttgagtgtcacaaataatgtgtttagggtcacacatgtcacataccgagtcaaacacgtaagaagttggatattgcttgtttggttcctatcacatacataacgtgattttagtcataaaagttgcagcagaaacctaagtgttttatttatttttaaattattgttatgttttattgatagtttagaattgcttgccattgtccgaaactatcttgtatggtaatctgaactggcaaattatattttcacaatgaagtcttgcacttttttggacgtgatggttgccactggctcgacctccatccacttggtaaagtaatcaaatgcaaccactacgtactgcactcggcctttgcctttgcgcaactatccgatcaggccgattccccaaatagggaaaggccagggactttgcatttgagtcagttcgttgggtggtgccagaggtatctttgaaaatctctggcatttatcacatttcttaacgtaggccttggaatcttcaatcattgtcggctagaaataaccttgccttaaaattttcttggataaactctgtccgactgcatggttgccacaaaaattgtcatgtacttctgataaaagtcgtggagcttcttcttgtgttacacacctaagtaatggcatggagaggcctcttctatacataactccctctaccatgatgtaccacgcaccctttctcctcatttttgagcttcgtttttattgtctgggaattctctagtgttgaggtaggccgctaataatgacttgtaaatgctcgtccatcagtggtggcagtaaatcttgattaatatctgtctaggtggccctttgattttgattggtcttaacatatttttgaacatgcgggttattttttttatcaaaaatttaatttcccggttcggattgttgcattcgttggtgtcatggccataatctccat

SEQ ID NO: 220255 - DNA, 5228 bp, Cannabis indica
cctatattataaggaataaaaaaatatttttttaaagaaaaagatatttaatataaataatatttaaatttcttaattttattttgttttaaaataatattttatatttatatttatattattaacaaacaacactaacctaaattttttattattggcacgattatttgttaacttaatctaagaaaattattaattcaagaaaagaagagacgaaaataataaatgaatagcaaatttttttacatagttttatagttaaatctacatactctacaaattacctcagaggttgaatcctgaatcttttcaacctatcccacaatgtatttgttacgagaatttattatttaggccatgtggtatacgattcgactttttcattaaatagttcaaaaaattagtataacacttataaactatttttttacaagtgataaaatataatttcaaatattatactccctagtccatgagtcagttgtattggccatttaggcaagtatttggataatacaagtgtttacagtataaaccctaactttgcactcctcttgtttctcttgatgaagaagaaagcttgtaggaatttttgcagaggttcggctagtttaaaattattcaccctttatacataaaaaaatgagggtattataggcttacatgtgggtaagggcattccctttacccacctaggctttcgtactaagcatgctgcaagagcaggcactacaacatgacgatctgacagctgggtagtaggaaactttctcatcgtgtggtgtacggctgtagtgaaggatctcatatggacaagggcacgtgtcactcaaagattttaccttgaaaaattgtttcctagacaagctgttggataaaaagggggcttcagaggcacgtacgcacactaccatggtctgacgcaggggacaagatctgattcagtgtcagaggatgggtaaccatcgtttcgggttctggatagaatattgtcgaatgggcttcgagatcaacgagccaaagcctttttggatcacgctgacctacaatcttcctggaatacttgaagctccgggtaactctgatcctcctcaattacagatggatagtaagattcctggagcccaatccttacttgctaacattgaggacctttgattggcttccgaaatataatagtctcctaagtgttgtttagtggaaattatatactgatcacggatggtctagagtggcactcttccatgactgccacgtatcaagcatctaggaatacgaataatatttacctcccaagctctcgggactcttgagtggtgggagcttccagcttccttctggatgcttgatttattattatgatatgccagacatatcttgaaatgtggaagcaatctttcgtgttactttggacaactgaagagttgatatatcctgtggtacaactgtcattttattgaaacgtggtgtcattttgtgaagccgtgggacttatgcgccaggctcagacgtgttccttgtgggaagtgaatggctacaggacttgaatagatagtaggtttgtgatgcattggtcttgctgtcgtgaaatgataagtaatgaatgccccattctctctcccaaggtgcattaaatataaactcttgaagtctcagccattggatggagcagcttttaatcggtacaatctggactgtccatttcaaaatgcactaagtcgttgccacccatataaatgaaaaacttggcgaaaaagtccatttttcccttctcactttaatatgcaagttttaacccacaacattttcccagaaaactctcgacccaaaagttcacttgcccttaaatacttctctaaaccaaagacctcatctcctttcccagccttgtcgctagatttttccaatgatcgaagctcatacaagcgacgagttcttcgtagagacgagtcacaaccagaccctcgagcggctcatagactttggacagccacacgccagcagcgattcttcctcgacccttctacaagtaagtatttcctccttttagattgttatttcttgctttgattctaaaatacggtcttaagtttgtagaaatacactttttttcatgcgtagggtttaggtctgaatattagggttgctgtgtgtaaaataggtccgcatgaatcttgggagaatacctttggaactagagttctgtatgaacaaagttttctgtttctgacatttaggttaagcgtttctaggtttaggcaagtttccaagacaatcctcttttctctcgttatttttgaaagaaaaacctagactttttatttttgttgtattcttggattcctaattcgtcactataacagatcgctctgtgagggtggccttttatgtgacgagtccggtggggagatctccaagtagtttgggggaggccttcgtaccctatttgtcatttggatatggggtattaattgcttaggttttctttttcttcccatttttcagtgtctggtgaaaatgattccatttggaaacgtgggccttgaagaggtccttggaatgtctttagcgaacgcatcccctgcatgtttgtgccctaaagacccagctctgggagaggggccttctgaagacatctaggttgaaaggaaagtaaaggacaagggcaaaggcaaaggcgaagctacctctctatcccctttgacacttaacaactctattttggagatgaatcaacgacccaagttgaggaattacgggttactggaggtgtattccaatgatggtggcgtacgaaacattctcgaacttatgtggcttaggatgttcgtcgttggggaatctctatcccagagtgtgaaaggttttggggcatggagttggtcgcatatttcatgcgaagcccaccttccacttagaacatattttgctcagttttgcgttaaggcgagaattgcatctttccagcttcttccagtttcatacaaactactatctggatggtttgtattctgtaaatctaggggaaaagttgctccaaccccgaaggagatactacaatatcctagaatttttattaaaacatcgaattcattccaaccgggcctgaagatttatccagatgtatttggaaactgcattcctaatttcttgttttgatatagacttcagtaattttgtattttgaaaatcagaaatagttttaggcacacaagaaagaacctccttccaatcaactagttaagctttaaaaagttcttcaaaatagccaaaaattacattgataattcatgctcccagtccacagaagcaccatcgtccctcctatagaactagctcaagcgtgaaagaatttaatattttgatccctaacttggagccatagtttctttggcctttgtttctaatacacatccttttaattcaacacctcagataacctcttcttatcttttccataaagtctcatgccttcctcatctctcctaccctttaatctcttatgagctaagttgtagctcttaattttttcagaaaaattccctgcaactccctttccccaatcagcaagaacctcgccacacatacaaattttaaactggagtgtgaagccttcacattttgaccaacacacctgaatgatgttctcacaacttggttctcctatccaacaattatctaatttgaatttctgcataccaattgaagaattacgatcttgagtttctaataacataggggtgtgctcagatggagaaacatcaagattaatcagcctagcaaacttgaaaaccattaaccattcgtcaatcaccatagccctatcgagtttggcctcaatctagctaggtgaatatccacccccctttttccatgtgaaaggatggccacacaactttaaatcttgaagaccacacttagaaacagcttcttgaaatccttgaatgagctaattcggataacaattgccccattttttcttagcttgggataatacattgttaaaatcaccattcaagcaacaaggttgaattaattcttcctttaaagtgtgtaaatggttccaagtattctccctgaagcttctattaggttttttatacatgcatgtcagtcgaaactcactcttacttggccacaaaaccatgcaatcaatatggttcttggaaaagttgttgatttgaacctcatccatattttgcctagtaacgtaagatctccactcctcccttgggccttaaccacaaaataaccctcaaaacccatggaccttgccaaccaattttccttagttgtgtcgcataaagtctcacaaagaaaaataatatctggcctctttagaacagcaagttctttaatgaactcagtagcccgtgggttcccaagtccatgacagttccaaccaataatactcaataattttggggtgatcagccccatcaccaaggtttgctgaattcatgtttttttgatggccattaattccctggcccaaacctaactccttttattcaagatcctctgttgctttccttcttttattattaataaccatcagaccacctttttgatttttgattaaattctccacaattccatggtcaaggacaccctcaatattagctagcttacatattttagagatcaaagaattatttggagccctaactctgaagttactactcgacacatgtcctacaatctctcctgaatcactatttaatttccccatattctcatcatcatcattgtcactttccatattcatcttctagttttgagaatccactactactattattagccatcaccccaagaactaagcctttcatacgcaaccatcgagctccaatattctgctttctttttcaaaattgagctcttgtgaaacttccataagacttgaaaattttctccaaaggcttgtcaaatagcttcgcatagtacctctcagagtgccctacaattctagatgaaataaaaagtgagagcacgctcaaaattaactcaaaaataagatctacctgtctttgttaacttcatctttcaatataagggtttattaatatcaatagtgactcttacacgaaggtaatcttgccaaactctaagggtgtgtttgaaaacaactgtgtaattactaccctagtaattacactgtatagtaattacattgtattttaaaatacaaggtgtgtttggatgtcaagtggtaattacatgtgaat

SEQ ID NO: 220256 - DNA, 3202 bp, Cannabis indica
ttttttattagtatatttaaattgaatgttaaataaaaaataaaaaaattaatgacgtggactaaccaaaaactgctacacaatttatggtcaagtacatatgtaagttccagaaatataactaatgtattattgtcgtcagaacttaaacttagatattaatctgcaactaggaattaaacttaaatttttacactgcaaattactcaattttttattttaggtttttacagaaacatataagttatttctaaattttctttcaataaatttcaaaaatcaacttcacaccggttacaaatttaataccaaaattagataaaaataacagttttacaaacattaaatacttacgccgacataatttttttaaaaaatacttatactgataaaaagaattagtaccattttaaatccttatatgttttattaaataataaaattgatcatgtatttttttaaaaaagtaacttaaatttaatttttgacaatttttttaatataatcaatatgatggtaattcttaacacacagatatagaaaatataattagtcttatcataatacttttaaactcaattattattaaattttattttaacaaatattagttcaaagtactattttactattttaaaaaatataaaatctaatttataatttatcaaaaaaaaattaattaacaatttttacaaaatacaaatctaaaataatatttataatgtctcctataaacaaaactttaaatacttttaatattgagcaatttgtgtcgaaatccttttatgttttaatttttatacacttaaccccttatttatttttttatagcaacatctctttaagtttatttttctttgtaaatttgacatgccagttaaatattaccgttaaatatcaactggataactactgtatacacctgtataacctcgaagtcaatacagtaataatctagttggtatttaaatgtataaaaattaaaaaataaaagagtttaaattcctcattaatatttgtttatgttttcatttatttttttagtgcgtacaaagtctctcaacaaagaaagaaacatcatccaattacaaacttgttgttttttcctaagaaaaagaaaaagcatattttttgctgaattcccagaatctactctttctctctctaacacaacaaaacaagtctctctctctcctcactcatatatacagacccaaaaaaatcctttctttgtggctacaaacacttcttgaggatttcctctctttcaaaaaaccctcttcttctatctacccttttccctatctgggctttcttctttctgtcagcatgcgttaacccatttgttccaataccacaaagatcgccatggaactgtaaattaacaatttttttgctattactgtatacccttttgtgtacattcaattatgaataactcttcgactgtagttcaagagtccagtcaagtttatgacttggtatctcatttgggtcgattttcctttggttctgatgggcactcttcatttttatctaatttcatgtattttgatgtgtttggggattcttcttctgtaaatgggaaaagacctaaatttggtgcttcattgggtttgagtagtagaagtagttatagtattaggaaagctattattcagtttaacagagctattaggtttcattgtgagagaattccaattgggtttgcttctgttaggattaatcctggggttggaaatgttggtggcaataataataataatgggatgattgaagagggttgtagtgttttggaagatgatggtttgggtttgaatagtgttgagcctttaaaaccaagaaagttcttattttgatgagtgatactggtggtggtcatagagcttcagcagaagctataaaggcagctttttatgaagaatatggtgatgaatatcaggttagactcatataacaaattcttacttaagttgggaaatttgtaatttgttctttgtgttgagactaaatagtatatgtatgtgtgtgtgtggaacaggtgtttgttactgatttgtggtctgatcatactccttggccgtttaatcaacttccaaggagctataatttcttggtgaaacatggttcattatggaagatgacatattatgcttctgctcctagacttattcatcagtctaattttgctgcaacttcaacatttatagctcggtaatgattggttctgtttgttcttattaggattggaatcatttgtttattgatctaatccaatacttgaatataggaatcttattgatattaaagaaagaattacaaatttcgaaacttttcgagacagtttggtatctccctagagcaatcttttactctaaatagttcacacaaaattccatattcttcataaaactcctaaccaatagcaatctagtattactttcttatgattacatgctttatcatattgctgaatttatatcatatatgagtagaagagaaccactatgtatgtacatttttttttagagctgagcaataatgggattaggaaatagacttgagtggcttcttttttgtatctaagacccgaaatgtacctacccttttgaatatgttcgattctaatcggacaatgttatggtttttttatgtttttagggaagttgctaaaggattgatgaagtaccaaccagatattattatcagtgtacatcctctaatgcagcatgtaccacttcgtattttgaggtcaaagggtttactcgataagatcgtttttactacagtaatcacggatcttagcacttgccatcctacatggtatggtttgttatgcttgctcgctgtgtattcaaataattgtccgacatcagaattgtttttaatgttgtatgttttgttttcaggtttcataagcttgttacgagatgttattgcccaacgaatgaggtagcgaagagggcactgaaagctggactcaagaatacccaaatcaagatttatggccttcctgtacgaccttcgtttgtcaagcctgttcggccaaaggttggttgctactcaaattgattcactatatgatttttgttttcgtgttgaatttaaacattttcctctctatttgaccactccactttgtttagattagtgcaatttaaagtaatgagatgagattgcccgattagtccaattgcttaga

SEQ ID NO: 220257 - DNA, 3878 bp, Cannabis indica
ctactcatattgtggacattgtctactcatatgaaaacatggactactccagtcatttgtcaattggttttgagatggaaccccataattctcaacaactcaagtggttgtagctcattaactccaaattgaatacaataattatgggagctccattctttacactacacacaagactggtagttgtggagtctctattctctacactataacaataattagactggtagttgtctattctctaaaataatattcaatattagaactaattaaagatttccacaaccacatcactccatccccactgtttaacaatattgtttaagaaaactgcctataattcaaaaaatagaataaattaataattaaaaataaaaaaattcaccaaccaataggcggtgaggaatagaaaaaaaataatttaaataatattattattgaaaaaatataataattctttgttaagaaaagaactgccagcaatattggatcttttgatttaaaaattgataaaaaaaaactctaataatgataaaaaaaaatagtcccctaacatattttgttgtcattctttttatagaaaagactaatataatattgtctatttttaacaataaatttttcaaattacctacaatttaaattaagctcaattaaaaaaaatagacaaattttgataaaattttatcgggaactattttttataattttaaaaaacaaatggtctttttatattttcttaaatcagagaatccaacactgataacaacttctacaacatttttacccagatgatgagaataataagcacataagagaatgaaagagaaaaaaaaaatgcacttcttggacagaggattataatttttaaaatatacagacatgagaaagaattaaacagcatctgaaaattttaacaaaggtttagaagaactggccgaagttgtcgaagcagaggagctccctgtaacaacagtacttaatgaataagattcaagagaagctatattgaatgtaggcacagcatacattggcacaggcaattttggcggcagattaggcaaagcagcttcaaaattaagaacactcatcacttgctttatagatggccgacatgttggatcaggatggcagcaccacagcccaacaaccatcacgcactccatcgccttttcatcgtattccttactaacaattcccttatcaatggcctcgacaagttggtttctcccataaagctcccacacccactccaccagcattactttgccttctcctgcatttagtacaattggctttcttccacagcagatttcaagtgccaccaccccaaagctatagacatcagactctttgctagccttgctggtagtaaaacactcaggagctaggtaacctcttgttccagcaactattgttgtgtctaagcccatttcatggtcaactagccttgctagcccaaagtctcctaatttagcattgaagtttgaatccaacatgatgttgctagatttgatatctctatgcaccacacactgttcccattcttcatgaagatacaagagagatgaggccaaaccaagagctattttatgccttgttgcccacggtagcatgggtttttccccgaataggtgtgtatcaaggcttccattaggtaaatattcataaacaacaaggagctcgtctcgtttgtggcaccaaccaataagttgaaccaaattcctatgtcttaaacgacttataatttttacctcagaaatatactctttcttcccctgccttgaacccttagaaaccttcttaactgcgacttcagtgttggattcgcttaacatgcctttgtagacacctccaaagcctccctctccaagtttcccatcttccgaaaagttgtttgttgcttggcttagctctcgataggtgaaccttttggggccagactctctttctaattctccatcaatggaaacgtcataatcttcctcctctgcttcttcgtcaactgatctatttctcctaaacatgaaccacaccaaacctactccacaacatagaatactcaaacccacacccaaaccaatccttaatgctttttggccttttccacccctcttggtggatcccaaggttggatttggagagctcgggcgaggagagttggtattattattggcaataacgaggtccaaggttgagttaaatgaccaagagaaaacttgatgtaattgaaatcgaaaacctgtagctgctgagaaacccactcttacatgttcccctaagaacctcaaatctactacatatgaaaggctagtgttttcaccacttactgtagcattacccgcatagctgagaaacacagtaagattttgagaagtagagttataacttaccctagcatttgcctttctgcttccatctttcatatcagtttccacagaggcatatgtttttgagatcagtgaattgacatttatgccaacatgattaataggactgggatcccattcatttttgtaagtatcaaattctacggccacaaaagggctagcaatactagaatcgttccaaaattcttggcttgtcaatccgaggcatccgccttgtgatcggtctgggattttagattcaaaaggggcaatgaagaacgccaagccatctccggtctccctttcgccgagtccattaatggaaaatgtgaaattagtagtgaaatctgtaacaagttttgttttgggatcccaaagctgaaccggcttgttgtacgatcctcgaccatagctgtcgataagagtagcatcaactctattcgttgtgagttctagagtctcgtagtttgaaatgcttgcgttcttctccacttcaatttcacttttgttttgagggaagctgaaggaaactgaagagcttttctcgagtaggaataagaagaagataacaatggttaacttgagaagaccagtaaaattatatgaccttataatgtactccattgttactaattcctgttgatgatcaatacagtttatagagctggaagagtatagtaatttaattaatgaagaaggtagatgtacatcaagggatctctttgtcttagtcttactttttttgtttaataaattcttcgtcaacggctgaattggtctgtttcaaactttaattggattatatatgaatagacgaagaagtcgagtactatatgatcatttgagaaaaaaatagtggtataataaagagactgctattatatgtgtttgaaaaattctcctaattttatatgcaggatttgatacgaggattttttcagcagaactttgacgtgtactaaatcatgacttatgaatttttttcactgttaaaaattttccctgaactaaattgagtattgttagatttaagaacttttgtactaatttcattcaattttattattttagtgattatgtatgtactaaaccatgctccccagagtttgatatttaccaaatcatgtctctcgaactttgatatgtactaaatcatgttccttgaacttttattcatgttagaatttttttactaaaattagacaaaagtccttaaattcaacaatatcaatagttcaggagtatttttaacgaccttaaaagttccagagacataatttagtacatgtcaaagttcaaggaaaaaaatcataattagccttaaattattacaccaataattatatactatctatctctgtagtgtctgggtatatggtgcccctttgattaattaatttctcatatttctataatgtcatactacagaaagttggattgagaccacttataatatctacatgtaattaggacgatattatagataatagatccagctttgatgttaac

SEQ ID NO: 220258 - DNA, 4287 bp, Cannabis indica
tattgaagcatgatttaatttcgaaagatgatgataattttgttgatgatggtgctactatggtttgtggtgttcaagctgttgagaaaatgacaattaattgtcagctgttgttttatagttatttttgttttgttttatgatttttgtcttttgttgttttgttatgtttgacattagttattttattttagatgaagtgttcttctattgttactgttgttggtcagtctaccatgtcttctggttttcaaggtgtggaagagaaggtatgttttttgatataatgttttttttgttgttttggttttattttcttttaatattttttcattcatgttttttatttccttttacgtgtatattgatttttcttattttattataggctcaattttctggtgaagttgtctgtgattcttgccacattgatttggttcaaaatgatattcgtgacattattgtttttgaagagtctctaatcttagttcttggaaagagggatagaaagaaagagggatagaaagaatgggattgttttaaagtctccctttatgaaattaagatatgttgatactaatttagattcaatatctaattctgttgatggttctgattttaaaattgtgaaatattttgatatataatcagaattagctatgagccttcctcattatgtaagtattgctttctccaaagtctaattaattaatggtattgcaggtatggaaattatggaaagaaaacaatgcacttgatatgctatacccaacattaagggagagttgcaacgaaaatgaattcttgagatagcattaatttatgtacaagatgacctagctgatcgtcccaagtcaaatgcagtctccacacttgaaaatgatcaagctggcagtatttcaagtccccaacaaccaacttttgtgttggaaagttctgttacttatgacggttgtactgaacaatatttctgttgacaaataccataaatggaggccattgatcatgtagaccttcctacattgcatacatttcttgctccgatggatatgttaaattggtatctgcacttctatttcatagcaaaatcatgtataggtaactttgtgatagaaattaattttcttaagtacatactgttaacactagttaactatacctagttaattttctgttagcttaggttagttaacctgtgtaattagttaaggtagttagtttttctgttattagttttctttctttgttttctgcttgtatataaacaatggttccttatcaataaagattgagcttttcattttttttccctgctctgttcttcatgctctgtaattctacatggtatcagtagtcttgacccaagaccatgtcattgtcaacctacgatcctcaggctcctgccattaatccttcaaatgaagctcctcaggctcctgccactactcccgctgcttctggatcttggaatccattctcaaactctctttcttcctcgctcacagtgaagcttgatcgattaaactttctttcgtggaaatcacaagttcttcccactgtaattgggcacgatcttgatgaggttcttctgtctggtgttcctcctccaaaaactctcgttgatggtactacaaactctgcatatcttcaacggcgtcgcaaagatcagctgctcctttcatggttgcgatcctccatgtctgaaagcatactcgcatctgtggcgaactacactacatctgcatctgtatggcgtgctctcgaacagaagtttgcctctcaaaccaaagcacgaagacttcaactcaaaggccaattctcacatgttcataaaggcggattatccatctctgaatttcttgataaagttcaaaacatagctgactctctcgccattgcaggatctccagttgatgatcaagatttggttctacagatcctcaatggtcttggccctgaattcgattctgttgtctcaggaatcacttcaagaagcgatgtgttgtctgttgaagaagttcaggcacttcttctctcccatgaaagtcgcctcgaacaccatcatgccatgaatgaccttactgtcaaaatgcaagctaacatggctcttggacacaacagacctccaggtgctcgacctttttccaacaacaactccagcaacatgaacactgcctcccagggccgtaacagagttttttccagatcatctactcaaaaagtgatctgtcaagtttgcatgaggagtggacatactgcatctgtctgccattatcgttttgataaaacttggatcactcctaaaccaggtaatcccatgaatcgtgcctatcttactgaattggactgtgattgtgatccacagcatacaatacaactatggtgcaagattttggtgctgatgactcttggtatgtggattttggtaccactcatgttaccaacagcctcaaaaatcttcatgagtccaaacctttctctggagttgaatctcttgccattggtgatggtaagaaattgttaatttcacatactggatctgtctctattccttcctactataattcttgtcccttacatatgcaatctgtcataaatgttccatctatgactaagaatttggttagtgtctctaaactaactcaagataataacgtttttgttgaatttcataaaaattgttgctttgtcaaggacaagacaaccgggtctgtgctgcttaaaactagagatggtctttatcttcttggtgactcttccaatcgttcaagtcctactctgcaatgtcatcttgctacatcagaaaatttttcttctgatttcaattgttctactcaatgtacttgtaatacagattgtactcaagagtgtgattacacacaacacctctgtaatacttcttcaataaataaaaatgccatttcttatccctctgagcattctgtgtttaatgtttatcagcattcgaatattgatctatggcattgtaaattaggacaccctgatgtgtccacattacaaaagatcttaccctctgttccccatactgctaacattaaacaactcacattttgcaatgcctgtcaacttgggaaaagtcatagactgccctttgtcgcctcatctaatcgtgcttctcaacctcttgaacttgttcatacggatctttggggtccctctcatgaaccttcaaaagatgggtttcgatactacatccatttcttggatgattatagtagattcacttggatctaccctctcacattgaaatcccaagcttttgacaggttcattcaattcaagagtatggtagaaaagcaatttcaattgcctataaaaagtgtcaaagcagatggtggtggtgagtacaaaccatttgctcgatttcttgctgaccagggcatctccttctctcatccatgtcctcacactcatccccaaaatggtagagcagaacgaaaacatagacacatcacagagacaggtcttactttgcttgcacaggcaaatctatctctcaaatattggtggcatgccttccaatgtgccacttttacaatcaatcggttgcctactcctgttattggaaatcttagtccctatgaatgcctattcaaaaccaagcccgattacactatcttgaaatcttttggttgtgcctgctttccccacttaagaccatacaattctcacaagttagatttcaggtctgagcaatgtttgtttcttggttactctcctgctcataagggctacttctgtgaaaacaagaatggcagaatgttcattgcaagaaatgtcatcttcaatgaacttcactatcctggggacacatttcacagtcatacagatcaggtacatacttcccctcatactagttcttttccatctgcaagtttttctactatacctgtcactactgatctttctttttctggtatgacaactgctgttgcaacaacaatacaacatcaccacaatcctgagactcactcaactacaccctccccaacacccttacctgaacctgaccaacaaacatcacccttacctgagactacaccagaaactgtgcctgaatcccacaccatacccttaccagagactcaacaaagattaagtgttgctacttcttctgttcatccaactcatcctatgatcactcgatcaaaaaatggcagtgtcaaatcgaaagcatacttggccactaaacacccattaccagaatccatcttaccctctgaacaaaagtcccttcaagctcctctgaaagatccaaaatggctc

SEQ ID NO: 220259 - DNA, 1496 bp, Cannabis indica
tatatatatagattatgaatttgctttaatcgtttttccttatgattttttcattttaaatggtactttgatatgataaaagccttatcaattttcatattatacgagtgatggtttgattcggcaaaacgattttcatattatactataatggttattggcaaatttcttttttctttcaaaaatggttaacaccaaacgttaacattcctttagtttttattaaaacaaaagaaaacactaaaaagaaatcatgttacatatccaaattttatatgtaaaagatatttcattactttttcagtcttatctagtgatatgagcaatgaaagaatcccattccatacgagtgacacctccttcttcagtagactttctaacttcaccacccaattcctcagccctttttctcacctcaccaccttcatttgaagccattaatgtcctaacagctctgctaatcatggatgaactcacaacctcatctctctgctcccattccaaaacagccacacccactttgagcacttgtgtgataaacagagcattcaaaggctgatctgaatgcaatggccatgttgctaaaggcactcccatacttatactctccatacaagaattccatccacaatgactcataaacccacctattgatttatgcctcaaaatctccacttgggacacccattccctcaccacaattcccattcccttcattctttcctcaaacccatttggaagttggggtccttgaccttctccattagtacttgaaacatcaaatttatctgcttctctcaatgcccatataaacttaaccccacttagctctaacccaattgcaatctccttaatctcttcatctgaaaatatagttgtggttccaaaagaaatatacatgacactatttgactcttgcttatccaaccactccaataaccacttgtccttattattagttattgtcgtttggtgtaaaggcccaacagcccaaacctttttcttctcccaaccaaagtcgtttacaagactttgtagaaaacttccttcaatagctctacaactattgaaaatctctccagcttgaaatttcaccacctcaatctctctatccacaaaaccttttatcacagcagggaaacatgattcccaagacggcatattctttatcgaaacgatgtcgtttcgtcccaaggcattacaaatacttgcgaagaaaataaaagcagagccgcaactaaatgagtaggcttctccgtttgagatacgaacgacatcttgaaccaccgaagccatcataacatcatgaacaacgacaagtcgtttcgtggtttgagaaagtgattggagaagctcagcaacaggttggcgaaggtttggtgaagcttcgaaatgagggatcgcgttttccacgaacttggaattgaagaaggggtcgtcatcatccaataaaggtaatgatgatgatgaaaatggaagtgggtaatcatggaaat

SEQ ID NO: 220260 - DNA, 1417 bp, Cannabis indica
accgaattggtagccaaaaatgtcacaatggtattagtatgtgatattagtgatatcgagaagtttagttgattttgagagagtcggaataagttggggtaattagttatgactaaattacccctagggttaaagtttatttggtttgtaagtaaggggcattttggtcttatgtcaaggttagagatttgttatgttatctatctttcaatagataagttagaaagtaatggaataccctagacaaatttagattgatgtgtagatagaggttagaccttgtcaaactaagaaaatcaaaaaaaatatcaaacttcactctctcttgctttctttctcttggttcagcctaggagaaacaccaatgaaccaacaatttcagagtaatatttattttcttttagccatgactaactcctggagttagagttaaattgttgggaatggtaaggtaatcttcttctagttctctttgtttttctcgatggaaagtttagtttaagttggagatttcatgattggggtgttgtgggttggataggaattagaatgttatcctaggttgtttttaaaggttgtttggctactatttagtgggttttacaactggttggttaaagaaccaagcttgagctcttagaactcaaagcatggtcattaatggtgaattttgatttgtgattcgattttgatttttgttaattggagaatgttattttgatgttaagtaactattgtgtgaagtttggtagcatttgggattgattggagaaagttttgggacttaaaaaaattgaaatttttgaggccccgctattgtgaactgcaattctaaatggtacagggttgtaccaactagaattttatttggcaataatcgagaagcgctaatttttgtattttggccataaatttccacttgtctgtccatttcagacgttctatatattgtcttgaagcttttgaagagctctaaagtatgatacataaattagagctaagtatgtattttattttggggtgttttcacaacaaggctcggtagaaaaccctaaatttttttatgcagtattagacagtgttttagaatagacacttatcaattaaccattgttgtgacatatggtcgggattgtcaagcatttctccacttggattgactcgcatgaatgaatctggattataggtaagaaaattaaatttgtactacatagcatgtcatgtgaagatacaattattttcatttgtcaatcgactattattgagattaagatacagttattaccattatgtgatgaaaatgttgtcttttaaggcaatgataaaaaggttatctttacggttgtcttattagacaacgatgatgatattgggatatcaaaaataagtatcaatgttgtcttattagacaaccatg

SEQ ID NO: 220261 - DNA, 3495 bp, Cannabis indica
cccgttacaacgataatcaaccaaccttaggagcctcgcttgaatagccaggtcattaacaaaagcaatacagttccgcttaacaaacttaagattacaaaactcaaacattttcatcttttccattacattatagaacgaaatggccactctccaatctggtactttcctttgttgtaaagcatcaacagccgttttgcaatcagagaaaacaatgaaagtcctccaattcatctcaacagcccaatccaaggccaaaccgattgcctttaactcagcatccaaggcagatttaccttctccactttgtgtaccacttctcttgtcgagagtcattccccattatcgccattccacaccacccatccttgaaggccccatccgtgacaataaaatttgaattgaagggagccacttccaccaatccttttgccaggactgagggagcgttgacaagatcatgtttgcacagaaacgaactcttcaaactttgcatttgcttcttccaaaaaacggcctagctccatctgctttccaccatgtatcagtgagtttctataccgccaaatcccatcacagacaacataacagcaagtaaggattttctccaagctccccccttcactgtctttacacaggttcaccactttatcaaggatcgtattcccttgaatctcatcacttctcactgctaaaggactgcgaaactatgcacctcatgcaaagttgcactcaaagaaaaggtgcttaggagtctcggatgtacaattacagatcacacactccatatcattaccacttcgaattttgtcgcgagtaggaagcactccattgcacattctccacaaccataggcaaatcctcgggtgcagcttgtttgaccatattaatctccatcccgaaagcacaggcccaaaacgactttcatttgccaaccagtaagcctctttgacagtgaactttcccaatgccacccttttcaaaatcaacgtatcccgttccagcccattgactatgttaattcctataatcaactcccccaaattccttccaaataagtgaataacatacctctcattccatcttgtctgcgaatgatgtaggagatcggctactagtctcagctgtggagccttttctctgacttcctccattgtgtttcgaaactcatcataactaatccatgggatccatggttgccaacatatgttgatatcccttccattagcaatgatagtcttggtgccttgctggattatagatctagcttcaagtatccctttccacacactagagtctccatttttagtcctaacctcccaaaacgattcccaagagcagaatttttctttaaagattttcacccacaacttctcctcattacacgccatttcccaagctaacttagctacaagagctttgtttgcgtctccaaatcgcctaaatcctagaactccattttacttcggttggcagagagtttcccagctttttggcgcatagaatctgctcttttcttgaccaccagtccaccagaaccgtctcaccatacagtccatccgatggcaaatcttcccagggagagtgaaggtagatagagagtagacaggaagagccattgccactgccttcactgctactaatcttccagcataggacaaagtcttcgccctccacccttcaagttttgatttaagtctctcgataagaaaagagaaatcattactcttgtttctagagagaatcaatgggtttcccaagtagaggcctccactttcattattgtttaaggtgtcgatatatatacatcctgcggatatatacgtggtgtcggcatagttgtttcatcaaatggtttatgtggaatgtatattcctataatttaattgtaatgctcgattactgtgtaaatgtgtgtgtgccgctgaaattgtgttctgcgtaaagtatacatgcacactgacatcttaaatgctattacactgataaagtttttaaagaataatcgtaatttccttctgttaatgtttattaaaggccagagtattttctttacagtacattggtaaatatttcacaaattatataatcatttcagtttattatatattatatattttatatatatattgttagacagtttattaaataacagtttaaataataataattgagtaacaattaattcaaattttggtttagaaatttattaaggatatataatattcactacgacaacaataccgcttacaattaatattactgtccaaagacttaatattaattttgtgtttggtatcttgagatgggactaaccattatttgaatttattgttttatttggattcttatatgcgcatgttatttttgtaattgtattgttcttttcagctgttgctagtgtatctgctaaccttaattcggtaccggtccttaatggtaataactttaaggactggaaggagaacatttttattgttcttggctgcatggatcttgaccttgcattaaggatggatcgtcctgcttctcttacggataccagtacctccgagcaaaggaggatttatgagaagtgggaccgttcaaaccgcatgagtcttatgatcattaagcgcggcatacctgaggcttttaggggtgcggtgtccgaggaggtcaccgatgccacaactttccttgctgaaattgagaagcgctttgcaaaaagcgataaggcggaaacaagtactcttttaaagaaacttatttccatgaagtttaagggcaaggaaaatataagggagtacattatggaaatgtctcaccttgcttcaaagttgaaggcactaaagcttgagctttcggatgacttgcttgtgcatttagtgcttatctctcttcctccacaattcagtcaatttaaggtcagttacaactgccaaagggagaagtggactcttaatgagctcatttcattttgtgttcaagaggaagaaagattgaagcaagagaagactgaaagtgctcatttggcaagcacctctaaagataagggcaagaaaagaaagaatgaggctgctaaggataaaggtcctgcacataagaaacaaactcaagccaacaatgatgatggttgtttcttttgcaacatgaaaggacacatgaagaaggaatgtgctaagtatattgcatggcgagcaaagaaaggtacatttcttactttggtctgttctgaggtaaatttagcttcagtaccaagaaacacttggtggttagattccggtgctactactaacatcagtgtttctatgcagggttgcctgagttaccgaaagccaaatgatgctgaaagaagcatttatgtgggagatggcaagtcggtaaatgtggaagcaatagggcattttaggttgttgttaagtactggttactatttggacttaatagatacttttgttgtaccgtcttttagacggaatttggtttctgtttcttgtttggacaaattgggtt

SEQ ID NO: 220262 - DNA, 3964 bp, Cannabis indica
ccgcaccgcgaatacccctactaggcagcataggcttgatacggttggcgatgatcttggaaatgactttgtaagtcacattgcacaaagaaaccgacctaaagtgttgggttctctttagattctagactttagggatgagcactatattaatggcgttgatccctttgtgcatagaaacagtcacaaagaagtctaagattgcgtcacagaaatcgtccccaacaaactcccaatggtgcttaaaaaattaaatcgacatcccatcaggcccaggggccttactattgcccatgttaaagagtgtttttcgaatttcatccacagacaggattctagtcagttcttccttttccaactcagagagaccattctgaactagacactcacaattcacctccgtacttgggactgtctcagtgaaaacaccgcttaaaaaattagtaaattctttcccaatcagatctctatccgtgattcagatgtcatccttgttcaaaatactctcaatagcatttcgtctaccgctgatagcagccgaaaggaagaagaatttagagcatctatctccatcctttaaccaagagattcgggccctatgtttctagaacatagctcttctctgtaatgactcatttagggcattccgaatttgacactccttgttccagtctttattgccagttggtagcttttgcatctggtccaactgctgctctagctctttaatattagtatcgattctcccaaattgagatctgttccagcataacaaagctacccgagtggctcccagtttcttgaacattctggccggagcccaagggtgaacaacagacgaccaagcatgggcgacaactaatttactcctctcgttccttgtccaaccatcttcaaacttaaagcccctttctaaatttggttgcctttccattagagtgtatgcacaacggcttatgatcagagttgtaaatctgtaatgagcgaaaaattgcttttgggaaaagacttacccaactagtattagccaaacctttatcaagcaccgacttcacatgatctctgccaaagtggtgattatcccaagtgagcttatccccttggatgagcaaatcaatgagaccagtggcatccaccagatttgaaatgaacgggacgaacttatctctacctctggaacccattctttcagactcactcagcacaaaattagtatttcccaaaatcaaccacggaccaccaaacctctcaccaagactcatgacatccaaccaaaattttcttttagcatggtagtaaggcgggccataaacacaggtaaggagccaagggtgagaggggggatctgagtagaccagacccaagatttgattctgagagcaagaaaaacattcaaacacaaagccatatttccaagccaatataattcccccagcagtaccaattgccggacacacaacattaaaataaaaattaagtgacttaagagtacgtaccatatgataagcatcaacttttaactcggtcagaaaaatgaaatccggggagcatgaccaaataagagacttcagttcgagaactgtagaggtctgccctaaccctctagagttccaagacaggcctctcatgactcttgtggagcagagaactcattctcctccacaggtgaaacatagtgagacgacacacgagaaccagagtcttcagtcgaatctgcatcctccaccagagagaaattacatgacaccctaatcagcaagtccccactagatgaagaacctttttgactagtagagttaacatgcatctgctcataaacaaccccgttagtcctttccttgaaatcccaagggaaatcacgaatcaccccagggtgttatctaagaattttttgaaggtctagtgcacggcgaggaggaagtatcagtaagcttctttttcttgaatggaataattctttcattgatttccaaggcagtagaaactccaatgtcaccgccaaaaactcgtatctgataaaaatcaaactccccaaacttctttagatcatgtagtataatatcttgggcctaaaaaaattagataaggccctaccctcatctagaagaaaattcacctcctgcccaatcacagaactatccgtggacccattaatattctttgcctcaatactcggcccctgcgactgcaccaccaacttatcacttagtgcatccacattcgtcccagacaaaaaaggcacaaggtccaacttacaactagggcccgcctgactgcccacaatagtagggcccaaactgtggccctccacaaccggcccaccaccttctcgcatagggtttgtcccaggcccaaaagaaataacacttaccccattagataccaaacaatgaccaggtttccttccattaacactcacctcactaatattcaaattcacctctgtctttgagcaacctttcaaactgttaacttctaaaacagcaccatccgcagacggcagcttaacatcagaccttaactcctcaacaccattaccagaatcggcaatgggtgcttcacacatgccatacgaacttttgggaacccacgatgccagaccggcatgaccacgggaacctctagtcccaatcatcaattttctcgcgacagtaggtggcctaggatgacgagcaacatcgcctgcgaccaagagtccattgcccgccatagtcgtagaacgacgagctcccatagacaagagccactttcagacctggtttgtgcataagaggtaacctcaaaccagaaactacgtccataaactgaaaagaaacgaacatccacggtccaaagatcgggaaaggagtgcctagaggattaacaacagaaacatgggaggaaagatcacacccttacgtggtgccccaattttccacaattaaagcaaaaaattctaattttctcatatttaaattggacccatattttggtgccactgcataactcaaagaagcagcctgagaaaaaggtttggcagtatcaatatccacctgaactcgtagtaacttcttccacgacacaggtttgccttcatcaaactccaccatcacaccttaccagcaagagctcccagtaagtttccatttatagaggagaagtattcatgagggaggttatgaatttgggtccaaatgcagaatgcttcccatgaaatattccctgtagacctcaaagaccaagcctgaagcatcaaagtatatcctctaacacaccacagtccattctccagagcccatcctatccttcgcattcatgaatccaaaatcaaaagagttggattttttggcatcctccaggatttcaaccacattcacctgcaacttctaggccttcaaaacaaactcatgcaccgttttttcatccaccaacattggagcaatcactttcccaaacagaaaaattgtggatagaacttcaacagatgcgacacacggggtcaaagccacagtgacctcatataatatatattattattgcaatttaataataagtgctacttattatactttagtaaaaattatagaaaatttcaaactattttaatttaagaagtttgcggtgtaaatatatttagagagaaaataataattttcattaataagtaaatcaaccaaatttattacatgagcatatagctcatataacaaaattaatataatacaaagcatatcaagtcgtttacaataaaaagaaataaatccctaacatcaacttcaacaaaatatccaataaatcactatggatacatggccaaattaattcagtaatagttatattttcgaaacttctataggtacctggccaaattaatggacacatggaaatttctaattgatctaggtcattaaatttttatttttatttaaaattaatttaaatataccaataaaaaatgacatgtaaataatgacttaatatttaa

SEQ ID NO: 220263 - DNA, 3832 bp, Cannabis indica
acatacaatataataaatataccaaaataattaatagcctaacttacataagaaaagcatgactgaacttatataaaagatactattaaatttggaagaaaaattagaagatgaagaacaatttaataaatgagatatggagatgaagcacaaaagaatcaatatcaataatagaaataaagaatacaaaagctacactctaacctcaccaatatttctaaaatagttcactcatttttgtcactaaaataagtaaaataaaatagtaataagagagaacaagatgagaaagtgtatttctctactctaaaatctgatgcttttgctctcttatgggctcttatttatagaggaaaaatacttccaaaacaggtattttttgtgttacacttagtggagaaaatggcactaaaagttgagaaatggtatcataggattctgtgcgtgtacagaatgtgggagtagcaagcaatgtgtcacgtcaagagtggagagtggagattgaatgtgcgcgtaagtcgctactgagggaagtggcttcatgatcatgcacgtctcattttggatcagaaatgaagaataaagttgatttccacgtgtcgagctcaaggacggtagctaaaggaaaatagctttcgtctcgtgttgaaagctgaaaacaattagattgggccttatgtgatttaatggaccacgtgaatgcataaactcaagtggatcactcctccatgttgactcaattaagtggacttataaatttaattgaaaattgagaagggtggaagttgggccacgttattgaacccaatcaaatggacacctcactttgttaaatttgtagtaacttgggcttttacattcatttttcattataccactttgctcaaatctaaaaaataatacacaaattaaaataaattaaatatttccaattaaaatgaattcacctttaaaaataaggaatatttaatttatattaattatatgtgcacaaataaaggcttaaaatgtatcaatttgagccttaatcaggcatatcaggaggaccacactttatgttgtctgggatcgggttcgggttcgggttcgggggtctagggtttggggtttgagtctaggtttgagcctggggtccaagtcccagtttgggtccatggcatcatttgggtccagggtctagggtccgagtccaggccgtggtcggggttggaattgagtttattgtaaagaatttataattttacacaacctattagtacaagttaatgtcaaatatagtattgtattaaataatactaatacagtacaatacaatctaacactatacaatacatcatgatgtactaaagaagcccttagttgataatctaaactaaaattggaaaaagtaatgggtaatatggggagaatgagacctttcacataaacacaaattcaacgacaagactaagtattaacaccaaaaaaaaaattcttcaaaataataaaatatataataaaaaaaccaaatgcatacaaaaaaaaaaaagaaacacaataattcttttgaagttgggtcgaaaataatatgccttccttggaatttttttgttattttatttggaatattaaattacactaattaatcacatcaaagtttataaatctagagattttctatttaagaattaaagaacgagaaagtctaaaaatgagtacacataatgtaattttcactatagtttttatttttatttttatattattattatttttagtagtactaaaatagtggtgactttcatggaaatttcctataattaattaaaatatacatttttattaacttagtcactacattgacatattctacctttttaattcaatgcatagattgcatatatatattattgcgtaacagatgaggcatatattgagtctaagctagctttgaagtctttaattcctattttgaaccaatattttatcattaattaaaattattattttttctaaacaccatgatgtgtcatatatatatgcttaaataaccatttgatattaacaattatctaatattaatattgagttagaataaaacaaacattgacatatatacttaaagtttatattatcatcaattaagatgtagtgttgttctatacaaagaagtacattttttttgttagaaaaaagtacattttcatatttatatataaatagaaagagagtaaatgaaaattaatagctagtaatgaaaagattcaaaaatgatgagattcttgttattagtaattgtaacatggattttgatgatgatgatcccatgcatggctcaaagcgacactacttctgtgaaagttggtgtcgttttggacatggaaactcagatgggtaagatttggttaagttgtattgaattgggtctctcagatttttacaactctcatccacactttaagacaagattgattctcaatattagagactctaaagaagatgtggtcaccgcagcttctcaaggtactatatatatataattataatactatactaatttataactcatgtagtacatgttctatagatgtagaataataaagagcattgttattgagtaccagtggtgcccagcaccttttattggtgtcaccctattggtcagtgatattctttaaaatttatcttcttaagttgtataggacccgctatttaattacactaatagcggtataacactaaggagggtgctagccactagtaatacaatttagcaattctcaataagaaatccttgtttcttagtagtacttatatttatatataaaaatatgagtgtggataggtcatagactacaagtacttaatttgtggtataaatacattagtttaactttcggttgcagatatttatatttatatttaattatttatagtaataatacttaagttatatttctgtaactttcgtagatacatgaccattaagtatcaagtgaatgaccatgtagtagttatgtcattaaatttttatttttatttgtaaattaatataaatatactaaagaaataaatgatagatagataataacttgacacttaataattagatatttataaaagttccatatatataatttaattattattactgttaaatattaaatttaaatatttatctacaattaaaagttaaaataaatatttttttgttattcccaatataagttatgtgaggagagtcacatgactctggcttaaatatttttaaaagattaaaatttcgtatctaaaattttaaatattttacttttgtcctacaaaattagattacttaattattattttttaaggtcaattacttaattatttttatcatcgcatttttttttttttttttatttttgtccttacaaaatttatatttcttttatcattttatatccatatattttcatattcattcccagaaactttttgtatcatatatttttatacttgcatatttatattttttcactacggtccgaatttaaccataattttttaattttgatgaacaaccctaatattattatcagcaaatagaactcctgtattttgtactaattgaatgtttagatcaaagatattttcttacctataattaagcaagaactattagttaatatatacgtataaatttcatatcatttttttaatatatattactttgattacatatatttcagctaaatatagaaatcctaaaaactccaccaataataattttagttttactaaacaacatatggtctctagcttttatggtaaaattttagaaataagcttttttgttaaaaaaaaaaaaaat

SEQ ID NO: 220264 - DNA, 1366 bp, Cannabis indica
tattcacgatatatacaaagatatgttgcactacaatattatctaataaaattcataatatatcaatttacataggttttgtaaatggttataggtataacaactacatgttctaactataaatctagctaagattatacttactagtaaagaaaacaaaagtaaaactatgctaaaaaatactcagtatagtagtttacctatttttcacgcacagtattaatatcatccattgtataatcagtcttactatcacactgcaacataagagtaaatcatatgttagtttctattaaatttaaaataatatgttaattactacttacgtgttttgaaagatattcctttagatcttttgccatagttaaatctttcattaactgcatgataaactgcacacaatatcattaggttgtttaggagcctacatacatataatatgtattaatatttaatttatatataaaaaaatatcaaatgaaacacttgtcaattttagcctcatacttttggaaactaaattattttcttactcttcctcttggattgaaagcgtcatttatgtcaaatgcctttaacaatgaaataaaaattcaattagacaatacaataatttattaacattgtaagatttgcgtcttagacaatttaatgtaaaacttatgttgtaaccacaatcatagcgtcctcccttgatcgctactagctggatcgtagaaataacataccttgttaattggaaaaatgactatccttatccaatattgtctgtagaaatacatattatgtcattatttattattggaaaaataaataattacaaatcaaagaataacactatcactcactcgaagttatatatggtacacataagaacattcttttgtttgctacgcctaagtgtttagacaaaaatttgctctgattctcagtattatgtatttttacatcaaacttcgaagggtctataaaactttagtaccctatctcaatagtttactggtgacccattgagatcaggtccccagttttttttctaatttatttttttaaaattcaccaatgtcggtggtttcgtgtgtaaccgtcgagattggtatctatctccgcagttacacacagaaccgttaagatcagggtggcgagtttgcccaattttttagtagtcatgactacagtgtaagattttttgaagtggataatcgagatgagtaaaatgtcaagatgtaaatgctagatttatgcagtaatagtagctgctgccgtttatcacatttcactacatgaaatgtcacttttaccagcacagttcgttactgcgatggtaaaagtaacttttaccagcgcatttcgtaaactgcgctgg

SEQ ID NO: 220265 - DNA, 2495 bp, Cannabis indica
ctataatgtcaagagtggttactggttcattctccaaaatgaggggcttgataaagctttctctgctacggggtattcaagttggtagaagaaacttttgaatcttaacattccttgcaaagtaaaaatatttgtttggcgaattttttctaattggattcctactaacgagaatttcattcaacatggtcttttgagtggcggaatttaatatgtttatgatgattgaatggagaccacccaccatatgtctgcatgataaaaataaaattaagtttaaaagccacttagttggctaaattgtatcaaaaataaggccacaggccgaagtacgtacaaaaaatcaaagatagagacatttttatatgtttatgggggtcgatgagttcagatcttgggcggctaagttgttgtcgtcctactcctagatggaaattttcgggttagcagcttcatgggcagcattgctctctagatgctcgacctcctcctcggatttctcctaagcagcttcagattcgcaaaaggccaatagtttgactagttcatccttagcaaatatgtgaattattcttttggattaaccttccagaactcgtaaaagaccataatgttgcctatggtatcatactttttgttgtccttctaatgggcctcttccccaaccttaagagacttcgccaactcatccacctggtcagtgagattgtaattcagccgacgaaagccttccctttcgtcctctagctccttgactctcttggtttcaccttcaagtgctttctccaacttgtcaaccttggcctggtcgacaagttctttctctagcttgaccaccttattgttaacaatgctcaaaaatttgttcacctcacccaactgtcccactttcttctcaagctccttcatttctccgtgagcaaccttctagagttcgttggaggaactctcaacttgagacgccgaatacttcacttgagagtagtaatgctcaagcttgaggaaacctaaagagagaagtagttagaaattaccgataggcatatattgagctaaaataaaaagacttgtaaaatttttaccttgatcaactccctggggagcccccgaccaattttttaaccctaaatttaacagcccctttaataagatatcagtttcaaacattacctagtcatggtaaaaatttcaccatctccttagccttttttgcctatggaggaaaggggacatgcgcctgaaaatacctcctaggtttggaagtaggagtagtgtgaggtcgggtgctagagggagtctcagcagtctgctcagtaaattgtggagttgggtcgtccaagtcaacaatatccctttgtaggacttgagtcccattgatcaaagcatcaaggaccgctcccttggccggaggggtctttcctccctggactaaagaagcttgtctatgagtcttatctagatacttctgggtggaagaattgccttccttcctctttctagttaggttaacatcttggacgacatagccgcacaagtaaacaaaacacttagtaaaaaaagaataaaaaaagaagctaagtacaacatacatatatggcaaagcaagagaaagtaaaaatccatgttgtcaactccctcgattatctgaggagtgtcatcataaagaataacagtgggtcgttcgtcatctgaaaattgtgagtcggctcttcttccaccactttcttccatttgcccttaacaacgggcgtacaggatcaactagcctctaccactaagtcgtttatcctcatatttgaatgagttggttgggcaggaggcgtaagatctcttgggatggccttttctttatttaccaatgcatgggcagtagaggacttccctttggcctatttggatttcttcttacctgtaatggatggatagagttcgtacttgtaaaagttttcctctctggcatatatgtagagtgcactagcctccttggaaagcctgactatcttttgggccctactcctcaactctaaggtgagcaatgggcgaaagaatggcttgacagtttggaacgaatggtggttagcttggatgtccatcgctataaagtaatcatgagcataacctcccatctttgttatctcttttgtgcccgtcagccacgagtagctaagaagagtaaagtagaagtacctcgaattgtgattgcagcggttgatttgagatcaaaaaaccaattaatctcatgggcagagggctcccccaaaccttgttggtcgtacagtacgtacaacgccaacaaatactttaactccttggggctaatctacgtcgggcagatgttgtaatagttggctatattatattcagttttatcgtagaatgagtcacgtgatggatgttagttaataaataaatgcaaattaaatactcttcactagaaaaataaaaatataatttgaaatcatatgataatttttttttatagagatttatcaatt

SEQ ID NO: 220266 - DNA, 7493 bp, Cannabis indica
atcgatctcgcattcaaaaacctccccaccagacaccaacgatcatccaccagaaccgcctcctccacgtcgtcctcaatctcaaaaccacattcttcctcatcatccaactctatatgcccatactggaactccatgtcatccatggctgtgctagtcgatgccatcaaaccaaaaaaacccacgatagaaatctgagaaaaacaaacccacaaccacaaacctgatctgtcaaagccctatgaaagtcaatgagagaaccggcaagatagaaccagtcgcaacaatcggagcagaaaaaaacccaggcgtaatatccaccgataactcaacgatgactatatctcaacgaggacgatcactcaacgaacagaaccagtcgcaagaaagaaccagtcgcaaacgaacagaacctgctgaacgccgagctccaccgatactcaacaatgacgacaactcaacgataactcaaccagtcgatcactcaataatcggaaagaaagaacccagacgcaaatccagtcgacccagtcgcagtaatggagccttcttgacgccgtgctccgccgatgacgactcaacgatcagaaccttcttcacgccgtgctccgccgatgacgacgcagcaatcggaacagaaaaacagaatcagcgtaaaatcagcgtaaacccagtcgaagacgtagaagaatatacgatattttagagagaaacttaacccatgccagctggcaagacttttagtagacatttattaacttagttaccaaatttagggtcattttgcatatcaagtctataaataactccctaatctaaaagagtgggctgacgactcagaactgtggcctcacaagttacaactgagaactgtgggccggaataatatttgggctggaggacccgacccgaccggagaacatgagaagaaatggaattggacacgtggattaaattaacgaactgagagccacaggtacaggaaggagatgaagatgacatattggcgccttcaatctcaacagcttatctactccttcttccactaccactgccaattccaagcaaacctccctcattcagagaaagtgagttagtttaagagagagaatgagaaccataacgctctcagggagcgttttgctttctctgcaatctcgatccaagtccaacacccaaccttcctccaagctttttcttcggaacccatcttcaatctctgcaaggtgatcctcatcattcgatacccatctccattaggctcttcttttatgatctaactaactactctgtaccagtgtttacctttcgtttatttggtattgacttacaaatgcaattttccagaatggcaatgtaagaaagtataattagcaaaaaaatgttcgcctcggtgaatataatcacttaatttttgtaagtaaaaatgatttgttaagatgtatttttttttcttttccaggtacgcaagccagtggagagcaagtattagtggggaacgatttggtagcttttcaccaacatcagaaaactcagattacaatgtaatacttcctaactcacctcactccatatattttgttgtctttgaagaaaatcgagttttcctgttgagtttgttagcttcgaattctctcatcccattacatgacattttagagatattagaagacaaacaagtggagagagatggtgtgaattttaataatgtcatgtcatgtcatgtctaaaaataaaaatgagcacaattgaaaccaaacccactttggagtgaatgcctgcccctgaagttggagctaattgagccatagtttgttgcaagtgctgatagtgatgatgattgttgttactatgctcctaagcgaacctttttcatacatctaaattctaatcataaaacgagttttattatgcatcatacttttaattttactgatgatacatgttaattaatatcaaccatgtttttacaattgtatgttcaatggaaatgatatattattatttttggaacaggagcacttaaagtgtcctgatcacaagaactttgaaaagattacggatgtaattcaaataatggatgattatagtggcttaaaaaatgaacttgcaaccaagaacttgggaagatcgtctgagaaggccatagagtttgtcttttcggaaaaaccagttagttcatttttgaagattttgatgatgtttggagttctaacacttcaaggatctcaaccagcagttgcagcttctgatttcacaaccaggcttctttcaagtccttatttttctgatcttggagatattagcacaggttttgcttcagttaggaaaatctccctaaacttctataagcatgatgttgttttctagcttcttttaatagcagtcatagaggaactggagttttcttaatcatactttgaaagtttattatgtctcacatcatttcggttttggacttcgaaaggaatttcttatcaaagatggatcttgaatcaattctgaaagtacttcttttattgcttatgagaaacagaaatgacaaagttccaaactttggagaactttggatatctcccaagtagagcttctgctctcccaaaatcttaggaaaaatctgaataagttagagcctaactagtttatttatatattaattagagtacatataagacaaagttacccctaaactagctactgcacttatatgatgataactatatgatttcatgttttgagacaatatggtaaaccaaacatgtttatatttttctggtgcaggctttcttgctgatatttttctctgaactgggggacaagacattcttcattgcggtgagaagctaactgaacaaaatcttgtagtttacaaacattcatgaaaaagaaaaaaaaggcaaacagacttagttctatctatgtataagttaaatgatttattaaatgatttttttggtatacataattagtttaccatttgcccaacttatgatacatgtagatacgcacaccaaattcgttaaatttataattctcattagaagtaatctgttttctttgtactttaacttgagtttgaatgtatgttgccctctccctgaaagaaaaataaacatatataatatgcaaaatttaagcaatgtctagttcggctttttctcttgttgtccatataacatatttaactccaaatttgatttcgtgatgtcttctgcaggctcttttagcagctaggaactctgctgcagttgttttcactggaacgtttggtgcactcgcgtatgttttattctgtttgctcatgattatttagatgtccttcatttataatatgctacaagttcaaagaactatgcttatgagacttgaccactcatttgggtagacaacttttctttgttggataaaggttttaaacatgacaaactgtaggattttaaacataaaacttaagacaaactgattaataaactcaaaacaaacacaattcaagatgattgaatcaatgacagataatcaaacacaattggaaaacaaagatcaaactgtaaaacgtggagacaaaacaaggagatacataccggttcaaaaacaattaacaaagatcaatgtgatctttgtctgtactctaatttggaacactatcttcaatctttattaatcagcaaataatagtgtacccaaactgttgagaatgagtcctccaacaaaagtttacaaaggatatttgaattaaccttaaaacataatacatattattcatggcattgctctttaaatagaacaaaaaatatgacaacatattttaaattttaaaataaagcatcttattttcttaataaatctgattgaaaaatcatgttttttgaatatatcaatttatttgtttggaaactgtaattaaaatacgacattaatactttgtagtaatagattagaatcttgttatagcagaacacagatatgcagtagcataaacagaaataaattgtggaaaattgaaaacttgacacaagagaattgtatgtgatattagtgttctttcaaacactactcgtccatagggccacgcccagagaaatgaaatcaattagtaaatctcaaataattacaaatacaattgatttaaacaagattagactccctttaaggttttgtcgcaatcctttgtaatttattttgctaatcaaatttctgtacatcaccaaacagcaaactcccttcatttttgctccaaagcgcgccaaatatcataggaagtagagtaagccaccatagaattaagaactccctcggacattgaggattatagccaagaaaggaggagttgatctcgtcttttccattgcaagaactctgggttagttttgccattaactagagttgcaggtggatgaactttgttgaacaagatctcatccaggttgtggccgatgaaagtcggtacgacttgtgattaccacacaaagaagttgatgcaatctaaatcgatggttagtgaagcagttagcgagttagaaaagggattccaaggttgattggatgaggtcgtaatttctggaggtgcaatcgttgtcggcgtgtcttgagttgattgagacacggtagaaccatgactttgagacagattggttgaaacaaaatccatagacgtgagtcaaaagctctgataccataaaggaattctgtgtactatcaaagtgtcttagaaatacatcaatgaatatgctgtgaatttcttaatcacacaaagtgatcaagtcctttattgatatactgaacaattgtacataggggttgttatcagctaaacaaacttaacagaaatggaactgacttacaacaaccaaaactgctacgaactacttttaacaaacactttttaactaacaaattacacaattagttattagggaggaatcaatactactcaagcatctttgtttaaatcaagttaccatttatttcatgagttctttgtactactaaattttattatccatagacattgcatattattcatgagtattattgttcagttccatagacatggctcaactactaaattttggttagacataacatgcagggcaatgacagtcatatccgttgctctcggacgaacttttcactatgttgatgaaatccttcccttcaggtacttcctttgctttttgaactgtaaacagtgagggctatgacatgttattcttaagaaactcatacaactagatgtgctaaaaggggacatggatcacactaattgctctataggttccacaataaaatctaacttaaacactcaggcctaccaaataacttcaaataacatattaataaataataatacctatattgcttttggacaaccattattcagctcctatagtgtccctacacttcctaccatttagaagcacttgagtctagtctaccaactttgaagtttgtccggaccgaaactttaagcaccttttcggatgggaatctccaaaagtaaaattaattaacaatttttttttttcatcattgtaatatgttacacatttaagctaaaaaaaacattctcttagattttgtaacttgtaacgtacttaattgatctcaggtttggtgagactgatttgcctctggatgatattgctgccgttgttctgttggtaatatttcatctttgatctaaacttattgtttgattgtttgaactgtagtatgtgattgaaaacagagtttttaagtcatagtatattacgatggcactgataaactaggaacattaatatctgaaatttgcttcataacactattcttccacaaaaacaaacaatttagggtcataatccctctactgagttcaattcctctatatttatagaataaaaccttcccacctcctcaactaattacaatttattaaaaagaaaccttactctaaataataattaaacttggcctacatagcctttcttccttcgataggagctactgtaatgtggaaaaataattaatacaataatttatattttaatccaagattaattcatttaaatttcctacgtgttgaccatatttcaaaaccatcggtgtaaaaaaatgttacaatcataaataaatcagttttctggtggatgttatattttgggcaggtgttggtttgcctatataaaaaatctttgataatagccaaagtattttatgaagttaaatctcaataaccaaatggagcctctgttagtatgataattgtatttgtcacagatctattttggggtttcaaccttggtcgatgccagctcaagtgatagccttaaagcagaagatgaacagaaagaggtaagaataattgccatacggaaatgctgtttaccatttatgttcttctccaaatcattaattcacgtatcatgtttcgattctaaaacaggcagaattagcggtttccgagttttcaggaaatggtgctggaatagtagcagctgctagcactgctcttagtactttcttcttagtttttgttgctgaatggggtgacaaatcatttttctctacaataggtaattactaattagtacaagtaaccagtgagggttagccaagttctctttggtttcattacaacttaatttgttcaagaagagtatctcatgtctttatttgccccctatgcagctcttgctgcagcgtcttcacctcttggggtcattgcaggagcactagctggtcatggagtcgcgactttggtaaaatatttatatatttttattctttctcgtataatatgatatgaagatttactctttaacctcggccactataaataaataactttgtacacaatattaggaaaagggataaaaaaagaagaagtaaatttctcattcaattgtaaaagaaaataaatggtagtatttatactagaggtgtttagctcaaacaaagagagactaacccaaaggaaaaagctcaataacataaaactaactcatcctaatagacctttctcaaaatgaaatgtacaagttgtgaacatttatcttggatacaaacattttaaactgatttgggaatagaagtttggttaagatgtcagtgatgttatcctttgtagagacgttaaaaagcttgagacgaccttgttggatctttttttgaacaatatgaccgtctatgtcaatttgttggatctttttccgaacaatgtgagtctatgtcaatgtgcttttgtacgctcatgaaataccgagttttcaaatatatgtaaggttgcggtattatcacagtataggactggtgggccggtgtgatgaatgagattctatctcgaaatcaattgataattggaggagtaggctattcatcttatatattctattctttccacacgttagcaatgtgagactctctaacatcccccctcaagatggtagctattttatttgctcatcatcttggacaagtcgatcataagcggctcttttttggctcactatccc

SEQ ID NO: 220267 - DNA, 2421 bp, Cannabis indica
aaatataaagagtaaaataaatattaaaattataattttattattttaatagaattatatattttattttaaatggtgtaaaaatcattttatatagtttttttattttttcaattccctatttttttaatggattaaaaattgtgtatttggaggaagaaggtctcgctccattaatcctctctcttccaatcttcccttctccctcttgctaaataagcactattgataacctccatagacacacttctaatactaaaacaaagaattaaaaaaaaaaaaaaaaaaaactaagaaacaatactctctattacttatactaaacactattttgatatattcttatatcatttaatattttatgtgaacactaataatattttttttctcacaatttcaaaacttaaactttcgaaacgcattactcgcctcactcgtacaaataatcttaaataactactaaaagacaaagagtgttatgaattcttatcccattttggtcccacttgaaattaagtaaaaattattatacctattattaattcaattatttgaagaaatgtgtaatgtgtgcagcatagccacaacattttgctataaatagaagcaaaccttttggccattttcaaaataaaaggtcgaatcatatatttgtgaaagtatcctaagtgtggtgaagtgaagatcatcatgaaatctacttgtgtcgttcttgctctcctctcactaattctagtatatgcattctcatctcaaatctattttatttaatattatctaatcttcaatttcattaaatatatataagtctattttattttacaattagagtatgcatatgttaattaataaataatattacttatatattggtggttgtgcagctgttttcctgtgagagtactgaatcaagaaaagatccagcaggagaatactggagcattgtgatgaaagaacagccaatgccaaaggcaattcaaagccttattattcctggtcataattatgatcactccacaccaaaaattcccaaccacccaaaacccaagtgttctaaccatgataaaagtcctaatactttcactcaagactttgaaccagaacctcatgttacctcatatcccgacgacgataatgttaaatcatcagtaaaaacattgtttaccaaagattttgaacttgaacctcatgctactgcttatcctgacaatgatgttaaatcatctgtaaaaatattgtttaccaaagattttgagcctgagcctcatgctactgcttatcctgacaatgatgttaaatcatcagtaaaaacattatttacaaaagattttaaacctgagcctcatgctactgcttatcctaacaatgaagttaaatcatcatcaggaaaatattcactgtttaataaagattttgaacctgagcctcatgcctcagtttatcctgacaatgaagttaaatcatcattaggaaaaatttaaaatttacaaaagattttgaacctgagcctcatgccactgcctatcctaacgatattcaaaccaaataggcggcaacatatcacatcttaccatgcaaatactcataaatcatttgcagaagatttcgaacctaccctgcacgttacaaattacaacgagaaaggcattccccaatcttaagtctatgactatatttagtacgttgattatattctctatatgcatgcgtacgtgtctacttatgcttatccttgtaataataaatgtttgttttcggatcaaacaagctttaggttattgttgctttgatgcaaatgcaatgtaataagaatcttaataagaatagtatcatgatatttgcctatttcgtttagctctgtaatgaatattataataattatactaaaagaagaagaataagggttagggaaggggggttctggcgagaagaaagaaaaagataagaattcaacacgtgtacggatggcgctatgactattaggctatttttagtctattattcgtgtcattttttagagataattttttttcttcatagtcatttttttagaatagaattacacttgtttttttagtttcaggtttcgactcttgaaatgtataaattgatcaaatttcgaaaaacagtgatctgtaaaataaaaaaaatacaagaaaataaagctgaagcttcaaatatttatgccgcaaattactcaaatcaaaatcataattaattaagagtgattaaggagaagagaagaactagaatgatgaacaattaatgaagcaatcatcctcttttctactctctttctaggtttctctctaaaaaaatacggtctaaaagtgctaaaaatgaacctaaaaagtcttatttatatccccataaaagttcctttgatctaaattaaaaataaaatttaaaatatcagaaatc

SEQ ID NO: 220268 - DNA, 4029 bp, Cannabis indica
attaaatgttatttctgatctatattaataagtaaatctcgattatattgaaatgagtttttctacttaattaataatattagtttcctccagtggagtaggtaaattttcgaaccacgtaattttgtcagtttattattttaccgctttgatatatatttatcactatctttcgctatttattgcttacacgcacaataaattagtatcaaagccaaatatagtgatattatatatcaaattgaagctctcgacgagatgaattcaacacctcaagattcgcctcaatcaaaggtccgacgcacctccagtagccgccagagtgttgttaccagctatcgagttaactcagtcaaacaactattttttgatcgagtcagcccattttttacctgttttcaactgagttggacctatttctaactatttggatcgttctaaattcaactgcggcattcgtttttcaaaataaggtattgaaatttgaaaaacattgttttaagtcataagctcaaaagttctattatttgtttgcaattatggctgacgacaaagatcttgaaaagatacacaagatgacgtaagaagttctgagtcaagaggttctatgagaagaactatgttatcaaatgcaaagttttaggtcgagaaatttgatggtaccaataacttcggtatgtggcaatgtgaagtatcagatctattgtttcgagaaggatctaatattgccttgagtctaggccagaagattatttcgatgaagattgaaattttttcaatcgtcaagcttttggcacaatctgactttttctgagaaaagatcagaagtactttgacatgaaagagaacgtagctgcaattctttataaaaagctagaggacaagtacatgacaaaaagtgtagaaatttgactctacttgaagaagaaacttttttgtttctagttcaagaaaggtacccctatgattgaacatttagataattttaacaaaatttagatgttaaagttagtgatgaagataaaacattgttgttgttgaattcattacatgaaagttatgaacatttaaccacaactctttatatggtaaagatgaggttaattgatatttctaatgttttggtaaacaatgagtattggaagaaggatctaacatgatcataaagactcaatgcaaaaagcattggctaccacctgaggtagatcgaacaataagaaatcaagtggatcgaataatagggggcgatccagatcaaagtctagagaagagtcatcaagaagaaagcttgcaagagacgagtttgcctattgtcatcagaaagggtattggaagaaagattgtccaaacaaggacaagtcaaattcaaatgttgcacagaaggccgacatcgaagaagattcagcctttttagtttcatcattagatatgtatgcaaacaaatagatcctgaattctggatgttgctatcatatatgtctaaacatacattggttctcgagttttgaagaacttgatggaggagttgtcctaatggaaatcaacaatgcatgtcagataaaaaggattggaacactacgtttgaaataaactttggtacaatcagaagacttacgaaaaatcttatttctttaggtgttcttgattctgatggttacaagataacattggaagatggaaacttgaaagttgtatgaggtgcattcgtagcgatggaaggtactcaaaaggaaaatttatacttcctagacgggagtactgttactagaagagtagctatctctagcagttttaaggaaaagacatctgattcttctcacctttggcacacgcgcttaggccatgctggagagaaagctttgcaaggattagtgaagcaaggtctactgaaaggtgcttagaccaaacattttgatttatgcgagcattgtgtgctgggaaaacagataagggtcaagtttggcattgttgttcatcgtactaagggaactatagattatatccacacatacgtctagggaccttccaagaatacttaacttggaggtaaaatatggtttgtgacttttattgatgatttctctagatatgtttgggtatacacaatgcgacacaaagatgaagttactgttgagattttatgccataaataaaactcatttcgatagtcttatttgtaatcaatagaaaattagaagtcatttaagttaacatgttattttcatgattatggtttaatgtacagtttctgataaattcagaaaatatagttattcacaattacagtgatgtcatcacagtgaaaagtaattgtatttatatacttcaaagttttagtcccataatttatcagtgcactagatttacattgacgtgataatcagcgataaagtttacttacacttggataagtggtgtgtcttttctagggcattggcaaagtatactagaattagatgtatggagtatacatccgactggaccgatattgaacttggataagatatcataaacttagtgttatatctttctaagtcaatatcacttagttaatcttagatcaatagatcttattcgtgagatggttaggttctgacttaactatattatttgtgttctttgacttgtttgttaaagttgacaaaatagattggcccaatacttacatcttgggaacatggtagtataattgagtgggagcgctaatcatagatacaaaatctatagcctctataataacatagaagtgaaatgataatttcctttgagcttggcttaatagagataaatggaagagctcttacttcagtaattattttaatttactgaaaattcatttatagaaagctaagtgttttaacaataaaatactgtaaagggtagaatggtaaatttgtccctactcgatgtaaattatctatagaggatctttgattatttaaattaaaacaatagataattaatagtgtatccatatttgaaacatatagagcattctatgtaattaggagtgtaatttcgaatctacagtaggccgggaataattaataagttaggaaatttacttggtaaacttcaaatctaattattggaagcttgactatataggtccatggtccccgcactagttgagataatattggcttgtagactcagttaaatggttttaattaaccaattataattctaaattagacatcttatttatgaatttttactaagtaagggcttaattgagaaaaaatagaggatttaatgtttatttgttaattaagagactttataaggtctaattaataaattaattaaatagtaattttatttgataattaattctaattattaaattaatgtatttgacatttataggagtaaaattaaaatatgacatttgtgaaagaaaagataagttgttaaataaatggcaaaattgaaacatgtggggcccacacataatcggccacttaagggtttatttagctattgttttatcgtttttaattccttataatttaaattctaaccctaaaaggaatcctataaatagataatgataggctcttattttcataacctacattagactactttgtcagataaagagcttctcttagatttcgaattcctctctctttcttcttcaaatttttgagtcctatagtgagttgagtgattgtccacacaatttaagtcaatactcaatcacagtgtataagattatgaagaattacatcacctgagaagatccaagtttagatctttgcaatactctgtgatagaaaggaacaagggttagagatttgaacaaaaggagccattatattctgctgccaccaatttaaggttttctacaaatttatttgtttatttcattgttttaagaaattcatatttaggatgttagattatagattatgttgacctcgcttttagccaacaacagtgagtcttgataataagcgataaaggatataattcagatataatatgaaaagataaataaagaacacaaggtttttaaagaggttc

SEQ ID NO: 220269 - DNA, 3984 bp, Cannabis indica
gattcggttctttcactagttttggcgaggagaggtgtatatttgtgctatttgggcaatttaaatctccaatccaacacaatacagaatatcttgttggtttataaacttaggttgatcattattatgcatataccttgcctttcattagccctcccattgtttttagactctggtttatatactcttgataagtctttgtgtgtaagtggatatggggatctattttcgttaaaactttcactcgtttggatgtgaaaccatattagccttgtggtgtacaatatgttgagttccttgctcgtgtagagtttcatgggaggactaatattcacagaaaataaaaataaaataataattaataaagctatactcaaacatgtttttgtgtctctttttgcagaaattactccgggctgtcggtctttttgctggatcaatagttctgatgcgaaactatggtgatcttatggcaatatgaaaaggatagtgttgtctattcttagttggttagttatttttgaaatgtagtctttctgtttgtcataagaattgttgacctggaaattccattcaaagacagggctttctgtcttgttttcagttttagtgaagaagaaggtgatttcattgtgttcctgaggcgttttagtatgctctgagtctgtctcagtatctctatacatgaataaaaagattttgatttagtgtggattggttataattttaattcgacagctcattttcaatcatatgcatttttgtggagactcgaactacttttgaaattaggtttttcatatgtgcccttctcataatgtcaagtgttgaactcgtaaaccatctcaaggtcctgagaacaatcaaagttttcgttcctttattcataggagttcatcatcaatttaaaaatacagtaagtttatcccagagagaaatggttataattgtttatcaatcaattattatattttcattccatctatttatatattagcacgtaggtatggaaatgactttttcgaaatgcattgtgagagcattaatttatttttttagattatatggaatctgatatagtgatatcacaccggaggatggtgctaggccgcgccttttagcaattctcattattatattgtcatcattatttgatttttttttttagttttcgctaaacatcatcatttgaattcttgttctacaatttcttattaatcccaatgaaaaaagagtatatcctcatataagggatagtcttagtgactagtgagttcaatagagttctaataagaacattttacatcaatagacgtagctcaaatggtgaggttctaataagaacatgtttgtggctgtacggcaatggcaccaagataccaaacgaaaaagagtgagaatgccttcaaaatccttggtcccattgccatacagccactaacatgtcctatttgttgttggtgactttacagctttgaaattctaaacttataattgtgaaacagtttcatgtgacatttacatattattaacttattgtaagattggctttgtgaagttctcatttttaattcaagtgatgtataatatatgatttattttcagaataaaactatcataaataacaatgttaagatacaacagttaaaaaggaaggagagtatcctctaatcaaatacaatttgtatttactgagagaacatacttagctaatttatgagtattagtatgcgtaagcctatgaacatgagaaatctacactcttggaaaattaaccacgagatttctaatatcagtaagaatataataaaactcttagactaagtttaataagattgcaatcattttgctacaacaagggaatcagtttcgatataataaactggtagttgtaattcaattagccatagaagactataaacgatggtcatagccttgagaatttctagtttgaagcttccttgaaaaggctttgataaggcaaccactatctcaccatctgagttatgaaggatagcgccaaaaccaatttttttttgccatcgtattcactgcaccattagtgttgagtttcagccttccagatggtggattcaaccattttggggaagctaaaatagttgcggaagttgctggtcaaatgtctacatcgtccttttgccctttattctttttagcattttttgaatttttgtaactatagttttaagacagagagtagtaaaacaccagctggtttgggactttgtctatggacctcattccgttcattccaaatgatgcaaacaatctgttctaattcctaatgagagaaaacatatgatacgtgaaacaaatgatttgggaatgaaattggtcaagaaagaaagcaatgttgaagcttgataatcctcaaacttgctttgctcttttacattcaaatagagcatggaaagttgtttcagaacgatgggaacaaaagaagcagcaactcgaagaacatgcagcaaatcatgaagaacacgccacataaagatcttgacttttgacggaagcttcaatgaccaaaatttattccaccaatgtgattatgaggtagaactagactcattatacatgtttgcgataaatgtgtatgtttcatcaacccaaaccacctaaaaaaaccgcataaaaccgtacataaaaacactgctcaatctgctagcttgttggacagttatggattagagtttcgaaaaaccatccaaaaactgcccaatctgcttgccttgcaatgtctcgcatgatgttgtatttggcccagagaaacattaaggtagaatcataaattacatcgatgtgttcttgttgttcttttgttgatgatggaatcaaaggggatttcattttttagcaataatcctttttcttgtgctttctatttgcctggccttcagcaaggcacctagattttggcaaagagggtaaaattgtccgttcaaattgggccttttgggcttctgacaagctgttagacccaagatcctttataacagcaggcccaacccaataccatgtcaatagacaaatagaaactggagacgtgaagagaagagaagtcaaaatcaagaactgaccagaagcttaaacaaaaacacatggcagaggcgttgttaggtgtttcacagacctttcttctgcttcaacccaaaatccgattctcctgcctatccagcggcggagctccggcactgctttcgcgctcgtctagaacgtcctttggtagctctaatcttctcagagttcatcatcatcagaagcttctctgcactgcagttgtctctgaccccagatcctctaacaccttcactgtcgactcggccactaaggaggtcgacattcaattggataccggcggtggtgacggaaacggtttcggtgatcgaggcgatagcggtggaggcggtggcggcggtggtggtggaggtgataatagtaactccaacgagggtgagggtgaaggcgaatcgcacgagaatagcaaaaagaagatggctttgtcaatgtctcagaaattaactcttgggtatgctgcccttgttggaggtgagattatagaactcttaagtgtttttgtaaatttgaattagtgctgtgctgatgtttatgctttataatggaagtgatcatatttagattacaggatttttggagtcaccgcatgattaattagattaaattggggaaaaatgtcactttccattttagtttttgaaaacatttttacaattggcttatggctcttttcaacaacacaaactattggttctctcacgtattggaaattgcttccattaacgtgatgtggtcaagaatctattgggttctacttagtttcctgaatttacttagttgtgaattgcacggaccatggctacttaagtctcatgaaattactcatatttggtcacggattgcaaaaatcttaattctgttttccttgttaatttttgattaactatt

SEQ ID NO: 220270 - DNA, 1855 bp, Cannabis indica
tattgcttttttcttttactcatgcacaccactgttttgtttattttgactaatgaattgaattgattgtgaatttgagtttttgtgggtggcaggtgtgcttagtgccgatgtttttgctcggtactgtcgtttgagagattacaatgctatttatatctgtggaactgatgagtatggtactgctactgagactaaagctttggaagagaaatgtagccccaaacagatttgtgataagtaaatttttctactttgtttgtttatttaagttattaaccgataatgattgagataacaaacaaaactaagttgtgcatttcgggtagaggtgaaaaaatgttaaagtagcaaaataaccgtgtttgatttacactgcgcgaccattatgatcgcaaaacgactataatgttttttttttgtatgcttgcttaagataacaaacaaaactaagttgtgcatttggggtagaggggaaatttcccaaactaacagcatgaaaatgttaaagtagcgaaataaccatgttggatttacattgtgcgaccattataatcgcaaaacaactataatggtttttttatggttgcttatttatctatttatttttgtaggtagttttgcttaatttgtctgtttagagaggaccactcttttgggtggtctcaagttgttttgtctaaatttttgggtagctcgattttatgtaagttattttgtttgtagtgattttgatccctaagtaaaataaaaacatgattattttactaataaaatattttagaaagttattttgttaataaaaattttcataatggttatttttacaaaatactcgggattggaggggtttattctatccataaaggttcaatgttaaaggtgagacttacatgagaaagaaatatttcagaaaactagacaataaaacgttactatgataaaagaaaactcctaacttgtaatttctctcccaaaataatgaaaagaagtggattagtatcatgtattaagcatatgaaaattttcatattagagaaaatatcttcaaacataattttaggatgtttattacttactttgaaaccccccccaacccacccccccccccccccttttttttttaaacggcttctttcttttttgtattcttagtgaggaattatgaggaatggggcttgcctgttatggtaataaattttaattctttgttttatgggatcttcataggtatcatgctattcatagagatgtctataagtggtttaatataagctttgatgagtttggacgaacatcgacccctcagcagactgaggtttgccaagcaatcttcaagaaactgttggagaacaattggttgactgagaacacaatacagcaggtgaacactaattgtgttattatatgtttcgctttcgattaagttttatgccaaatggtgaattttgtgattgttttgtttgttagttaatgggtatgtgtgtgtggtaatggggtatcatttgtgtagttatagctgcaattttgactttatttcatgctatgctgcttcagccttactgtgacacttgcaaaaagttcttggctgaccgacttgtggagggtacctgcccaactccagggtgtgattatgattctgctcgaggagatcaatgtgagaagtgtgggaagcttttgaatcctacagaactgaaaaatcctagatgcaaggtatataatagatttcatttcggttaacttgtttgcttaggccatcttagtttgtatacttttgaggcatcaatgggctagaagttcctttaagtagcggttttgatcgtgtgaggtaattgaaaaaagaaaagaaagaaaa

SEQ ID NO: 220271 - DNA, 2659 bp, Cannabis indica
  modified_base (2507)..(2507): a, c, t, g, unknown or other
tttatttattttattaaaaataattttttttaaacaacaaagtaatttaaaatactacatataataaattttaaactttttaataaataattttaaataataattaataaaattgtgcatttagtttttaataaataaattatttataataatatgaaataagataatatatttataattttactatatattagaattatatttttaaataactatttattatagtattaaaataaaattaaattagtcgcgcgaagagcgactatattacctaattattatatagtttgtaaattcaatttttccattaattctactctccttatttagattttgatcgatatgttatttattaataatttttaatatatgggttaaaaagttaaaatttacaatactttttataatatcaatatgttaaattttaaaaattattatataagaaatataaattgatactttatttataaaattactttcataaaattaggacaatatttataactaatacttaattggactaatttggatattcgcatgtgttagtcactccttttatcatttctcaattaaggatggttaataatgccacgatgttgtgttgtgagttgcaagagtaaaaaaaaaaaaaaagttaagtccctccaacagaatctgttattgccagttgtcaaaatcacgtggtgtttcctctccaccaattacgcaaacaataacccctacctcgcttttctcatttctccacgtggcatcatcccatttgccactgccttcacagctggacatattctcctttcctatatatatatatagcttttcactctattctcaattcaatccaatataattaaaaaacgacaatggttggcgttttccggcgatctctatctttcccgaacaaaatccccagcagaacaccatcaaagccgtcaatatctcatcacatcagatccatcagtcttccatgcagatctcatccgttgatttcccagctcagggacggcgttgctgagcttcactgctgggtaacccaaccggaatgtcggacctccgtttggctgaccaacgggttgacccgactgagagacctccacgactgtctccacgatattcttcagcttccacagacccaagaatctctccgccgattacccagctccgtcgtagagaatcttctagaagatttcctccgcttcgtagacgtgtacggtattttccagacctcgattctggctatcaaggaagaacaatcagcggcgcaagtgggtttacgaaagagagacgagttaaaggtttctctttacgtcaaagctcgaaagagactggttaaagaaatgggaaagcttatcacggcggtaagattcattaacggtagatcggcaccgccgttagtttgcgttggcgacgccgaattatccaacgccattggtgacgtcgttgaggtgacggtgacggtttctttggtgctgtttaacgtgatagcgacgtcgtttggatcaaaaaagtcaagtaattggatgggactgagaaggttgaagaagaagaagaagaagaaaggtgggatttttgttgaagatgaagggattgtggagtttgaagaagtggaggcagagtgtgggttggtggggttgaggaagaaaagcgatgaagagattagaaaagcttcgaagaaaatgcaggaacttgaagccattattggtgggattgagatttgcggagaaaggatattcaggggtttgatcaatgctcgagtttctttcctcaacattctcacaatgtagaaacaaaaacaaaattattattattattattttttaaggaaaaaattaaaaatatttttttagagatattaaatttgtgcttgtttatttatttatttattttttttattaacgtaaaaaaaaagagttaaatagagattgagtttttgtacagtgataagtgatataatttttttaatttgtaaaatttatatatatttttttaaatattttaatatttatcatacttcaagatttaagttcacaatattaattattaaatacttcattttttttatagtttttttttttgtcaaagaaactagaaaacaatttcattcaatgaagaaaatttttaggttgagcatatgaagacttacctcctagaaattaagaaaacctatacatttgttatcaagatctagcaagaacatgagccgattgatttaacaatttaggaacccaatgtacactaacagctaaagaatctacatgttccatcaacttagaaaaaacaaagctcaagtttcactgaagtggagacgcagaattgatagtaattgaaaaaaataaatatatgattcattaataaataaatctcagaccgaaccactttagaaaggagattttcgcaaaaatactgaattttaaataaaaatttacaattttattgtcatacggaatttttttacattttttttttattaaaacaaacgtaaaacaaaaaaaaaacaaattaaacaaaanagttacaaaactctcttcttttttcaaattgcatgcaagttatgtctattgtacataaatttgtagaggtaattctctggtttttcttgaattctgtattttgtgtaggttgttgatcgtgtacaatggcgtcatctagtggtctgtgaaac

SEQ ID NO: 220272 - DNA, 2240 bp, Cannabis indica
accttggtggaaacatctctgccaccttaatatctcgcctaaagtaaaacactttgctttttgcgcctcaaattcaaccctccctacgaataaaaatctagcttttaggaaaataactcaatcctcctcttgtgatcgctgtggaacccatattgaatttgtttctcatgctattttcttttgcaaaagcgttcgaagagtctgaaaagttacgattttctatgattttatttcctcttctccccctactgttacgtttcatgacattgcttataatatttacgctgctctaaccaaggaagagatagaacttttcctatgtgttgcttggcttctttggcataacaggaacagggctattagaggaaaatcactggatcagacccatgctatcgtgaacatagcgcagagctttctggcagactacaaagcatcagtatcagctcaaaaatcaccagcacttgcgaatcgacctccctcgagatcatcctggagacctcctgatcccggttgcttaaagctgaacgtagacgctacgattactaaagattctttaaaattgggttttggtggagtcattcgaaactgcgatggtttggtggttgctgcagtcgcgttcccttatgtgggaggaggggacatcaccactatggaagccaaatccctccttctttcattacaatggtgcattgaggaatgttttcacgttacgtgtgtggaaacagattgtaaggctatcacggatgctcttgagcatcccaaagaggatctctcttactttggcgatataatgaattaaatttgtgttgctttgtctctcctccttggcgccttagtctctcacgtcaaccagaccgcaaatacattcgctcataagttggcttcttgggccaaggggttagatgaagtttccgtttggattggtgatgacctgtgtaatctcaaggaatttctttctctctaaagggcaccactcccctacaaaaaaaaaaaaaaacctaactaactaaccacgtgccttgcacgtgacaattaatctagtatttataaaatatccaaacttaattgatgacatttgtttattaataaaatgaaagaaacaacatagatgagcatgtgtaacattgaaatcaaacatagaaataagcacattaacaagacagtaattaacactagttgcttcctatgatattattgataaattttcgaatagcatcaaatgaggatccacctttctcaatagatttcctggcaatatcactcatctctttcaccttctttctcatcaccacattataatcaccctccataagcttttttactgcatttccaatctcctccgctgtcacaagttgattatgtccacgattcctgtaatccaatctcaactcaatagctaagtcgaactccctcaccatctgaaatgcattaagttgttgctctgcataaactggccatgttacaatgggaaccccataccataaactctccaatatagaattccagccacaatgggacacaaagccacccacagcattgtgagccaagacttccacctgaggcgcccactcattgcatatcattcctttacttccaatcctttccaagaattcttctggcaagatttcgtctattagtgtcggctgttgaactcgtatacaccacaagaatctatggccactgcattccaatccagatgcaatctctctcaactgtgaagcatcaaaagtaccaagactcgcaaagcagagaaacactacagatgactgaggctgctcatcaagccatttgaagattctattgttctgaacatgatctgtacttgagtgaggttgtcccttgaagttaaccgccggtccaaccatgtaaattggaggtgtttctccatcattaaaggagctaacaccatgagcctccaatccctcaaaagaattcactataattccttttgtctctttgaaccttcgaaccattttaacacaagcagagtagccaccatctttgcaaaaataagcttgaggaagggcactccaaggaacaggattatgaaaaccctttaagctatactcatcaggatttgattctttcaactcggagctgatctggtcatgacgagttgcaaggtaaagcattgaactaagaaatccaatgttggaaggcatgaacatataagaagggaggcctagctcgttggccacatccatcataggcatacaaaagaaatcaagaaccattacaaa

SEQ ID NO: 220273 - DNA, 1591 bp, Cannabis indica
tttttttttttaaattatttgtagatttgtagattcacccttaacaaaaataagtttatattaccccttgaaagatttgaaggtagtgctgctacacgtgcctttgtgccctgtctgcagttactggttattctcatttttcaaatactcccatttttgctacttaaaattgcaaaaagaacacttttataagaaaaatattatatattgtgacttgctattatttatcaaattatttatgataatttctcactattaattatcaaaattatttatatattaaatcttaagtttatagtttttttaacaaaaaattaaaaagatatcacataaattttatgaattgctactattaagataccataaattatattgtaagtaatctaaatattatatctatatgtccgtattttaatattattaaaaaaaaaaaaagtctatattttaaaattaatgcaaaaaaaaataattatttattactattaattatcaaaattattttttataaaataaatttttttatatatcttatattttaaatttcagcttttagtttttattaaaagaaattaaaaaatatgttacataaataaaataaatacgggtttaaattgcgcctatcattaagagaaataaaacactttacaaattcaaagataagataattaaccttaaaactatatggcggggagtagcttttaactctttagtcttataaagtgattagctctcttttcttttattaatgtaggacactcacatgtgttgatgtgaatagtatattttaactcttatatctattctatttaaagtgtgttatgtaatcgaaattttagtttaacagtattttttgattttttattgttaactttaacagaaatactatcacttaacataatattcattattaattttataatattattatatatattttaaaataaaaattatgtaaatattttacagaagaaaatttaatttaaatttaaaatacttaaaatattgtagatattttatactaattcgaatataaaatttcatttttttctttcttcttagattcaaataaacgattcggagagttttttttaataaaataaatcaaaacaaatttaaatgagtgtaattttataaattctaaaataattatgaatatatatttgaaaaatatgtctttaattagttcgtagaattttaggaaaatactttaattacttttttttttaggctaatgttatcctattttttgtactgtgacgtggcagcatgcacgagtggcacatgtctatcatttcttgcacttggacggagaaatattccgaacagacttcaagcaacatatatgcatgcacaaagtctgcttggccgagcagagtaaaaggcagattatccgagcaaagaacgaggtcagttctccgagctgtgtaccatgacttgactacttcagaatgggatcgtgaagcccaagcacgaaggcaatccctacaatcatgggattgtgtcagagggatatgacagattgtctctgtgacaccctaactagcataggcgtgttagcgtgatttttttaacgtactgtgcagctcgttgc

SEQ ID NO: 220274 - DNA, 1697 bp, Cannabis indica
tgtttttgtagttttttgttacatcaatggaggttgaatgctttttttttttccccctttttttacttatttggagtttttctaggatctgagtgatttgtccttgagatctactattttttttagatcagattttcctggttttggaaggaaaatagttgagattgggttgttggggttcgtcggctgggtcacgaaggaggctctcctccatttttttggccggtacttttgtaaatagaaacttttggtttctatttatgtttattttctccttttaggtcataaatgtaaatttgtttcttttttagtttattatagaaaaaatctctttattatttgatttctcgctatgtatatgtggtaacataaattataattgtcctttatatatttgtaatttcgagaggatagcatatataatatatattatataattaggtaatagtatttttatcccataaattatgacgatttttcaatttataaaaaatagttcatgaaaaattatagtgttataaattagtttttctgttaagttttatcacatatgacaataaaaaagatgatgtgtttagataattgacacgtcactgtcatgtcaacatcacatgtgtaatagcagttgattatagctccagtattagcattactatcggataaagaaaggtttgtggtttactgttgttaacgcagattttcgttaacgaataatgagcatctttcgtaataaattaatcacagatatctatataggaaaattaataactataataattataataataacaccaagtatatcacatggtttggcatgctccacgagtctatattcaagatatttctgagtatttgatacaatattacaagtagtgatctttttctttcaaagattttctatccctttttaaggaaaagccgccccctttttttagtaatataagttggcagttatttacatttaaatttgaattacataactgtgtcatgaaacgtgagatttgaacacgtttcatttaaacacgtgtagataacactagataaccgtataatcgcttatcattcttatcttcaaagcagttgacgctgacgtgggtagaggcatctcgccaataataatttggtataatcatatgccaacccggccaactgaatctcgccagcccgtgccctaccagtgtactgagcaaacttaaaaactcctctttgaccataaggcctcgcagactggacaatcatgtccttcatgtttccaagttgttacacttagttattcataatatacatgcctgaataatgcgagtcgttagatattcagccttgcctgtagctttatgttgttttatgagttaatctcatttacaactgctacttcaattttcctttctgaatagaaaggtttattttttgactttatatattgtccatagacaattttaattaattatccttattattaggatttttttaaagtggactgggtttgcaatatatcatgtacttctagataaatttcagttcatatacacatatatatgccccttaagtaattttaaagaataatactttgcaattacttgaacaatgcttcaactttattaataataaaattttacattacaaagagaaaatacaacatttacattatgagtttaatggtaatagggtcgcaaatgtttaacattcaagtggttttt

SEQ ID NO: 220275 - DNA, 1812 bp, Cannabis indica
gagacttagtagacttgagtgtgtatagttaattttggtgaagaagatgatggaaagaatgagaagctaggagaggcacttgttggttctgttaacaacaaataatgaccctagctagtcacattgttcatgttctgttagcagtttaccatttccatccatctttagtaggggtgttcgcggtgcgggtggtgcggttttagactattttttcaaaccaacccgcacatgcggtttttcaaatttcccaaaccgcacccgcactgcgaaattaaaaacccgcaaaaaccgcaccgcaaaaaatagtgcggtgcggtgcggtttttgtggtttatgcggtttggactatcactaaataattaaactatcacaaatacaacaaactttgagcaaaacttgtcaaaataccataaggcttgaaaataaatatgtaaaaaaaaaaattaagtgtcaacaatacaataattagtagactttaagttttttttttgaaagaatagtagactttaagttgaatattcacatattggacctaaataaatataaaaattggtatttttataatatgcgatgcggtgccgcaccgcaccgcgcggtttaagaaaaattcaaaccgcgaccacaccacaaagaacttcaaaccgcattttttttgcggtgtggtgcggtgcggacggtttgagcggtttgatgaacacccctaatctttagttgttaacttccataatttgccatgtgtactcattgtattgttcatatggacacaatgtacacatgacataatatctctgaccacctgccttctcttatttctcatgtctcctctctaaccttttatcattggtgactctctctctcttttgctctcagtctctgcgtgtcttctacagatggtggaatgcggcttggggacattggcaaaaatctgctcatcaagcagcaatacatcttgagtgagattagtcatttcaatgtgtttcagagtttttttctgtctcaaatattgagaatctagttgaaaatttgtttgtgcagtgactaattgtctatatatattattttgtgaatttgtattgtattccttatttatttatgttttttttttttaatttgaattattaaaacgatatgttgttagagacaaatattctacatgtaaagctgacattattccatttcgcttcttatcaaggtaaagaagtaattttttattgtcaagagagactttctgctgcaacgaggcacgcagaatcggttgcagtgcttactcatgaacttggaaagaaatttcttgaggtttgtttaagttaagacaaatttgtaagtatgaaaatgattatcagtattagttacatgttatgtatgtaaacttacaaatgtgtaagtattttggttcattgtgtatatacaaactattacagtataaagttatctacatgaattacacgtacaatcaacgtgagtttgcatacatgttttaaaattaaccatacttgtcctttgcttttggtacttggtagttactaaatactaacatttcatgccctggaagccctatatgtttttgtttttagtagaacaccgttaatgtcaggtataatcttcttctgttatttccatcttttacttatttgtaaatctgtttatgccttaataattttgattaaacaacgaattgtagttctttcaataaaattgaaagaagacaaattgaagctacacattgaaaaagaagagatagattgtttaattttttttgacctcgctttctctatctagtacatgctctcctggcaatggagttcaatgaat

SEQ ID NO: 220276 - DNA, 2980 bp, Cannabis indica
gtttgctaccttgtgtaggtaaaggtaacgctaagctggaggagcagtgagttggggcttaacaaagattgtacatattgcggctgtgcaacctggagggtctcggtcatactacattttgaattacaatttgttgttgcctgttgtttgtaaaaaaacataataatatgtaactatatatgtatagaatatgtattttcagccgttgttttaaactcgagatcccaacctatgagttttataaatgtaacaagtttaaatttaaattagaaaattttcaaatacggacattacattggggctaatgcaaggctacaatatcactctataccatgatcaacaagatatccgagcagctattcatcttgcttttgataagcagatatgctagttcgaggaatggaggatcgagagatggagatcatgagagccctgtaagcggccattgacaaccgttctaggcaggccatcgtgctgatccaaagagcttattagatcaccgtccatcaaccagtgactgatactagtattctcatgggatctctaaatgggtcagaagagtatatagttgatcacactgcacaaactcacatcggtcaacctcccaatccgaggccacaggtttatactgtgggccaaatcgtagatgggcagatctaccagattgccctttgggaggaaatattcagcttaacacccataatcgaatggagatatcaggtcaaacacaaagacctcttagcacatcagtgtttgaccaattgggtaccgtgcacaacctcagaagtaatctgaatcataaaagaggactgggatagaaaaaaagttcctcctactatccatccaaataatgcaaacaactatgtccccagtacagttcatagagatcctaatgtgacacaggtcggtcaacaggcaggtcaagctgatccattagtgcaagcagaaatatatcagcttaagagcctcatacaaggcctggccggcccaaaactcatagatcttgaacttgatcgagcaagaggatcaccattctcactagaaattaatgctctcaaattactgcccaagtttagaatgccaacatggaagatgtatacatgcaaagaagatcctttgtctcaccttaaatactttgaaaagcaaatggacttgcaaggggtgaaaggaaatgtacagtgtagaatcttcccagctactttggtggaggctggccaacagtggtacttcaaattagctttgggaagttcagctcatggatttccttctcatctgagttccatgcaaagtttccctcttctcgttagcttccatctcatttagaagacttggtagaagtgaagcaaataccaggagaacctttaagagcatacatcagtaggttcatgactgaagtaataaaggtgaaaggattgaccaaagaaggaaggttggccacaatcctaggaggtattgtacccataggagaactatggaaagacataaaaagactgacagaatccatggcaaaattcttggatcgagcagatgcatttataaagttcaaagaagcagtccgacgtgtggatacagctagacaaaagaaaactcaataacacaccactacaaccaatacatccatctagctagactagaatttgaaaaatcaaatcaattcaaaccaaggtggaaagaggtcaaacaatggcaacatacagggtaacggaaaaaaagcaggttcagtggcaactctgaacaacattctcgggagaatgcctcaaagttcactacattcacaatcctaatagaagacatagaaataatcgatgtgatcgcccagtctatagtgccatatagaaaaccctctcccatgaagaaggacatgagccaataggacaccaccaagctctattattttcatgcagactacggtcacaatacatatgaatgcaacaatgtaaagcgagaaatagaattcctcattatgaaaaataacccgcacttacaaaaatatgtcaagaccaaccaagaacaaagggtcacccaaacagacaacacccaaaattagttaatgcctccactagtggacgaacatcttcaggttatcattggaggtctccaccttgctggagactcgggaaaagctagagaaaagtatgcctgagccttacaatatgaacaaatagatgtagttctggtcgtagaagaaagaaagcataaacaaccacgtgttggagaaccaatcataattttcagcgatgcagactccagccacgttatctatccgcacaatgaccctttggtcattgagtgcaaattgcaaataaaatggtggctcaaacaatagttgataatggaggttctacaaatattttgttcaaaacaacatatgaaaatggtgtttcaacttaaagatttagttccttgcactcacctagtctacagattctccagccaaagtcttgcaccacttgggcaaattcgcttaccactcacagtaggaaaagcttcgatgagcataatagtaatggcacagttcttagtgatcgacactccttctgctttaaatgtcatgttaggttggctaaccttatatgacttaagagtcatcacatcagtctttcacctatgcgttaaatttccaacaaagagtggaatgggttgtctaaagggaaattagagaactacacgggaatgctacaaccttgctctatgtaaggccaaaaaggagaatacctccagccaaattttagagaagggaagaacaatttcccaatagaaattcgcctaaggtggggacgaagatatggatccctaacttggggaaacaaacataaatgttaggccaatggaagaatagaagaagtagagattgatcttaccataccgaccaagaagctcaaaatcggcaagggttttttgctcaaaataaattagctttaataaaatttctaagagcaaatctcgacatttttgcttggtcacatgaggacatggtcgg

SEQ ID NO: 220277 - DNA, 2583 bp, Cannabis indica
aaaaaaaaaaaagtttgaaaactaataattcatccacactgttaagctaatttaatcttagagtaaagatcattttggcaaaatttgctgtaaaagtctttcaaattgcaataaaactctattcctttagaaatttgtgttacttgtttaagcatatcttaaagacaaacgggcccttagggattttgtaaatatttaataagtttgcgtcaatttataaaagatgctcagctttattgcatcggttagtaacggacttgagtattgtctgcgtcaattatcaatagacgaataaaacaaacattttttttaaaaaaattcacattcccgtcagtttacattttagcgtctaatatacaatcgacacaaattactaattgtttgcgtctgttagaaacctacgcaacaactcagccactattttttgcgtctgtcctcaatgttgaccgtcgtgttgaccgacgcaaattatgatttttgtagtagtggataccatttcattcgagacacaataactgaaggaaagatcaagctccagaatatttcaacacatgaaaacccctctgatatgcttaccaaaccacttcccacagcaaaatttaaacattgtttagacttactacaaattacagcttagtatgttggttttttgatttactttctgttatttgtaagtctgtaaaatttcagtttagagtctttattttgattctgtacattaggttcctaggtggagatttatgaaaggttgtttagttaccaaatgtacacgtgtcatgttagttaggctctagttcggtatgttaggtaagttagttattaactaactcctagctattcctaaggcatatatataaatgtctaactagtgctacaccaatgctgtaacattcatacacactcaattaaaaggcaatatacttttactgaagtttaatcttgagagtttgagagagatcaatgcaagactttgcataacaaacttgactttaaattttattccaatagtataataaattttcatttataatcaacataatcaacaataatggctcaaacaaaatgatgctttacaaataatattttagagtaataacacacaaaaataaaaaaattaaaaataaacaacgtatagtcatcaatatatttataatcttgaatagtttagaataatatttagttattatgctattaaaaaaacacttattttgtttttttttactatgtaacaattaatagcgacatgcaaaatctaataaagtcataccaattgaggatcttagcactacaactataggagtatggctcagtgcatgattgattcgaaatcatcaccaacgatcaaggccatatgaccttgtcctacataatcttcactaactcaattaatcggcgatgcggcaaagaaccaagtggtgatgaatccttagaacatcttttgattgtaagctcttgattaggtgtttataactgtaggaaattaagcactacccaatatgctctacaccaacaccgcaaagtcacaaaaaccaaggtcaaacttcacctttgcttcttgtgcggaccaagaagctttcccctcaaaaccctgccttttatggtagtataaaacctttcttttcagctgcaaaccctagcaacccattttcattacctcctctaaccctagccgaagcccccttctcttcttctccttccttcttgcttgaaaaccctagcagccgctcactacttctccttctcctctttcttcttgatgaaaaccttgcagctaaacaatactcaacctttcttctcttcttttatgcagcccgatcctagagcttccaaaaccaaacccactaatgccttttactcctctctcagcccttctattcttttccttgtagctctacaagagcttcctatggccgaacctacacatagaaataaacaaccagaaactagtaacaacaaagatctaaaatgatattctttgttggttataaagaaagaccaaaaaaaaaaaaaaacagcaagaaaaataaagggaagaacgcagtaatttgattttggagttcccctcaaaatcaagggtacatctccgtcaagcttccctcaaagatgcttaatgcttcactatccatgtcaaaatcgattacaaggtgttggagattcctagccacaaacttcaacaggtaatctcaagttttctctcttttcttcactctattaaatttcactagtaaatttcactttttcttatttttttacttatgcaattaggctctctccaccatatttttataaacaataaattttgcaagcagtatttttgaattcatcacctagtatttttttcctagaacaaaaaaaaaaaaataagactacaggaaaacaaaaaacttgaaacaaataggaatacttcaatacaacactttaaaaaaaatattgtaaaatttctcaaactcaaattcttaattttacaaatacatcaaataatataaatataaatattaattaaatatatatatataaatgttgtatttatagtgtacgatatatatgttgtatcactacaagagtatgtctgcattcttagag

SEQ ID NO: 220278 - DNA, 2010 bp, Cannabis indica
tcatatctggtaacaaaaatctgtgttaatagatttgatgaactgagtgttcaaggactttcttgacaaccttgtgattgtgttcattgatgatatcctggtttattctgagtcgaaggaagcacatgaacaacacctatgtatggtgctacaacatctccgagaacataagtcttacgctaagtttaagaaatttgaattctagtagtcccgagtaagtttcttaggacacatggtaagtaaagattagatttcggtggatccgcaaaaaatgaagcttttcgggatttaccacaacctaaaatagcaactgaggtcagaagtttctcagggttggttgggtaccataaaagatttgtagaaggttttgccaagatatctattcctttgacctagttgacctgaaaaattataagtttatgtggactgacaagtgtgaggacaacttttaggagttaaaagcaagattaattaccacaccagtgttgagtttgccaaccagttatgagaagtttatgatatactatgatgcctcaagatagggtttaggctgtgtgttaatgcaatctgggaaggtcattgtctatgcctataggcaattgaaggattatgagaagtgatatcctactcatgatatagaattgccagtagtggtttttactttaaaagtttggcgtcactacctgtatgctgagaaatgcaagattcatactgatcataagagtttaaaatacttcttcactcagaaggacttgaagatgaggtagttatggtgaatagagttagtcaaagattatgactatgaaatcctctaccatcccggcaaagaaaatatagtggttgatgcacttagccgaagaggaccaaggcaattgtatgacatgaagaagatccccccgaagctagcagaagacatacctagagaaaaacttgagttcgtggtcgggaagttgtccaatattatgttacaatctgacttgttggaaagaataaagattggccaacagagtgatccagagttaattgaacacaaaaagaaattcgaggcaagtactacaaaggatttctcggtttcaccaagtggattattgagatataaagataaggtttgtgttccaatagatgattaaattaggagggaaattctcgatgagttttacactactccatattcactatacccggggaaaacaaagatgtatcatgatgttaaagcattgaaaagtgacatagttgagtatgcttcaaaatgtttgacctgtcagcaagtaaaagttgaatatcagaggctagcaggtttactttagcctttgagagtaccgaatggaagagggaagatataactataaacttcgtggtaggtttacctaagaccataaggctaaatgattctataagagtaatagtggatagatttaccaagtcagcgcactttctgtctgtgcgtacaacctacactgtggatcaatatgctgatttatacatcagagaaatagtttgactcatggtgccccgaagtcgattatttcaaattgtgatcccaaatttacttctaagttttaggagagtttacagaaagcaatgggaaataagttgaaatttagaacaacctttcatcctcaaacaaatggtcagtctacaagaactactcagatactggaagacatgatacgagcatgtgtgatagattttgaaggttcctggaacaagtttctactttgattgagttctcgtacaataacagttatcagagtaccattggtatggcaccttacgagatgttgtatagaagaaaatgtcgatcacctattcaccgggatgaagccagtgacagaagatatcttgggcctaaagcggttcaaaggactagtgaatccatcaaaaatatttgatctcgtatgcttgcttcacaaagtagacaaaaaagctacgctgatccaaagcataaagatattgagtttcaagtgggagattctatatttctccgagtatctcctatgaaagagatac

SEQ ID NO: 220279 - DNA, 2305 bp, Cannabis indica
atgttttatatttttactgaatctgtcgactcacatatatacttttatatgtaggtaaatgtcagaattgaacagctatgagtattggagctcagtaatgattgattacataaaacactctatatctttcaatattaatatactatgaattatctattgtttcaatcaaattaatcattgatcctctatagatggtctacatcgagtatggtcaaaattacctttttacccttcaatatattttatcttttaaacacttagctattgtaaatgatattttagtaaactaacataattattgaaataagtagtccaccatttaatcccgtcaagccaagctaaaaaaaactataattttacttctaaataattatataaaagctatagatatccatgtctatgattaacgttcctactcaattaaactactgagttcccaaaatgtaactatgagctagactgacgggtaagctggtaacgaataaatcaaagaactctaataatacaattagcttaaagcttaattttctcaagattgaaatcaattgatctatgattaactaagtgatattaaactggaaaagatatcacggtaagtctaagatatattttctactatcaatatcggttcagtccgatgtaaaccctatacatccaatcccgatttactttgctaatgtattgggaaagacatttcacttataagcaagccctgtcgctaatttaatatatcagtgtaaatctagtgcactgataaatcatgagacttaaatagtttgaagcatataattacaattactttctactgtgttgacaagacactataattgtgaataactatatgttcaagatttatcaaaattttatatattaaacatataatcatgaaataaacatgtgaacaaagcaatagacaaaaataaaaaatgatctctaatattttattgatagtgaaataagattacatttaattgtagttttattaagggcataaaacccaacaaatttttaggtgaaatgggtccataatttatgtaccaaagatgaagattggtggacttaatgtaatatcccaaattagataataatatttaaattgggcgtattttattaaatatgtgattatccggataatgggataagattataattttacttaaacttatcgtgagttaattagtgacaatctggtaaatgaattagtgaagtgtaatttattaattacagaaattttatcgggttaagtgggtattgtaaatactatttttgaaataaaatgttttctggcccggcggtcgtagaaactcgacggagtggtcagagatgtcacgacacttaaaagataaattaaattggaattataccggactagtgtagaattttaagttttcggtttggcggattagttagaaattataaaaatacccctaagcctaaattaatttaagtaattaggaaaagggtaaattagtctttttcttatagatgggattttgtctttttgtatttgattatgaatttaaatattaggtttatattattagttatttagctaatagataaacttgctaattaagaaatcaatcaaaggaaaaccctatcttcatctccctctcccttcgaaccctaaggaccatctgacccaaggagttttcttcttcaaattgtccatttccagctggtttaacaagagttagaggctgtccaagctttgaggtaagctctctttgtgtttgtttaaggatttcttaagttttaagttagttttgagttagggttttaggattttgggactggggagttaaattgagtttagattatgtttataggtctaatttaggcttttcttgagcttagattaagtaattttagtggctatttgttttggagttagaaattttaggttaggagtacaatttttggttttaaaaatggtgaattgagtattatgatgaattgttgtgaattgatgattgagataccttgtttttatgttcttaaactgttctgcagtgtttgaacaggtttggaagagaattggttgggttttggagcaaaaactagtttcccttttccacagcagggaaaccggttaaccagtttcacaagcatagtgaaattggtcaaccagtttttccagcaaggggaaaactctagttttggcttcgaaaccgattttgtttggggtgtttttcagggcttagattggggtattttagtgatgtttgagttagttcagatcaatggggagttaggtttgtccggttataaaattagggtatgtttttgtgttgggtttatgccc

SEQ ID NO: 220280 - DNA, 2408 bp, Cannabis indica
  modified_base (2383)..(2383): a, c, t, g, unknown or other
atttttgccaccaaagagtgagggcgaacaactaatctccatccttgcttgcctagcatggccaaattgaagtcccgaaggtgtctaaaccccatgcctcctttatccttatgcgtacaaaggcggtcccatgagagccaatgtattcctttgccattcttatttgaggattgccaccaaaatttggtcattaccttttccatgtctctggtaatttccaaaggaagtaagaaaacgctcatggcgtagcttggtagagattgagcaactgtcttgattagcacttctttacccgctctggaaagaaactttgattcccatccttgaatacgtttacgaactctttctttgaggaaacccaacaccgccgacttgtttctgctcattgtactggggagaccgagatacaagcttttttcatcagcaatattcatcccaagttgattactaatgttatgttgtgtggccgaacccgtgtttgagctgaagaagatagaggactttgataagttgactttctgtcccgaggccgcttcgaacttactcaacacctcttgaattcttgttgcttccactgtagttgctttacaatagagataactatcgtctgcgaagagcatatgagtaattcttggagcaccattagccactttacaaccatgaatcaaacctctgctctcaaacttacgaaggatggccgagagtccctcagcgcaaagaataaacaggtaaggagacaatggatcgccttgacgaatccctcttgatggaagaataggacccatctcatggttaccatgaaccaccgtatagcgggctgaagaaacacatttcaacaataaccgaacccaccaatcaacaaagcccaattccgaagcatagcctccaaaaaaggccactcgatcctgtcataagccttgctcatatctaacttgagagccatgaatccctctttaccttttcgcttcctttttagataatgaaggacttcaaaggaaacaagaatgttatccgaaataagacgacccgggataaaagcgctttggttctcagtgatgatttcatccatgaaaggcttcatacgatttaccataactttagtaatgattttatacagcacattacataaagctattgggcgaagttgagtcatatctgaaggattctttgttttcgggataagcactatgttagcatcaccacaattctgttcaaaatccccagagcgaaagaagcttctgactgtctcaacaacatcactcccaactattgaccaacacttttggtaaaaagccggtgtcattccgtctggtccaggactcttatctgggtgcatttgaaacacggccttcttcacttcttcttccaaaatatgttgctgtagctcaatgttggcaaaagatgagacccgagtatcaacactatcaacgatttcctggcaggcactacccgaagcatgaaacaagccattaaaataattggtcacaacagtaggaagcccattgtcccaattcacccactccccattatcattcttcaatttctgaatttggttatgccgtttccgagacgaagccattttgtgaaaataactactattgtgatctccctctttcaaccacagttgcttcgcacgttgtttccaaaaagcctctctttgatccagaactcaaaaaaagattttttttcacctcactatatctctgcacagccacggggtccctcaaattctttagagcttttaattctttcttgcattttcgaattctgagtttgaaattcccagtaacttccttcccccattcgcccaaactaatagcacactgattgagtttttctgaaataagattagcagcccccaagttccaactgtttttgacaatttcatagcacataggttcctttaaccaggcattctcaaacttaaatttcttattcggatgaaacacttgcttaacctcagtttccaaccataatggacaatgatcagaagaagaaaattcaagattgaaaagagatgcaagagaaaaaacctgggtccaaagagaattcaccaaagcacggtctaggcggctctctatccaattatctgtacctctacccttctcccaagtgaacggatgcccaaccaaatccatgtcttccaacccgcagtcttccatagcttcacagaaaccatcaataagctgttgaggataccttcgaccgccccttttctcctcatgatgagcaatgttatttaaatccccaagaatgcaccacggaagagatgaatccctcgccaagaaacggagcagatcccaagtgtctttacgctgagcacgaacgggttcaccatagattcccgttaaacgccacctccctttctcagtcgactccaccncaaagtcaatgtggtttttggaaaa

SEQ ID NO: 220281 - DNA, 3593 bp, Cannabis indica
attacacacaaatccaattacattgtggctttccaaacgcacccttaagtgatttacatatttatatatattgcttatacagtacatccccataaaagagatatactgatatataatttatatctatttcggtataaagaaaaataaatctatttttccatatttatgtacgttataattatttaaggcatcctacaaaattttaagaaaattagaataatttacaatataaaaggcattgttcaaataatttatttcatacgtatgtaaaataaaatagtcatggtgcaatacatagtttgaaccctattttcggtatgttaatttttctaaatttctctaaatttcacaaaatatcttaaataactataacgtacataattatgaaaaataaaatttaacttaaaaaattatttcgaatactaaaataacatcctatttaaggggttataaaattgttcccaaattactcagctttgaatttaccaaaccaaagcaaaaaacactagtttttcttcaatggagaagctgttgtcaaccaaaagagagttgaaatttgtaccagaatgttacaaattaccacctgattgtagacctggtaacaccatagttcccatatgtgagttcattcctgtgattgatttcaaagaagaacaacccaaactcattcaacaaatcattcatgcttccaaacaatatggattcttccaggtatgatcatatataacatcataattttcttctaattaatatttgacttttctttaaaatatgtatgccctctttctaacgtaattttatgtcctcaaaaattctcttaaaatattaaaattgttagatttaaatttttttatccaattcagtttaattttactaacgtgacgattgttcatttaccaaatcgtgtctcctaataaattaatttttatcaatattaggcgttcgttagtaaaattaatggaagtccttgaatctaataactttaatagttcaaaaaaactttctaactgacagattcaaaaggcacacacgatcgatttagtacatagcgtaatttcagacatcatttttatgtaaatttttacaaaatttatgccaatttccaattatagttgattaatcatggtgttgaagagaagctattgaaagatgtattggatgtggctaaggaattttttgagttgcctggtgatgaggaaaaagaaaggttgtgttgtgatatgaatcatgtgaaattgaataatcgtaagctcttaacaagcattgattatatgaatgagtctctgcattattggagagatgctttgagactcccttctcttcctttagagtataacatccaattttggcctcaaaaaccaccaatatttcggtacgtacgtgtatctaactcgttacaaaaaatcttacttttactattgtaacaatattaaaaagtttatgacttgaaaatttattatcatgtctatgtatatattaaaagaacaaataagatttgtcccacttcataactaaaatttttgtagagttttatcccctgattattactaaattaaaaaaaaaacccttaaattataaaaattattacaaatatacatcttcaattatattcatttcattaaataatttgttgatatgtaacactaatatgatgccttatctaacataaattaaaagtttagacaaaaaataaatatataatagaaattttacgatgaattttgtgaatatataaatttttaaagttaataatgtttatatatttaatatcaataaattagatttaaaatcgcataaagttgttaaatagactattgtactacaattatatttatggtcacataagcaatatgtaattgaatgagaatatttgtagtaacttttaaagttgaggagaaatttttacaactaaagaaaatttaggagataaaactctacaaaaattataattccgggaaaaaatctcatttattattaaaaagtctagaaaataatgatatgtgcagccaaaatttgtactcaaacattacacacacagtttcatgattgttttttcaacaggctatatcattagttttatgatttgatgattttatttatagatactttatgtttttaagtttggattaatgattgtacaataattttcagagaggtgattggaagttactcagttgaggttaggaagctaagtatgcgtatcttggatttgattagtaaaggattaggacttgaaaatgggtacttctacaacaaatctgaactgtgtaatgttcatataattactttaaatcattatccaccatgcccagatccaagtttgacattaggattacctaaacatagtgatcctaatttgataactcttcttcttcaacaaatggatggtcttcaaatcttcaaagatcaacaatggtttgcacttaagcctttccctaatgcatttgttgtcaatgttggccacattttagaggtaaattaatacctaaccaaaaattacattctgctccttattttttttttaaaaaaagaaaaataaattacatttttcttaaaagttgtaaataaaatttgtattttcgatatatttttaaagttttttggtatttttgaaaattccctaatacctaatccttttttgtggtatttttcaagttttgaaagtggtaactaattggatttagcggtgaaaatttttatatctaattattaactactctatttatttatttatttttatgtaaattatttggttgtagattttgagcaatggaaaggtgaaaagtgttgaacacagagttgtgacaaacaaaaacaatggaagaacaacagttggaagcttcatttatccttgtccagattgtcaaattgagcctacaaaagctctcatcaatgagaataatccaccactctataaacagttcactttcaaagattttatggctacttatgtagctcacacttccaacagagaatctcctcttaagcactatcaactccaacctaattagattttagtgcatataatatgttgctatcattatatttgctagtttgattattctgttttgatggatttttcataattaataatattattatatatcatacttataatgcttctttttaagtttttattggactttcttctacggacttatgaatcttacatacgagtttttcatagttgctttctggaataatgactagtcttcaaaactaatataagtgtttccagcatgttttgtcctcactcgcacgtttattcggaaaatttcttaggaggtcactcattctaagattattctaggtcaaacacgtttaacttttgagttcttaagtgatgggctaccaaaaataatatgtactttgttgatataagtagtatattcgtgtagttttattgcacttactttctccacataatgtaggattacacaacttcattttttttttctacgaattacaaaactactgactgtcacaaacaatacttttttctctcttgaaattttctcattgagtatgctattgtaatcttaatgaggcgtgaaattcatagagttgattggtatttttaaatattatttaaa

SEQ ID NO: 220282 - DNA, 5993 bp, Cannabis indica
tgtgagattctttcaaatgtcacgttcgtctctgtggtctcttaaaggttgttcgttatacccacacttttcaagcccaaacgtgaggagggtgttttagagttagtctcacattgctaatgtgtggaaataaattgtgatatataagacttctcccatagccaattggttttgagatggaacccaattcatcttatcccaaaattctaacaaaatgttttacaaaacacttacctattaatccacaatgagaaggaggttgggcggacgcacattacggcgaggagcctgcacccggactcgggctcgaatcccaaattgggacccaaacccgaatttgagatccagacccaaacccggactcgggatcccaaacccaaactcgaaccctgaacttagaccctaaacccgaacccgacttggaatcagtgttagggtcgagtttattgaaaatacattataactttacacaatctattaatacaaatcaataccaaatataatattatattaaattatacaatacaataccaaatgtgctccttatttcacaaatattcttaatatttctttttttaaaaggaaaatgcaataccacatcatttcaagaataataccacgtcattttagcgggacccagtggaatttccagtaaagagagaagagaagtatacttctttttttattctgaccacaactttctcatattcccaaatctcacccctaaatttcccattattttcacaaccggtccctctcgtctctctcttcttcttcttccattaccaatttccagagcaaacccaaactcaacacagtcttcttcctctaacgctctctctctctttctctcctcaatcagggcttacaaagtcttcgttttcgcagggagaggaacagggttctgcgtttgagatccgagatcttaaagcagtgcctgcctcttcatttgatctcgtttcacattcatgtgttgagagttctctaatcttttacaacttcaaaaatgggtttattgttcagtcggatgttctcttcggtttttggcaataaagaagctcggatcctcgtcctcggtctcgacaatgccgggaaaaccaccattctttgtgagtattttgaattgtttattaatagtcttctagtggtttaatttcggtgaattgtagtcttgatgttgaatttatttttcagatcggctacagatgggggaagttgtctccaccattccaagttagtattctttccctgtgtttggatttgtttatgtgtaaattttgtggtaaagaacaattcgatatggaattggagaaagaacaattatctcatttatgtatgatagtgttaattatcctttgttgcagcaattggattcaatgttgagacagttcagtataacaacatcaaattccaagtctgggatctgggtatgccattatattccctgcattagttatgtcaaatgccaattcatgattttttgttttccttatgatatgaaattgctcaggacacacttattgtaagaactgaatttcaactaatggtattatcttgatggttaagtgtatatatatatatatatatatttcataggtccacattgttatcctttgtagctagtgttattcgcactatgtatgaaaaaatgagttggttgtctgatttgggttgttcacatattagtttcggttgcgatcgtcactttttatatagctcaacaggtgcactaggttgtaagttcttgtaactataggattaaagctatacacaaaacggtatattttataatctaccattgatactgcacttaaagtgtatataggatgttgacctatatgtagaattcaacttcaacctgggtttgagatgaattcacattaaagtcatatggtttgggttgaatttactttatacactcattcctaatcactagagatgtatttggatcaagtttgtggaacaatgattgcatgtgtttcttgttagaagtgaggatggttttgttaatgaccaagtttttgtgctgtttatcttattagtagatcttatcattttcttctagttagtttagaattttaaactgccacttttaatcaattcttcgtttcagcttttgttcttgaacgtagaacgtaagttctcttatctaatgatacttgtccttttctttatacaggtggacaaacaagtatcaggtatgtattattttttagtcaatttagtgtttttgattgtgatggggatgatgtgtaattgaacttaagcgctagctatgctatcaaaactgcatgattcacaatgttgtcaaataaaccattgggtatagaatatttctcagctaataattatgtaacacatttttatcgaattataatttgattcaaggtgtagttttatgcatgtacggtatttgaaatcaaaactttgactgatatctttaagcattcaatttatcaacgtgcaatagttgcatctgttaggaattgtgtacaaatagttttgagttgaaatatcacttctcatgtgccttggtcactagtagtagttgcaatatgtttgttttgaattttaaggtttgtttgttgaagtcctcatttttattactgtcttgtttattttgaacttgtgctctaatggctggactggattacagtggattactttgagttaaggttctaggcatacagttacagtgcctggcaaaaattggagtatttcatttattgtatgggattcctacatttagtagagatttgcaaatgagtggcatttgatatgcttttttctagaaggatgaattatctctaaaaattttcaaaatttggagagttgataattctaagtagaagtacaatttaacaatttatgattaccgagtcctttaaaaaggttgaatcatgtcttagatattgtcttttagcctcttaagaagttatgaacctaagggttaaagcattgtttctttctgtttagtttaagacgtcttatggtagctacactattccacttgtttacttctcaagctgtttactaaattgaagttacattattagttaacatgcgcacaagcttactgtcgcaggccatactggagatgctattttccaaatacccaagccataatctatgttgttgattctagtgacactgatagacttgtaatagctaaagaggagtttcatgcaatattggaggtaggctttccccaggtgttttcagttttagttttattatcttattctcctttgagagatgagtacattttgcataattctccatgaatgcatgcttgactcctcatttttttttcttcttctctgtattatttagttccatttaccgtttactttgtaatcttacatctctgaattctattgcaggaggaagaattgagaggcgcagttgttctcatttttgcaaacaagcaggttagtgctgttgcccatgtatatattttttttacccaagaggggtagctcaaatggtctgacatgcgttttgctcccacaagttttgagttcgagtccttcccgggtacctacatagaagtttttatagtttcttgatctccaaatattacagggttaagggtggaacctagtttaaaaaaaacaaacaatatatatttatatatgtatatattttttcttaggttgggggtcattgcatgtgaaagttgatttttgcattgcatatgatttaagtggcaagcatcctgtggttgatgatttgagtcctttgacggagttgttttacagtgaagtgttatatttatactatccttttcgcgtttacaggatcttcctggtgcactagatgatgctgcaatcacagaggctttggagctgcacaagattaagaaccgccaatggtcaatttttaaaacttctgccatcaaaggagaaggtctcttcgagggcttggactggtaagcttgacatttctctagataatactggtcttttgacattaacattatagctccacctctattttccaacgtacccatcattaaggtgcacttgactataacatctttcttggctagctgatgaagacagacacattgaatccaaccaaagcatgattaatagtttcaagtaattagtattagtgatacaaaatactaattcggagagcatgaacgatggagttatcaagtttcgtttatgacaaaaacatcagataacagtgttgattgggaaaatcaatttatccttttgcttacattatctttagaacttattaaaggttaccttttcagacatatcagtaacagcatcttcttacatcttaccgcttgccagaagagaaataatgccaattatgcttagcttttgatttctctttctaagcttgtattacattatttatgtttccgcattaaatcgaattcaaagactgacatatgtttctttatgaaggctgagcaatacactgaaatctggaggtggctaactcaattcggctcagagaagaactacaagattgttgctgtgtggccattcgcgaatctcagaaggctgacggtatttacttggtatgaaattctgatagaaaattcttgtttcaaatgtcattgtccattgacctccgatttttttttttctcttctaccattttggattagacaagctgatatacatgtaaaattttcattatagatcacttgtgtttgtcataaaacaaattcatctatgttagtttctcttttgtttgttttacgcttgtacgggatttccacctattctacttgagtggtttgaatccctgattccggagatggaaggtaggcttatttctggcttacttactgtcccctgtgctctgtgctgattagagacactgagtaattttagtaaattgccattaacattcttttatttgtgattatttttacatgtttggtaaatttaactacttttagactcactcataaatgatgatggtgaatttgaattagtggtgaatagcagaacttaaaactatgtttttttttttttttttcttgtgacactagttacatatgcaaggatgaagttagaaacaaatttcagtcaaaatgattttcaacttaggctctgaatagcttagaaactgtctccaattactacattgattggtatacgtgaaaattttatttaactttagactctgaatagcttagaaactgtctccaaattttaggcgatgtgagccactgtttgtagtgtatccaaatccatcatatgaacaagagaatttcctaggtattatattgacatattgagattactttattctattctctgtcttctatgggcatcttcttcattctagtccattcaatcatttattgggtaaatactggttacattttttatatctattcatgttagaaattatcttaaagttgattatattaaaaaatcaaattattaaaaattaaactcaaggtcttatttttattattttagaaaatataaggtttattttgtcatttaacaaaatagagggtccaattgataacttttataaaatacagtgtttaaattagtatttattcatcttttattccaaaggttcataaaagaaaggcaaaaaaaaacatgtcctttctttcttcccaacacataaataaggagttaggggcattggggtttttaaatatgaagtgtaaattgatttcttgtaaaattaaagcaagaagttatacacttatatgttttttatgtatatatatatgtaaaaatataacaattgaaacttcttttatatatatttatatatagatgataatgggatcataataagctgaataatcattccaccaaaaatatggtatatgaacaaaaaaaaaaatacaaattttacataggtattatttcacagacataaaaacaacaaaaaaaaaattacaaaaatacgatttaatggaattttaaacgtttttacaatttttttgattttatttgcagaaatacgttctttttatgttgtaattttgttaa

SEQ ID NO: 220283 - DNA, 1854 bp, Cannabis indica
caagttatttatttttctgcaaatatttttatattctgtctgttcagttttgtcactgcaaaactggtttctgcagtaacagaattactttctgcttctgcagacgcatacagttttgtattttcgtatatataattgacatttgcaaaaactcagtttttcatgtgtcatgggagaacctgcaaaaagactactcccattgctccacggaataatacgaatactgctaatcaacttttacaaaaaaaaaagaaggtggtcaatgtccagagcaaagctggccgattaatctgcaaggtagagtcgtgtgggcagataagctgagtactcatgtacaaaggcctactgcttagggaaggaaaaactgccctagtaattctgttaaccacagtggcagagtggatgaggttcaccccattccaaaagatagcccttcgggaacgtttaaatgcaaaagaatgagctacaagcgagaaggctaggcttcgcgaaaatgatcttagaaatcacattaatgatcagatccgtgggtatgagttctaggatgataatacaaagcatttggaagatcaaatagctacattgaccaagttcacaaagtgttttgctcgaaagcaaagtggagttgaatatgattccgaagaagaagatctaaaagcatgtgtaagaagaataatagaggcaccttgttggaaccatgtatttagacagtggacaccagtccctacatgtctaaatacatctgactgatgcaagtagcgaaggtaagtgatgatgcaaagtgcctctattttttgttaactttaccaaagtctgctgaaaactggtggaaaagattgtctcctggctcaatttgtaattaaaaagatttgcaaaccatgtttaaaaaataagttcatagtcgcgaaggattatgacatggaggccagttcattgaccaatataaaacaaaaaatcgggagagagtctcaagaagtatatccaaaggatgcagcagctaaaactaaggtctatgatgacatgaagttagtggccttaactttagggatatccatccgatccttattgtggggagaattgcaaagaaaaagatttgatactttttcatatttcttgtccagagttcaaggcttcataaatttggaagaggcttatggacatgcttatggagtacctccttcaccatcaacaacggtcagtagtttaactccggctccccaattttctactttgattattgctttcatacttatttgtttcttttatattttcttgcatttttttagaatcaaagtaactatttagtttcttaccatattaaattatatactcattagttacattcaacaatgtataattataaaaataaaaatttaataaacaagtaacccattagtattacgttagtttactaattaaaatatcaccattcgctatcaaaaatttaacattacaatattatatataataactaattagtttctacacaaattaaggttaccaaaatgtatcttaaataatattaagataccataatataattctaaaataattatttggttattattttagatatccaaaaattttactagctaataaattatatgatttattttactttattttaatgtgttagctttttcaataaaattaaaggtaacataaatgttgttacacaaaataacaaaacaataacgtaaaatatatatcttacaatataatataaactaataataaacatatagttttaaaagtaactactctaaaaattaaaagttatctatatgagatatttttgtttaaaatgaattattttatgaaaagtaactaattggtatcttatcgaaatcataa

SEQ ID NO: 220284 - DNA, 2985 bp, Cannabis indica
atctagttatttccagcccaaaaagaacttaagattccctaaatttcttagtttgaatcgggcatttaacccgattttcaatgcctccaactgttgtagatcattgctaacaataatgacatcatcaacatagaccaaaaagaatatgaagtgattggatgtattgctttataaacaatgagtgatcagtagctgagtgatgaaagccctcatcaaacaaggtagtggaaaactttgcaaaccactctctcaaagcttattttaaaccatacaatgacttctttagcttgcaaacagggttgtgtggaagctcccccttaggtttataaccttgaggaagagtcatgtacacatattctatgagatcaccatgcaaaaatgcattgtttacatccaacttatgtacataccagcctttaattgcagcaaaagcaataacacgtttgacagtcacaagcttagtaaatggtgcaaaagtattagcgtagtcaatcccctcctgttggttggaccctttagcaaccaaccgagccttgagtctctcaacactcccattagtattcagcttgattttgtatacacacatacaaccaataacatgctatccttcaggtaaagaaaccacaatccaagtatcattgttttcaagagcatctatcttagtatccatggcattatcccactcagggataccatgtgcttggctaaaaagttgaggctcaaacaaactcgaaatggccaagacagtagctctgaaagtaggtgacaacctatgataagacacaacctcagacaagggatatataaagagtaacagatttgccctgaaaagatggagtaaaagcattagcagccaagaaacaaagatagtcatttaagtatgatggcttatgagttgatcttcctgttctagtaacaacaaaaggaccagggacttgttcagactcaataacagcagcaggaacttggtcagtaggagttactggattagaaacctgttcaggtaaaataacatgggcaggatcctgcgctggtgtagaattatgtgcaaattcaggttcaggatagttaggggtataatgagaaaggacatgaacctgggagaaaaagttatcatatgctgtaggaagatgtttagaagtaacaaaaggaaagatatatatgttcatgaattgaacatctctgggatggaaaagcttgtttgtgttcaaggaagtaacttgtaggctttcattcctagtggataaccaagaaaaatgcaaggagcaactctaggggcaaacttagatcttgattgactcaaggtaaatacacaggcaagacagccaaatgcctttaaatgatcatatggatgttgtttggaatgaacaatggcacaaggtgatttatttttgagattacgtgtgggtgtcctattgattaaataggtagctgtagcaacacattctccccatagcataagggaatatgagattgaaacaagagagccctagcaacactgagaagatgttgatgcttcttttcaaccacagaattttgctgtggtctttggacacatgagtgatgatgcacaatccctagtttacaaaacaattcattaaattgcagttccttagcattatcagatctaaatcctttaataactttgccaaactgagtttgaacaagttgaataaactgggaaaatgatagattgggcatcaaatttctatttgatgagattgatcaaggtatacctaaaacaatcatcaacaattgcgatgaaatatttatagccctaagttgtcaaagtactgtagggaccccagatgtcaacatgaataagatcaaaacaattcttggaaatattacgattagaaatgaatggtaacttcctttctttagcatagtgacagattgagcaatggaataaagaattggaattagaatgaaaactcaaatctttatttaatgggtgaatttttacacaagaaggatgtccatccataccacaatgtgtgcaattgtacttggatcgaaaaggctgtacaacaccaacaaattgtccagtagagttgttggatgaattttcagcatcactagacacacctgatccaacaaatccaaatgttaggttcctttgtctttcttcttgatcgactgaagcataggctttgttaatagtgggaagaggatctctcattagaatctaagatctgacattgctgaaagaattatttaatccaactagaaactcaagaagtcgatcctcttcttgatattcaagtataaccttcataacaccacaactagaaacaggttgtggtttatattcacgaatcttatcccatgagacttcaatcaagtcaaataggtagtaacattgcttgatccttgtgtgagattctgcataatctttttagcttcaaaaattcttggagcattttctcattaaacctttcatgtagttcagaccaaatttcagccgcattatcgaggtacataatgctatcagcaatgtctccaaaaattgcatgaagtatccattatattacagtagtattacacctgcaccaagcatcataatgatcgtgttcctcatctggctgaggaaacttgtcattagcaaactttatttgtttcgcgcaacaagagcaatcatcatagaccttctccaagtactgtaattctcactctctgtcagaatcttaggtactagtatcgcaactggattatcaccattggagaggaagaaaggatttgaaagatcatttgcagtcttagatcgtgaattttcaccaagaacagagtattgattcgattcattcgatttgttaacagtatcgcgagtgtttcgagtttgagctccaccactgcgcgccataggaagaaaaccagaaaatcaacagaacaaagagaagaaagatgatgaagaagaccacacaacaatagtggctctgatactatatgagcaatccaacgcgagagaaaacagaggaagaagaa

SEQ ID NO: 220285 - DNA, 2265 bp, Cannabis indica
tgttaagggaatcggttatggttgttagagttagttagattagctgtcacattctgttatttctgtttgatcttaactaactctcttccatgctttgtatcatgtgtatatattctgtacttgattcccagtataatcaacaagacacttctttgtcttcttcatcttttctctatcttttctctctctgttctttgttgctctgtttcttttacttcttttggttatgcttctcttcattctgcaacaatgtcaaggagatacaagtctcctaacatggtatcagagctagagtttccaccattaatggcgaatatggcaacctctggtcctggatcgaatgtaaattgtggaaatctgatcaatgcctcaaatcgaaatcaaaacagagcatcagatgagaacgctcctgttcattttaatcactcgatttccattaaacttaacgatcataacttccttctttggaaacaataggtcttggcagccatacgaggaaatcgattgacgaaattcattcaagattcagctcctcctccacagttcctgaatgatacagacaaagccaatgacaactacaatcctgccttcactgacttggaggtgcaagatcaactcctagtctcatggcttctatcgtcaatgactgaaagtctcttaactcggatggtaggatgcaactccgctcgtcagatctggagcgccttggagaagtattttgctccgcgagtctcatcaaagatactggagtttcgaacgaagcttcaaaatcttcgcaaaggatcgatgtcgctgaatgagtatctgctgaaagtcaaacaaacagtcgatcttcttgccagtgtaggagagaaacttgatgatcgtgatcatatctctgcaatcttcaaaggtcttccaagtgaatatgacacattcataatttcctccaacaccagaatagagggatatactgtcgcagaaatcgaagctttgcttctatcgtctgaatcaagaattgagaaaattgatcttgaacaagaaatgagtgctaatctggtcaagactgatgttgaattctctcttgaacaagaaccgagtcttgaagcctattatgctcagttcaatcgaaatatgaagcctcttgtgccaaatcgaagcttctcacagccattttttaattctcctagaagtggatatactgctggaactcccaggggaactggttttccatcatatcagcaaggttctaactctcgtggaggagcttctatgggcagaggaactataggattcaatgtcagctctgtcacagacttggccacagtgccatagactgcttttatcgatttgataaaagcttcacaggtgccaataccaatattcaacaacaacctcaggctaacttggctcaaaattcagctgctgcacctacagatctaaactggtacccagattctggtgcaacaaatcattgcactcctgatgtgcaaaatctgatgcatagagctgattacaatggccaagagaatctctttgtgggcgacggcacaggtttgtccatctctcatattggtaattcttcaattcttactagttctaatcactctttagtccttaacaacttgcttcatgtcccaaaaatcacaaaaaacctgcttagtgtatccaagtttgctaaggataacaaagtgttctttgaatttcaccctgatttctgtcttgttaaggaccaggtaactcgaaccgttctcctgactggtgttcacaggaatggcctgtattcttttgaccatattcagctccagccctctcccgattcaaacacaacttctgttcctgatcaaccagacagcaatcagtgttgttcttttcaagccaatgtcctgagttctgaatgttctaattgtaataaacctagcaattcattgtactctttatggcacaataggctaggtcatcctagtgaaaaagttgttagacaagttcttcaatcttgtaatatttctgtcaataataaagaacaattctctatttgctctgcttgctgtcttggtaagattcacaaactcccctttccaaaattttccatgacagaatacaataaacctctgcaacttgtagttacagatctatggggtccttcccacactacatctctcaatggatacaagtattatatcctttttctagacgcctacactaggttcacttggctttatttactcaaaaacaagtctgatgcactaaagacttttcagctcttcaaagctgaagctgaacttc

SEQ ID NO: 220286 - DNA, 14391 bp, Cannabis indica
caaactcaactttttctttttttattttgcttgctaaaaaactatttgttttaaaatattcttttaccgatagaacaatcccaaccctgatataaaaatgagagatttttttaattagatatatgtaaaaataatttcaaacaataactaataattaacgatcaattctacagctgcctattgattgggttgggcctcagttaacatgtgggccgaagcccaaactattgggtcgtattgattgggtttccctctctttcatcatcttcttgtaaggattctaatctgatttgtgaatattgggtgttcgaaccattcacatctcttctctcttctctcttcttcaatcctcaattcctcatcttcttcgtcctcgatttcgtttcgctggtagatttcggtttcaactcttcttcttctcctctctctccatttcgctggtagatttcggcccggtatctcttatctctttcctatggtataattgtggttggagatttgttcttttgtaaaatgggttttatgcactcaaggtttatttttacttttctaagcaaatgttggtgttccaactatgaaaactatgggagctgttccttctgggcaaatgttgccttggattaaagttgtctaatttaatttttcacttttttttttcttttgttttgttatcaattgttcaaattcttgatatcttatctctgtcaattaacgttattatatttaattgctaaagagtggagtagtagtcattgataattttcatttggaaaattttatttttggagatacataatcagctgggagatgctatggatttcatggagcctaagaagaagatagtatttgtgactgtgggaacaacttgttttgatgctcttgtcaaaacaatggacactctagtagttaaagaagagctatttagaagagggtatacccaccttctcattcaaatgggccgtggctcttatgtccccactaaggtatcactgctagctacattattctgacttaattaaggtaatggaggaaatccttcataaaatcacaaaggaaaattaactaggaagtgtgtaaacatattaataccataatccttagaaatcataacttattgaatgagaattccactcatactaacaagattatgtttatggagataaagtatgtatggaaaatcagttatcgtttcactgctagtatactcacaacttatctgcaaactgcatcttttatattcttaaactgttgctagaacactcaacttcaatctatatatttttgtgtaaaggtttctgattttataatgcagagtggaggaaatgggtcactagctgtagactactttactttttcatcaagcattgcagatcatttgaggtctgcatcacttgtgataagtcatgcaggtatgttcctaattgcttctcccttttccttaacaatgtaacactttaaggatatggtttcagggggtttattccctttcttccatacaagcataatgtactatttaactaatcagtttgtcattttatgggtcagtttttggctgttagtaacaagaataatccaagcaaaacaaagataaaagcattttgttttgaggttaagacataattgtattcttacaacattactagtaattagtacttatggtgtgtagttgtttattatgtgtactactgttcttatgatttgacttatcaattctgctgcgtgatctttcattttcggtttgtatccttttccttccgttacagtagataatttaacaatgttattttaagtttaaattctaaaagtgttccacatgctctgttttgttgaatcaacgatttgttgtcacttgcttaaaagtattattattgataatacgtgtgattctacttgcaatgttctagggtcaggaagcatattcgagacattgcgtctcggcaaacccttaattgttgtggtgaatgaggacttaatggacaatcatcaaaccgaattagccgaagaactagcaaataggaagcatttatactatgctcgccctcaaacactaaatcagataatcaaagacatgaacttggatttacttgtcccttaccattcaggtgatgccactcctgtagcaaagctagtcaacaggtttctaggatttcctgatgattgttgacaagaactaataaagtttcattacttcaatccactcataactacatcatccttgagaactaactaacaagcatttgttatgctcttttcgggtgttcatatttcattttctttctaaatcaaataacttacttgtttggtattattttttgtattggcttgatttgtttcctcatcacccttttgatctccgacttgcattggggtttggtgatgtcttgctgcataaaaatggtgcctgggattggcacaacccaatgcaaatccacacccacaacgaggcttccacgtggcaccctctaagtggctatttgccgctggagaagcacagagatcgagaacagctccagtgttgcgaaacaatccatacttgtcaattgtcatcaagttctattatcactcactttactgtaaaaatcatctttacgcctttgattctctatacccattgattgaatgaattcatcaacaactgctatgtaaattatgagtttactataacaccaaaatgataataatccaagcacaatagtttaaatttgattcaatctaatttgtaaaagtacggattgtattggttattttggattagttactttttaatattaaattatttaatatttataagaaaatttatttttttttcatataattaataacaaaataaaataagttattgttattttatgtcttcaataacaaattaaaataaagaaaataataaataataaattcaaaggaagaaaaaaaattgtatttataaaaaaaatgtttaattttgctttaaattatatgtaaaaaaaattatatattaaaaaaagaatatacatttcatctatttagttttaaaatataattatattatatgtattaaacttttaaattattattttttcttacattaaaatgttaattgtatatataatatttttaattttttttataaatatgtgcagattggattgggttggattgaatcgtgcgaattaaattgaatcggttattttatgaacacccctagatacatctatttaactaattgagcttgtttgtcttattaaaccattttccaatcatcccgaatattattaataactattatttagggggtgtgcataaatcatcaaatctaataataaccgaccgatccaattacaatcgactgtcaaacattggatatccaatagtgatcggatcggattagatgctatttttgaatatttaattggattagatcggatgttggatgaggtgtccaaaaatctaatatatccaatcgaactaattagtgtttttatttagtttggatgagtaattatattttatattgttatacctaaaatatatatgtatatataaaaattaacattaaaattttacgtttttttttttctcagggactggatggatccaatccaatgcaatacatattggatctaaaatattgaattgatccgatccgatccaaaaaatactaagtcttaaatattgaattaacttaaactaaatcaataaatatacatataaaatacatctaacggatagaacagatccaatacaacatccaatgaatgttgaatcgaatggatgattgagatggtaaaatctaacatccaatatataattggatcaaatctagattcgcctacaaatattagatgtggtcaaataaacatccctactaataacaatattattttcaaaaaccaagattgattaagcttttagtcaaaataaataggtttctaaaagtatttgaattcattcattctaaagccactgtaataaccagccacgtggcatcactagtggtccttttggttttttaattacctgttttattattattattctttaataatataataaacatgtttaactggtctaacacctgataattaatattaataccctcctcctgcattactgcttatttatcatcatatcattacttctctcatactttttttttgtttgtttggtatgtcttaaacagaaagtgacaacactaaaaaagtaaactattcttcaaaacagtgagtgacttaatcaaaatcattaataataatatgattcttgtttagtaaaattaaaatggaaagaataaagtacttgtgacttgttgtgaggattttatttttatctactatacctctcattactattggtttaatactatgatattccttactttcaaccacattatttaatattattatcttttaataaatttttaacagaaaatggttaagtaaagagatctcacacttcctttttagaaaaaaaaaataaataataaataattaaaaaattagctaccacaattaaaaagaaaattccaatactttgagtgttgtaatcattaatatcagaataatggaatttgtgttgtttttcctttttttgtaaggcactaaacaagtaggtaagtaattttaatagaaaaaaaaaaattacaaaaaaaaaaatgatatacaataataacaaaatgagagttttttttggtagcaataataagatgagatttttttttttttttttttttacaataataaaaaatgatattttttatttttgaaaataaaaagatgagatttgagctaccaaaaaaatgataaaatctgattaaccacgtggctatttataaaatgtattatattgatacgtatgtcttttaatttattaaaaaattagaataaaatattctttattatctaaaatattattgttaccattaaaataaattattttatctattatgttaatgggattgtaaaaaatcccacttgtatctaaataatttcaatctagacttcatatcataacactaatttttttttttttgagtaaagcaaagtaataaataatgatctaactaaaatgtacattaaacaaaaaaaactaataaataatgatctaactaaaatcaaacataaaacaaacagttgaaatttcaaccgtcagatcttaatctaactccttgaaccaacggttatccttctctctctctctctttctttctttctttcacaattggcacaacccaagagagagaaaaagaagagagagaaagaagaagaagaagaggaggaggagagagaaggaccaagaaaagaacctcctttttcattgtgggagaagagggagttggttcggttcctgggaatctgatcaaaccatcttctccttccttcattttcttgttcttcagttagtaaaggaaagatatagaaggcaatttccccacaaaaacccagaaagaaaaatctgatttttctgatttgggttttggtttttgattaggagttttaattttttagataaagttttgattttgggtggtgggtggttttggttttggttttggttttgggttttggtttggtttgagttcttttggaaatgatggacatggatagcattgaatgtgtatcatcttcagatggtcttgatgaggatgagatccatccacaccatactaccctgcaccctcatcctcatccccatacccatcctcatcaacatcatcctgagttttcttcctcaaaatcccgtaacaatggcactaacaattcctctattactggtccaaacgccattgcaccagccaccagcgtccacgagttgctagagtgcccggtctgtaccaattcaatgtacccaccaattcatcaggttttatattctttcccactctttctctgggcaaaaagtctattacttttcactctatgatttggctctcataggtttttgattatgggtaatttttcaattccaatatggatgagtttaggttggttttgagtggatttgcaaaattgggttttttcagtgattttatgacttgtacacatttgaggcttgttgtgttctttgacaatttatcttcttcagttgccttttgtggaactgggtttattttaagttaaaaggttttaaggaattttttgttgcgtggttggtttatggtcaattactgattgtgttcatgtgatttatgggtgagcattgtttgattagtcacagatctataatgggtctaaagtgaatcaaagatatgatattaacaatgctgatgtaagggtaatgcttctcttgtcaaaaacttacattcttctgtgtgatcatagccacgtgatcacttttgtattgacttgatttaaatcttattttgaattctagttctatcctaggttaccaaattttatgtggacttatctgttgtgtttttatatgaacttaattttttgtgtttttgctcaaagttggcattatggatcgactaaagcttgaccattatattgcccccaagaaacttaaactgtatcaggagcctctattggttgttggcctctacttctgttggtacagattttgttttttgtattcaaatatccgatccctttgttcgcaaccttttcgattagagtgaggttgttgtaaattgcatatagatttgatttcaagtctgaacactggactattgtatgtgctggttttataataattgtgtaatatactgtcaccattctaagatagtgacttgtttttgcagtgccacaacggacatacattgtgttctacctgtaaaacaagggtgcataaccgatgtcctacatgtagacaagaacttggagatattaggtgtttagccctcgagaaagtggccgagtcacttgaattgccctgcaaatattataaccttggatgccccgaaatatttccctactacagcaaacttaaacatgagtctgtgtgcaatttcagaccgtataattgcccttatgctggctcagagtgtgccaatgttggggatattcctttcctagttgcccatctgagagatgatcacaaagttgacatgcatacaggttgcacattcaaccatcggtatgtcaagtcaaatccccgagaagtagagaatgccacttggatgctcacagtaagtctgatattgcatttagatccttgattggatactttgcagggtggctatattaaagtgtgatgtgtctagtcttgatgttgaattgttgatccatggtattcatcagttttgatatgtgtttggataataatgatttcgggctcactgaagctgtctgtagaacagaaacagatttctctacatattaataaaaactgaaatctgtgttcaactattctttctgaaccaccttcagttttccatttgaattttttatccagttttcaatgcaaggttgtgctttctgccaaatatcttataccaaatccaaatcccatgttagttacatccttgatggtgattagttgttttctccttccattgctttgtaatcaaattcagctttatgcatgctcatacacttgcacatactacttgactgtcaacataggtaacatctttagtttaagtttttgcttttcaatagtcatatgttagttttctcaaacggttgctgtagaaagctctgcattcagttgatactcgctctgtgattgtttgtggcttattgaagttaaggctggatccatgagcgataagctgagtcgtaggtgttcgttataatccttaattggttgtctttcctattattcctttgtcaggttttcaactgtttcggacaatacttttgccttcattttgaagccttccagcttggaatggcccctgtgtacatggcatttctacggttcatgggtgacgagaatgaagctcgaaactacagctatagcctagaggttggagcaaatggcaggaaacttatatgggagggtaccccacgaagtattcgtgatagccaccggaaggtgagagatagccatgacggtctaattatccagcgaaatatggctcttttcttttcaggcggcgataggaaggagcttaagttaagagttactggcagaatatggaaggaacaacagaatccagatggagtgtgcataccaaacttatgtagctgagatgatatgatttttgaaggcatttttacagtttgtgtgataaggacactgctgtgtgtgttctatacctctgttcctagtttttttctggattgtagcaaaagaaccaaactgttgaggcttggaagtctaatgattattaataaattgtataataagcaggctttctttcttcaattaacctaacaactaacatacttctcattgaagggtacatctcacaacttctcgagttgagacttttctttcttaaaaatggtgtcttttttatgaagtgccaattttaggtgtcatgctttgtcatatagcagccttgacaaggtataggtaattaagatggcaatttcttcagcagaataataataatattaagtgcttgaaaaaacatcaagattcaagaacacttgttttttactttacaaagtcaattcatgctagaattaagtcaaaatcgaaccttgtgaatccttcaaggtataaggtacaaataacatcaagaatcaaactttattttttaggaggaaacatatattgattgtaacacaaaacattctcgggtgcttcacagctcgagttcaataccagagagagaaacctgtccagtctcattgactcttaaagttaacccaaaaagactcactaatattcatcattccaaaaaatttatacttactcgttcttgaataaagaagagatgacatcaagttcatgcttcatatttcaacacaaggatgaacatttagacccaacaaattaacagccagtaatatgatcgacaagctgtagacttggcttctgtgtccactgtatcacctttcttctcctgagtctgaagtagaatctgaagaagagtctgaagtagaatctgaagaagaagcttctttggctacttcggtgctctctttatgatcagcctgagtttctccatttgctatggaagcctcagttgtatctccattggcctctgaagattccaactcagattctttatttccaaacaacttagatggaagtaaagaggacacggcagctctcgcacttttctttgctgcttcagctgcttctgcttccttagcctttgcttcagctttttgcctttccttctcttccataagcttagctaagtcatcctctctcccttcctttctgagctcccctttcacgaattcctgcaactcctcgctaaattcaactccatcatcatccagcattgtatcaaccacattaagcacctcatccaatttccctgactcactcaatgccttcattataaactcatagcttggaatatccatcttgagtttcttcaccatcagatcaaaaaacgattttgcttcatcaaccttccacaccttaaccaacccatcaaccaacttaccataaacggctaaattgggcctcaacttggaatcaaccatcttcctgaaatactcagctgcatcatcaggcctgttctccttaaaacaagtatccatcaacagagcaaatgtaaactcatctgggttcactcccttttctcccatttctccataaagctcctcagcttcagtcaacataccattattacacaactgctcgagcaaaacattgaaggataaggtatccggaaaacatctataatcacccatcttcctaaagacctcaatggcatccttatacctcccctccaagcaataaccttctgccataacattaaagcttcccaaattcactgccagacgccttggaggattatgctcctcgatcattctatcaaataacttcaaggcctcatcgaatttaccattcttgctcaaagaatccaatacagaattataagctgcagcattcatcttcacttttgaattgaccccaacagcctcttcataacactccatggcctccttctccattcccctcatgaaatatcctttcatcaagctcccatacacaatcccatcttctaaaactcctcccaacttctccttcaattcctcatataacttaaaaaccccatccacatccgagttcctaacacaacccaccatcaaatggttataaacaatgggatcaggctcgaaacctttgacatccatttcctctttcaactccaaagcccgctccaacctgttattatccaccaaccctttgatcagaatccgataagtagtaggggaagggttgaaaggcgcatcatttatcaactgcttgtaatgctccatggcagtatcaggcttccggcaatccaaataagtctggaaaatcaaattatgggttatgatattcggggcaacaccggcctgggttatgaaccggtgaagggaaagaaggtcagcgtacttggactgacgtaagagagcattgagaacagagttgacagtaaaaatggtgggacgacagttggaataaattgagtggcgagtgtatagagcagcttcctcgagatcattttggcgaataagagtgagaattttattatgtagattgaggcgattaccagtgagtacagaaacgtgttctgggagtttaggggcattggggttttgggttttttgtggctgagtttgctgttgctgctgttgttgttgggagcgtcgaagagaggagagaggtggttcgatacggaggcggcgcttcctgcgacggcgctcagctgcagcttcttccggggtggcgaaggagaggaatcgaacggagagaaatgagggctgggggtaaaggcggtggtggggtttagctagggttttgaggtgggttaagaatgtgggtttggacagagccattttgggattgaatttgaaaatgggaatttagaagaagaagaaaaaggaattgtgttttagggtttggatttgaatgtgtatagattgagagtgagattgaaggattgggttgtagtagagttagggtagaaagagatagggttctaagagggtttaccaaaaatggccattgacgcagaagaagagagactacagagatagaaagaagagagagaggaagttggtttggtttgggtattcctttgcccaattaacaaaatgggccgcaagattgggcttccacctgggcctttaactatcttataatgaccaggcattttttcacattttatatttaagaaattgattatgataactcataagagcattcctatttttgcttagtattagtaggaggtgacattttatgattgtaattggttagtaatattctataaaaattattatataggactcgatacttaattacacaaatagcgataccttttagcgtatttttaatttctaaactgttagcaatactcattctgtttttaatcgaggttaatgttgttgtcctttgaagtggttacaattgttggtagcaataaagaaagccaccactttatgggttcttacatttcaaagtcactggagaaatacagttgtgaccgtgttacttgagaatttcgttattggtggctaaatgtggctatacaaacaatatatcattatatattcttatatattggctcgattttatgctatttgagagcttattttatttagttggctattttggtaaatttttgggttattttttctgaaaaaaataatggaaatatggtgcgataggcacttgattcttagataaaggaaggccaaggccttcaaagtctgagcactaacactaagaaaaacatgacaccaaaaaactaagaaaaaaaaaaatacaaagaaacttaaacatttgcaaaaactagaacaagtccacattaaccatcatttggggtccaattatagtcctccaacaaatacgttgttaaacatagtcttccaactatgtttaaatctcccattaatcccttcttactagcccactttaggacgttgtgcgctatctaattgcacctccttgaaatatgaatgagatcctagcaggtaagagagctacataagcacagaaaattgcttcttgcagcaatgaggttgctaggaattgtcctccaatcggaagctttgaatcctgtagcgactctaatattatcagtttggaaaagcacttgataccatcctaaatcagatgcaaactttgctgctaggaccaatgcaagagcttttctcaattgtggattagtcactttggaagtcataacttaacaaccaccacatcccttttatgatctctaataacgacgacaaggatggagccattatgagaaatagatatatctgtgttgaagtaacaccatcctaacggtggaggtctccaagccatttttcttcaaagtagcatcaaaatcttaatcattgggaggtctgatcaccatgggttctcttatttctctccctccaaaccatctccacaatacaaagggtaatgaccatgaattcctcaaaaaaagtctcccaaggtctgttaaaatacacttaaaactaggttttcctttccttccagttatcaaaactaatcgaatttgatctcacaaaccagaaagctttagcaaaatggcattgccaaaacaaatgcattgtggtctccattgccatattgcataaggggcacaaacaagattagatacagataaaagaggctagtttacctcaagttaagaaaccaccataagaattttagacgaggttgtacctgcaagtgccaaaggatcttccaaacaaggttatcgatcaagttattttcaccctatataatcagtttacatgttgatttaatagagaatgcactgttagcctcctcagtccacatctagttgtccttagtatcacgctcaggcaagtcaatattaaaaatggtagctcatcttctcttgtgaaccactctaaaaccatagggaccttccactgcttgctcccgttgatgaattgtccagcccatgcaacagcattagttgcactttttaagggagttggaaaattattctcagaaggaacccaaagatcaaactacatgaaagtatttagcccattgccaatcttcctacacaaaccttaagagagaagggagcttgagcgaaggattgctttgcacatattagaatctccactcttcaaaattaatgtcaaggaagtttcttctattgatgtattttacatttactaaattactccccagacttttattatccgtaagggccttccaagcccatttcaatataaagcctttgttgaatatctccacacttcgaaagccaaaccctcaatggagcttagatcggtaaagggagctccaagacattgtattaatagtcttcttttcctccgtgtcattccaccaaaagtcccatatacaattatccacttttgttgatactgattttggtgtaatatctgaggcaaccatgtaagaagcaagataggattcaatagattgcattaggcaagcccttccagctttggacagtagcttaaatttccaactttgaacccatttaaggactcgagttactagtaattgcatatctttagttctctagagagatctaaaaagagggaggcctaaatatactgcatcttttttcattctttttatattgagaatctctgaaacgactaaggctttattattggcagacccttagagaagaagaatgtggatttcttgaaattaactgcttggcccgacaacaaaccatactactctggacatctcaggaaccctttaaccttgaggcatttctaaataggataacatcatctacaaacatgaggtgggtgatttgagggccatttcttttgattttgaatccgctaatataaccctcctccattcaacaggtaatcgacctagagagtatgttagctgctaggatgaaaagagttggagagagagggtctccttgtcttagtctgcaagatggttgaatatctcattgaattaagctattgatgagcaaacccattttcttaacctcgacacattgctgaacccatgtaaggaaagggtcagtgaatcctaatcccgtcgaaaacctcaatgataaagtcccaatccatcttatcatatgctctctccatgtctagctttatcattacaaagcctttttttccttttttcttgctcatagaatggacaatttcccttataacaacaatgttcttaacaatgagataatccttgacgaaggcgtttggcatggcaagataatggagggaaggaggggcttcaatcaaagagtagtgatctttgaaatacatttgtaggcaacgttgcatatagagatgggtctataataggagtgtatatcgatctgtttggtcgggttatagtgatttttatcaactcaatataaatgtcggg

SEQ ID NO: 220287 - DNA, 2937 bp, Cannabis indica
acggggcaggttgaagatattggaacatgcttagtgacaaggttcacacaagttgggagagtacctgtgatagctcgccacaaaaaaattcagaactttaggaggtatcttcaagtgccagaatctatgccaaaaaccagaattatttggtcttggagtgactggtttttggctctgcaacaggttgtatgcacttttaacactgaaaattccatttggttcagctgtccaagaccaacagtcgggtctagaagaggagctgagaggaatattgagaattagatcagcttcttggggagaaaaaaggtcatatatgacttcagcatcccaactttgtgaatttgtggcaaaaagagagctaacagtatgtattcgaagcccaggatgaggagaagttacatatctgttgctatttaatggtaaccaaggagtacccaatattgtagtacttttaccatcaccaataacacgagccaccccaagccgaaccaagtccttagcaccccaaatgctacgccacacaaaacttgggttatttccaagatcagatgagatgaaatcagtatgtggaaaatacctcgctttgtagactctaccggcaagagagtcaggcttgcacagtaaacgccatccttgtttagcgagcattgcaagattaaaatcatggagatgcctgaatcccattccgccttcttctttaggagttgataatcgatcccacgacatccagataatgcctcgacctttactagaatttgtcctccaccagaaatttgccattagtttttctatctcgttgcaagtaccaattggaataaggaaaacactcatggcgtatgttggcaaagattgaacaacagttttgagtagaatttcttttccagcgcgagagaggaacttactatcccaactattgatgcgagcaatgactttatttttgatgaaaccaagcaccgcattcttatttctgcctataatgtttgggagccctagataaaggctgccttcaagagcttcaggcatatgaagtgtatcacagaccagattacgaatggtggtatcggtattaggactgaagaagatcgaagactttgtatagttaattttctgcccagatgcattttcgaagatgtgtaggagattgaatatactgttcgcagcttccttagtagcttgacaaaacaaataactgtcatccgcaaaaaacatgtgagttatggaaggtgctcgttgagcaacacggcatccttggatgagtctatttgcttcaaatttctggatgagagcagaaagcccttcggcacatatgataaacagataagtagacagcggatctccctggcgaatgcctctggatggggatatagaatctatcatgtgaccattatgaacaacagtgtattgaaccgtggatacacatcccataataagatcaatccatttactagcaaagcccatacgtgacataactgctctgagaaatctccattcaacccgatcgtaagctttgctcatatcaagcttaagagccatgaagccttttttacctcttcgcttcctcttcagatagtgcatgacttcaaaggctaccatgacattgtcagagatgaggcgtccaggaataaatgcactttgagtttccgagataacaacatcaatcagatccctcattcgattcgccaagactttcgagatgactttatagaggacattacacaaagctatcggcctaagatcacccataacagcaacatttttcttctttggaatcaacacaagattagtggcattaagactctctggcataaggtcagtatcaaagtattctttcacagttttaataacatcagggccaacaatgtcccaatggtgttgaaagaaaccaggtcccataccgtctggcccgggagctttatcggggtgcatagagaacactgcttgcttgatttcttcatcttgtatgggctgtaggagagcttcattatgtgtggcgctgacagatactttaatattatcaatgacttgggcagaaaagttatctgtagagtgataaagttcttcaaagtactgctttataactgaatgtagcccagtgttccagctttgccaaacgccattgttgtcttggagttgctgaatactgtttgatctcttacgagcactagccgtagcatgaaaatatttattattcttgtcacccgagtgtaaccaatactgcttggacctttgtttccaatagagttcctgctgtgcaaggatttcaaaataattgttcttttccacagtaaagttttcagcatcaaaattcagagtagagtttttatatttggccaatagtttcttacttttctgcaaacgggtcttaaagtttccagtgagatgacgaccccaggcagccaattgaactccacatagctcaatttttcttgttatacaatcagcttggttcgagctccagacatcagccactatttgcttgcaaaaaggttccctatgccaagcattctcatatcgaaaatgggcataataatttgtagcagtagccaattcagggagtaaaaaaattggtgaatgatcagaagatgagaattcaaggttattaagagatacctcattataaaaatccaaccaactttgtgtaaccatagccctgtcgaggcgaatttcaacagcacgtgaagagcctctgcttcgttcccaggtgaacgggtagcctctgagatctaagtcgatgagattgcagtcacggacggcggagttaaaaccagtaatcaaagaggagggatatggccggcctcctttcttgtcttcattactcaaaatgttgttaaaatcacctatgatgcaccaaggtaaagttgattcagctgccaagtctcgaagtagagtccaggtccgatgcctgagatttcggtttggctccccatacaatcctga

SEQ ID NO: 220288 - DNA, 3362 bp, Cannabis indica
ctccattgggcccttatacccacagaattaggtcaagtgtgatgattccgaagctgtgtaggtatgggacaatgtataacactattgtctaaaaacttatttccctttacggatcacgggagtactgactgtcacaataggcacctatatatttaatgtttagaatctcacacttttaaaattcaaaacaccctacactacacatccatcgctattatcatcaaattgggtgtaaatagacttaacttagtaattttgaggttatgtgacttgttacaaagcatcgcaaacattaaaaaacgttcatgcacaaagctgaaaaacaaaacagtaattggttactaattaccaaaatttttagcttttctcaattaccttccaaagcattttaaatcactctcacttaattttatatcacttatatttataaagagtaatttgcggcataaatacctaagtttaactcccagttgtaaataaatacttaaatttaatttttggcagtaataatacctaagttataaatttgaaatttttgtaggtacctgactattaagtattaagtaaattgccccgtggcgatttctgattggtccaagtcatataattttcatttttttaaaaaagataatttaaatatactaataagaaaatgacatgtagataatgacttaatatttaacagtcaggtaccctacagagttttaaaaatataatttaggtattattacccctaaaaattaaatttaggtatttatttataaatgggagttaaacttaaatatttataccataaattactctattgtgtaaataataaaaataaatctcaaacaactgtttttcattagagcttttcaaaaaaattaagctacttatgtaatctttctttacacactaaattagtaaaaatgtaaaaatcactaaatataagtaactccactttaactcaaatgttgcaaataattattttgtttcataaaattttaaactatattattatatcatctgataaataaataatatacaaagtatagtatggactgctttttgacttcggtagtctcaaatcatcaaatctttgattataattccaaaaataataataatgttaaaaatctaatgtaaatatatttatatattaacaacaacaacaacaagaacaacaaacagttttgaaagaataaacaataatatatatgttgaaaaaaatctagttgccactatatctatatgttttaagctttggaattagggtttcgagaataatagtgtacatttcccataaggccaaacatgtcttaatttgaacaaagattacatgtatgcacactcatatatggtagtcccaatatcaatatgtttaagctttgaaattagggttttgagaataatagtacctctaaatagtgctaagtatcattagtaactaattaactaattatataatttgcttaacaaagcttgatttgttagtaatattaatgcaattaagtattgagtcctaaataaaattattaaataacttttaatgaatatcgctaacaaatagctttagaaatgaaaaaatgctaaaaagcaccagtagtgtttagtactcttctatatatcaatagctattagttagtctaattaagtatcggatctcatagagtttaatataataacttttagagagtattgctagccaatcggaatgcgacatgtcaagagttgctaggcaccactgatacttaataataatgctcttagaaattctccaaaacaaaataccttttgtcatctactttggaaaaatgagctatttttaattttgatttatattccatttaatttatgagacatgctaaaaagtattattggttcttagcactttcctcggtcatacggttattgctataattaaatattatcgagttttatatatataacttaagaaaataacttttaaaatatcattaactaatcataaagcattacttatagaaaatattgagcattaataatatccaataacaatgctcataatttatgtctcaatcttagtaatgtcggctaattgattctatattattcaatattattccttgaaattaattattattattattattataataactaagtgtgtagaaagataccctttgcattataataactaactaataataaaaactaaaaaataaattaaaagaaaagattgcactagaaaagctcaagtcgctatattattggtatcttccaagaattgaaataatataatatagagatcaatatcgctatcatggtagttactatatacttttatatgtatataaatatatttatatatatacatattcttttatagattcaaagaacctatgtattgagatgggaaataaaataattaattatcaaaataaataaataaaaacaatgtaatctctatttattgttatttaaaatatttgctaaaatatgaaagagaaatttgatattatatactaaaaattaatttatccattaaaaatatgctagcatattttgcatcatacaaaatatacttacaccatttttctcatctaattttacccttaaataaataaaaaccaaacatccatctctctctctcatatctctatgctctctctctaggatactcacacacacacactctaccagtcagacgacccatcaccggagctagtgttattcggctgccttatatttcaaaaaaatttctttcgttttttgtgttttttcttctgatttaccagtttttttgagatattttgtgatatttagcgatgtacttgcaatgatagaacaaatctaaggtcagggatgaaatttagtgatgatttgcgatatttagcgatgatattcgcgatgtgtttcacgatattgtgaatttgagacatttagagatgttttcacgatttgcaatatttcgcgacatcgtcaaaagccagaaaaaaatgcagaaaacaagtattgttgtgaatcggagacatttagagatgtttcatgatttcgcaatgtttcgcgatatcgtcaaaaactgaaaaaaatacagaaaacaagcgctagatggatcaaaaactaaaaaaatgtggtggtcgtgggttgtcttgggtgcttctcgtgggtcgtcatgggtcttgtcggtcgtgggtcgtcttggtcgtggcttgtgggtagtcttggtcctgggcgaaggaatttggtcgtgggtcgtcttggtcggtcggagctcgtgaacagtcggggctgggaataacaaagagggggggggggggggggaagttagacagagagagtgggagatgagaatttttgaattgtaagggtaattttgggttttagggtgtttggagaat

SEQ ID NO: 220289 - DNA, 1429 bp, Cannabis indica
ttagtaatttactttttcaaatctcttcaaaaactttaaagaaaatgagaaaataataaaattaataaaagatacgaagtaacattaaaatgaacggaaaagaaaaaataaaaaaaaaataaaagaaaacattaattaaaatgaatattagaacagaaaaaatggaaaatattttatttgtgtattgaattaaattaaacttacaataggagaacctgcaatataggcagaacaaaggacttgaaccaagaaacctaaaccaatgaactaactaactgaatatctaacataacaaactttaataggccccttcaagatagagtgtaaaaaattttgatacaatttcattgaagtgagttggaaataggagtttggttaatatatcggctaagttggttttagaagggacatggttcattttgatgctaccattggtgactttttctctaacaatgtggcaatcaatttccacatgttttgttctttcgtggtgcattggattttctgcattgtgtatagcagctgaattgtcactatagatagttgattatagcaggggttggatgttaaagtctttgatgatgttgtggagccaagtaagttcacaggtttcattggccatggccctgtactctacctcagctgatgatcaagacaccgtgggttgtttctttgatttctaggagattagagattggccaaaaaagacgcaatatgctgacattgatctttgagtgtcgaggcaggctccctaatcaggatcagcaaaagcctaaaagtgaggggtagagcaggttgcatagaaaaaagtccttggccaggggtgcttttgagatagtgtaagattcgtgttgcagcattcatgtgaggttctcttggagattgaaggaattggctgagtttgttgactgcaaagctgatgtcaggtcttgtgatggtgtgatagagaagtttaccaattaaggttctatactgagttggattcggcaaaagctggccattattattgctgaattttatgtgaggttccatagctgttgatgcaggtttagattcgaggcagcctgattcttttaatagtttgagagtgaatggtcgttgagtgactgatatgcctttggggcatcgagcaattggaagcccaaggaagaaatggaggctgccaagatctttgagtttgaactgtgcatcaaaagttgagatgaaattatttaatgttgtagtgttgtaggtagcaactattatatcatcaacataaatgagaatatcaaggaaatttttggattgttgtctaatgaacaaggaatggtcattgtgggtctgtgtgaaaccttgttgcatttgtaaaccagtctagaggcttgtttcatgccatataggcttttctttaatttgcatacatcatcttttgggatcgctccttttggag

SEQ ID NO: 220290 - DNA, 1070 bp, Cannabis indica
tgatcaattaacttactcttgttcgcaataccattcatatgaacaagttcaatttttaggacattgacgaggggacattttgtctatttgagacagactagcggtaactttcaaatttttattgcaatagatcaaacaaaactattccacagaaaaaattataaatgactttaatgtttattttttcagacaaagtttgagttttcaaatgacaatcctatgttcatggactgtggtcttaaatcattgtcaaaagggctacgtggttggagagcagacatgaaaaaagacatgtaaggagaatattgaaaaatatggaaaggacatcacgttcagatgtggtcataccaaaggtgtgggtagaagttattgcgtattggaaagacccaaaacaacaagaataaaatgaaagttgtaaaattacaggcaagagtcgaacaaaatgcaaaaataggagcccaaatgaagattcaaggtggatgggggtctaagaccatagtcgacgacatcgtcagtcgggtaattattatcgcctaaaaattaatattttttgaataatatatttctaatttttttatgtaaaaaaatgctaatcctgagaaatgagaacttctcagtgttgtggatactttctaaaaatttaactacacaagaacaacaaatggcgcgatgaacacacacacaataattgcatgtaagtaattttatatctttaagaaactcattctatatttaatttctattcaactctaaaaatttgttcaatttttgtaggccaaaatagttgagattcgtgaaattcaactagtgtcgaccaatgtccccctacaatacaatgtcgaccccacccagtttcccgcagacatgcatgttatgacacaggtgatgggtgagagctcacgtcacttgaggggactggacgagttgtcgagacatagggctagggccaagagggcaactcccagagcaggtccctctgaccaaccactactacaaaattcattattcacgtcagtttttaagtgtcacttaaagaatttacgtcgatttataaactgacgtatataccg

SEQ ID NO: 220291 - DNA, 2037 bp, Cannabis indica
ccacgaacacgaagccgcaagctttgttgacacagaacccctgaatacgaagctttgttgaacgccatccacctacacataaaagagagagagagaggtgacagtagttcaaatcttgaccatgggacttcgaatggagatctcgaatctgcatcgcatgagtagacaagtcaaagagacaccaaaacagagagaaatcgagttgcgcacaaagtaacctttaggatctccgtcattggtctacaccttgacagacacgtcaaagttcaccatccgtcgttggtttggctggactcaacaaagagagaatgaagaaagagagaggaagaaagacgatgagagaaagagctcaagggtggggaagggggttcggggttactggggctgagaaatcttgtttattggtccttttggaccaccgacgaccgaagatggtcgttccccacctgagtcgatgccgcacaagagaaacgaagagagagagagagagaagagagagaaggtagatgtatgtgtttttggtttagggcttttttcttttggtttgtatgagagagataattttaaaataaataaataaatgagagagaaataataaatggctgattgttttcatttaaaaaaaaaacagaatatgtccatcatagttggacgtagtccaccaaaaataataatttaattatattcttaacatataatgtccttactctttttctagttcaacattaatggacatgatatatatttttctctagtccatcattgttggacttgaaatctcttcaaaaaaatttcatgtccaacactatttttgttggaatagaaaaagagacatagaaagggtaatttgtagtagtgatagtaccattgaccataatatcagtctatactcagtactctagttgtagcaatgtgatagtatcaatcagtactttgtcaaacatataattgttgatattcaatgtatttctatgtacactaacattgctattaatcatatgttttctaacaatcattcataaacatgcacactaaacatgtaattcatatatgcatatcattatactaatcttacctcaatttcgaattcaggtgtgccagtcaacttgagtgcaactgctgctcgacggtttacaggcccctaagtcacaatattcataaaactgataagtgacacactaaataacttttttgggggacttaaaatcaaactaaaagtttccttatcgatggatagcttggtaaaacccaagtatctgaaacacacaaaaatctagggttctaaaactgttaaaaccagtttatatggttttgcctagggaacgatttactggttctacagggctacctgaatcgggtaactggctccctgcaagaaaccctaaaaattacaccaacaaatcagttttaccccaaattgtttcaaaccttccacaatacctaaacaagtcacaatgaacataattcaagcaacaaaaatagatataagcctcaaaaatcaattgaaccattaaagagctaagtttgagctttaaaagctcaatcttggttaaaacctgctaaagctcataaaaccacaataaaataactcaaaaaaccttaatagaacacaaacaactcaattctaaccaacccaagagccaacagaagctagaactttaatttgcatgttgaaacctaactttttcttgaaaaacaaaagggagaggagtaaaaacttaccttgagctgattctaacccttagctactagaaattctactgaaatccctaactcttgatcagaaaatagtagagaaaatacttggtctttcttggtgttcttgtgaccgaaccaaagagagagaaaggacaagagtttgtttgatttttgtgagtttttattttgttttccaagtgttatcgacaagataactctcttttctttagcataaaattaaaataaaagattagtaataatccactaatcacaagagacaaactagggtaaatgacaaatctaccctaacttaaacataaagtaactaaaatgtacaaa

SEQ ID NO: 220292 - DNA, 5163 bp, Cannabis indica
aaggtgttgtagtcctaactccttaatattcatcggatgtgatattcgagttagagtgtatgcctttataaatctatctgcctattgtgttctaagaatccggtggtaaaaacacttgttttgctaaagattggtttttctctgaaaaaaacataagagattgatgtttttataaaatttcatacaagtcctgtggctatgttcaaatagtttttattgtatgagtatgacttgtactagttgtctgattcatttttgtttatagcttaattcacaaggtaaaggcatgggattgtaataatatgaattgtcctctctacaatttaatgtagtaattatgagcatagtcaagaggggtttattgagatggatgctgaaataccagtaacaagaagaaataatatatcagtagtgagagtgtctttctcgatataaatgtgaatctcgatccttttagtgcataaacctataaatcctcattaccttgaaggaaacagaagtttagaaggatggtaggaagactgacggttactaggtttcatatgttttttctggttgtgtgtaattaggagactaagcttagttctgagtcagtagaggttttgtttcgttaatagcaggttctccctggattttatgttaccatggttttcctccactccaccataagtgttgattctcaataaacttgggaggcagtcagtcctagacatttcagctgtctccttttcaaaagaaaaaaaaaaagactcacaagttctgaaaaaatatatgatatacattgattcaagtttcataacaattcttcttctgatcattaaacttatcagatattcaaaaccgtggccaaagtctataggttggtttctgaccttatatctctttcaagacaaagataaaacattatatctcaccttagctaccaggctggtatatatgctattatgaggtgacttggtcatacatttatgtaatgggatactttactgaggctctagatgtacatctttattgtcaaaaaaagaaaaaagtcaagttgaatttctcttgtccttagtgaagcttgaattagttattatctcatgctaacaatgttgtacaaagtaaactgttactgtatttgtgactcttgagggaaacaattcccagtaattcaaaccaaattttggtgataatgttgaattttgttgatgcaattgattgatataattttcctgaaagtattaaagtggatgaaaagttttttacatttacagtgttttaatcatttttctcctcatgttttgtttgtttctgttaaggaagaaatgaaaatcataagtcaagagtggataaaagtagaagaaattactgaaggaataagatctgttggccaagcataagatctgacaaggaatacattcatgatggctatctcacaagacacagttatggctatcaagtcttaccaaaatcatgcaggactttttgttaaaagctatttacttgctgatccctttcttccatacacttctgttcttgttggcatatttttctgcaaattggtatattattagctttctctattcttcttatttcttttttatttgggacttttatgaaaattgggtgcttcccttttgcattcacggccagctgcttagttattttataccaactcattataaactacaggtttatgatctaactcagtacctcagtgcgtactacttcaagaactatgctagtcttacaaaaattcaacaaattgagtggaacaatcggtgattttctcttccttcattccagatgtcaataaataagatttcttacttttttagtcattacaacattggttgctaagttagaatttgattttggcagaggtatatccagtgttcatgcggttttcatcacagttatgtcgctgcacttcgtgttcttgtctgatcttttctctgatcaacgactagctggatttattacatttcgaagctcacccctctctacttttacattaggggtaagtttaatttctttttgtattaatgttgctgtaggttactcagctttagtttatatttgcaagaatttgttacttctagtttagataaccttgccgcaaatggcgaatcaaatattgacatgttactttttatgactgattgattgagtggactattgttttgattttgtactattttatccaatcttttaacaaggaagagtttcttgactatagaagctaactagcacaggaactttttgactccattctatacagctctccatgttacgtattgtaatacttccataattaattatgcttgggattaagtaaaccttttgtgtaatttgatggacattaaatttgttcaactaattttcgaaagtgctaaaattttaccaccacgtatatgagagtgatctacgttttcactacagtcaacaaccagtgaactccaacagaacattcagcccacccaattggtgaggatgagtgtccatgataaccaccagaaaaaatgcatgtgtatggtgtctaagtgagagtaaggaactgcatatgtgtgaaacattatatcttctgcatttatcttttgtattgctatattactagttatattgtactaagacatgtgtactgaagttggaatgtcttacttttcttttttcccccccttaattaggtctgctcttaaatgtttaagctttccaattcttcattgatgaaataagaatctaagtatcttttaccattggttattgaccattgcaaaaatctaggaggcataaaaagggtcaggatgttcatgtcactatcaatcctctcatttcaacatagtgcatgtggaatacacaggtagtttggcagtggcaccgcgtgaagtccatgaaaaacttattaactctaaaaatatacatatataggaggaaagtctttaattacatagggggaagttaggacatataatcataatggatgtgaaaagaaatgcaagaaaaagaatacaatcaatattaaatctggaaaatgacctttgatcagggattaaactatgtataacttttttttatttatttatttttttagttttatgtatctcagctgtaatctgggatcatattccttttcgtagtcttccttaacttaaagaacttaagttctcatttgatgattcttctttatgaactaaaatcatttatgcatgttttacaggtctctgttggatacttcattgctgatcttacaatgatattatggctgtacccttcattaggtggaatggagtatgtaagtatccttactgcagctcactaatgaaagccaaaaacttatattaggcatcaatttacatgaccatgtcttctataaaatgcttgatcatttgtaagtggaatatctttggtttattacttacacaagacaaatcacatcttatgttgtaatattgtttcttgtaatgtaatttgtcattgggtactctgacaatttgctttcctggttaacttccttaaggtagacaaacagcagagctatcatggcatacttaagaacactcaatcacacacacccttgccacccaaataatatgtataaatatatcttttatatatatgaagaaaaaatcaattccacacggtcatctcataaatgattgaacttaaacataagccaggatacacacttgcttaataaggtaattatcactttcaggttctccatcactcactttctggaattgcagtggcatattccatgttttctggagaagggcaactttatacattcatgatcctcatctctgagattaccactccagaaattaatataagatggtaggtctaccatctatgagtttgagtgagattgttatgctagttttggacttcgtgattatgatacaacttttggatttcatgaaggtatctcgatactggtggtatgaagaggtcaattgtatatctcataaatggtgtggtgatatttttcttgtggctggtgagtttgaaatttcttggactgtatctaccatagcatcttttgaatttcaatatgaagagaaaaacaacttgctgactgaacttacgaaatgcaggttgcaagaatagtactgtttggctatgtttttgaccacatttacttgcattacagtcaggtataatgctatcatttaaattttctttcagtgacctcaaagactgcagcatcttatttattttttccactgaggtctttctaatttgatctttataaaaaaaaatgaaccatcagatttggcatatactatacttttgcttccctaatctattcctcttggccagcataagaatgagttgtcaacttcattattggacatctgttttcaagttgtcaactttttcgtagtataatttccaaacaaagtttaatattttgtcaattttaaactcaaaagtaggatatatcttattggaactttaaataagatacacccatttgatacttcagttagatagttgtgcaattacaagttttgtggaaaaagtagtttattttaatggttttatagaatgacagatttttttttttttgttttgtttgcttttgcaggttgtccaaatgcacatatttggatatctgttggtgatggtggtgccttcagttctagctataatgaacttaatgtggtttggaaagatccttaaggggctgaaaaagcaattagctaaaaggcaatgatggtgaacaacataaagcccgcacagttcttacatgcctaactttatggtttattcttttatattctttactgtaaaaaaaaaaggataaggggttaagggaaatacatgcttaaacgaactactcatgaccatgttggtggagaaatcaacttctgtaaatgattcaacttgcacacaatatctacttttaatgtttagttcatatgtattctcggtaaggttactttctttttttggcagaagttatgctcttcaattttacccgtggaagaaattttcaaccatcacttttttttattgcctgttcagttccaatgcaatgagagggtgtttttattttaataactagcaaatagcatttcgagagtactttcaaactgttattattattattattattataattgttaattaagcaatatttggtttaatttataaggaagttatatttacacccca

SEQ ID NO: 220293 - DNA, 1231 bp, Cannabis indica
ctcatattctgtcttgttttgcattttatttgcatctgctgtcaaatgattactcgcaccactatcggcataccacgagtcatcgttgatcatttcgggtgtagcaacaagggcagagaattgcttgtcctgacctcctgtagtgttgggttgatttcccatgtagctttcatcatatctgttataacagatcgcagctgagtgtccatacttgccacacacttggcaagttggtttaggcccattacttcttcctcgatcccttcctctttgaccacctcctcttgtgtatccagtatactgttgttgttgacccctgccttgattctgatttgaaccaaatcttctatggcctgctgtgttggatgacccactcgacccaggtttttgtgcaaaatttgctgaagcatttcccaccagtttgctaccagcaaagatggtattaagtctctcgagcctaccatcaaagctaagtagcatactctgtaattgttgccaagatgtactctcctgggatttgattaagacaacaatagacaagtattctacatctaaaccagataaaacattagaaacaagatgtctctctggatagggttcacctgcaagtgctaaggaatcagcccacatcctcttcatcttcaagtattctgccatggactgagaccccttgcgcgtggtctggatcttggttcgcaaatcatccatatttgcccgagagtgtgcaccatataattcttcaagagcattccaaagaggaagggctgactggcaccccatgacttcagatgcgattgcttctgtcattgatccatataaccagcccattaagagctggtcatgaaccaaccatgtttcatattctgggttgatgtccattctagatccaggaacattagcgactggctctcctgtgcgaatgaactcaggcggcggcggacgagtcccatttataaacccgtccaacctatgtcctcttatgatggtattcaccatcgtcttccacagaggaaaattattacggtcaagcttcaaggagaagggttggctaagagtgttgctgaaaggagttgagattggagaagggtttgaggaagaaggtgtaagggtcatggttgaagctgcaccagtattttggccagcaggagtctgaccgccttgattggttgcacttgcctgatcttgtggagtcgacattgcgttggcaaatttggctctgataccaagtcaa

SEQ ID NO: 220294 - DNA, 5277 bp, Cannabis indica
ttttgtagttggtttctttttcaataatacttattactgaaattatcaaaaataatatgtaaataagaatttgcatttattatgtactgtaattatatgtttttttttttatcaagtgttattgtcaatcttttaatcaatctccgtgtttgaaaattcatgctggaatattatttttaatttttttgaaatttttttttatggcggtattcgttatgcttactgtaagtttttgaaaattttcaaatagcttacagtactaaaaatacatttgaagtattttgaatacatgtagtaaactgaaatatcaagaattctattttaggcattgtaaattattcgatttattaaaaaatttacagaaatgatactgtatgtaactataacgaatactgctatgaaaaaaatttgaaaaaaaaaatattcggacatatgatttcaagcgtggaggttgactaaaaggttgtaatagaaaattataataggcaatcttcttaaactaaacgtatattgagtttttggatttggcgatgaacttgaaaggtcacttgcaggtgctttacatccaatcatcctgaataatgtttgtatcgtcagtattattgctgctgctggtacagagttagcagacccttattccccaaataccatcattacttctctaagaacaaaagtttacaacccataggccttctacctccacacaatattatttcgtcaggcttttgccctacgaaaaaatttcccgaagttgtctcttataagagtttgggctgtgttttagtcccagtgtggttgatcattcttttgtacaaactattgattattagtgatgtaaacacgggctgaactttttgatacaacacgaaatcggcacgatcccagaatgcacaagtacgattaggcacaaaaaatgacagccttgggcacgacacaacacgaaaaatatgtctttaagtacgacacgatatgagaagcacgaaaggcacgacacgtaatcacgaatagactagctcaaaaagtacgacacgtgacaagcttaaaaagcacgaacgacatattaaaaaaccttataatttattattattaaaaataataagatataaatttatcaattataaataaattataataataaaacttaaatataatacttaatattataattattctataattaaaactattaaaatatataaaaaaaataaaagtatatattaatttatttataaagtgtaatataaaatttaaatatttataaataaatatttaaattctattgatgttaataattatttttatatgattatatgtaagatattgttcaaaaagttatataaatataactaaagctttaatttaataattgtaaaaaaaaaatatttgaaaaagtaaatcactaatttaagcatgaatatgaaaatagactgccttgtttaagaaatacggatcgacataagcaaagcacgatacgaatccgagcacgacacgaaaatactgggcctatagaccatgccaggcctaccgtttaaaaatattatcacgatatggcacatcctatatttttctgtagcacgacacgatacgaatagtttttttgaaaagcacaaataaatacagatcgggccagcacgattagtacgaacttacaatactactcattttctatttggtaagctattacctcaccaactagctaatcaaaaataggtgagtaaacctatgataataatgaaagaaagtatgttaaaaatgtaatgatgaatttattacgatactaatgtaattaatttagataattgatattataccacattattgggctttccccggcccagctttaaatagcccagcccatgccttaatgacgtaggctgaggttgcaatggcttgtcttctatctctctccttactaaaaccccacaaaacccaaaaccctaataacctacacagttaaaccctagaaaatctctgctcacaacaatccttctacagaaagctcagtcatggccgccgtcgaggttcgctccgagaagaagaagaagaagaaagatgaggcacaagacacgccctttaaaccagtcgacggtgaattggctcagaaggacaccgatttcatgatcaaaccacagagctacactcccaccatcgacacatctcagtggccaatccttctcaagaactacgatcgtctcaatgtacgaaccggacactacactcctcttccctccggttactccccgctcaaacgcccactcgccgagtacataaggtacggtattatgaaccttgataaaccctctaacccatcttctcacgaggtcgtggcttggattaagcggatccttcgtgtggagaaaacgggtcacagtggtaccttggatcccaaggtcaccggaaaccttattgtctgtattgacagagccacaaggcttgtcaagtctcagcaaggtgccgggaaagagtatgtttgtattgctaggttgcattctgcggtgtccgatgtcgcgaaagtggctcgggcactggaaaccctttctggggctgtgtttcagagaccacccctgatttctgctgtgaaaagacagcttaggattaggactatttatgaaagtaagttacttgagtttgatgcagagaagcatttggttgttttttggatttcttgtgaggctggaacttatgttaggactctttgtgttcatttgggtctgattcttggtgttggagcacatatgcaggagcttaggagagttaggtctgggattcttggtgagaaagataacatggttactatgcatgatgttatggatgctcaatgggcttatgataattatagagatgagagttacttgaggagggtgattatgccacttgaagtgattttgactagttacaagagattggtggtgaaggattctgctgtaaatgccatttgttatggtgctaagttgatgattcctgggttgttgaggtttgagaatgaaattgaggctggtgaggaagttgttcttatgacaactaaaggagaagcgattgctttggggattgctgagatgactactgctgttatggctacttgtgatcatggtgtggtggctaggattaagagggttgtgatggatcgcgatacttatccgagaaagtggggtcttggtccgagagcatcgatgaagaagaagttgattgctgatgggaaactcgataagcatgggaagcctaatgataatacacctcaagaatgggctaggaatttgattttacctactggcggggattcgatggtggcaggccttgcagcagctccaagtgaacccaccactgttgcggagaagcagacttcttcagtagttggtgaagagaaaaagaagaaaaagaagaataaggataaggataatgaagatgatggcggactcaagagaaaatttgatgcagtggcggacgaagtttctgagggcaaagagagtagtaagaagaagaagaagaagaaggataaagagaatgggcatgtggatgacggtgaggtcaaggaggaagctgcctcacccgaaaccgaaaagtctgagaaaaagaaaaagaagaagaagaacaaagaagctgaggaggatgctattgctgctgctcaatctcccaaagtcactggcgatgatgacaaagttgatagcgaggctgataagagtgaaaagaaaaagaagaagaaaaagaagaataaagaagaagcagaagaataaagatgcggaagaatgttagtttaaagtattagtatgttctgtttttgttgtacctttagttttgttttcttctgtaatgaatttttgcatatttatctattaagcagttttttggtggacttgttttccaaatccagtattgctatttccaattggttatctaatatgtttccattaatcgttttaaaattcaaatttggtcgtcattgtcatcatccaggtatgaaaattctcatgtacaaaactatggcgtaccaccatctttcacaagcaccaatgccctggagcatcaaccacctcagccgtctgtctccacaaatctgcatagctttgcagactgactcgatcgatagtgatcagctcagtagtagttgtttctgagtaaatgtaatgttgtgctcaaatttgatttgtgagaagtttcctttctagtttctggtgctgcagaccactctgtcaagtatggtcttaggccaactccctttagtaattagcctagctgagctatatttgaatatttcttcataatcatcatcatagcctcactacaggcatggcttgtttttgtgttcattgtttttggaagtcttgaggaatttatgagtgtgcactaagatttccatacagcaagcaacaattgcagaagaaaacaagccttttgacttttaaacaagaaagaaaaagtctcttaactcaagagtcagagacctcaagtggggtctggggtacaatacaacacagtctgagtacaacaactcaggatcttcgagtatccaagttgatggacatattgatgctagtacttttcactaatgcaatgcaagaaagaaagttgggtgattttaaaacaaagactgaagattgaaaagttcaaatatattgcaaaaattgcctatgtatatgtagaacggttttcaattaagaatgctttagaaaaattagaaaataaagtagcaatcgaattgagtggaatgtctaagctcaagcaatcaatctaacaccaacatctctaatgttgcagtattctaccaaattagtgtaaaatcttcgtactatttcactccaataatacaccaaattatgcactgaattctacaaattaaaggagaacatttctacaaattcaattatgtgccttctcgcctattttgtttacaagtttctaaactccaattcaattcaaatccattccttaactgtaaatgtatatatttgtttgtatatatgtgtatgattattgtttatactctactcaatctttgtattaattaatgcatgcagattgaatgaaataatcaagctgatcaaattagatcattagattgaataatgtttcaattgtatgtgtcgtttttgcagttttaatgtttcaattagatatatagcattgttattggacactagtattgtcaaacactttttatgtgtgacactttataactaggtagcaatattttcacaaaaaatatttttaaaaaattttatataggatccgatattaattacactaataacagtatgacaccaaaaaagagtgctaagcacc

SEQ ID NO: 220295 - DNA, 2753 bp, Cannabis indica
ctagtgaatcgaaagagagttgagtaacgcgaagcggttgtagacatgaaatttgaaagattgaaaggaattaccttaaatgtctaatggaaatttgaaaatagtatctgtaatgcagcgtcgagtacatcataaggccgcccgtcgaagatgtcttgaagtctcttttcccatctatcaagaacttcagagctcatgtgcactgcattaggaccatccacaagctcatctgtcctcctacaccaaactacataacataacacaaaaaattcaacattttgttacttcgagaaggaataactatctatttttcatgatattatgcttggattagatatatcacggtgaatttttcagaaaaaaaaactattcaaattgactctgtaataataaaattggcgaagccctatttcgctactctagaagcaactgtttatgaccatttggataatttatttttgaaagaaatacattagttacatttatatatgaaaaatcgagatatggtaatagagttcaagaaatataagttcttaccatatattgcccatatggcttttcttctttcttctgtcattagcatggtacctacataattatataaccataaatattccaacaattgtaacatctagctaggttcataaagttttcaaagaaaaaggaaaagaacctagatagaatgacttggcatattcttcacaaatacacctacacctttcatatgactcctcaagaaagctaggatgaaatcgcggctttcttcgagcttgatcgtcaatatgaaaggtgtgagtgttttgagactgtcgtttgacaacttcttgtaagcgtaaatcgaagaatggaattcccggttttgttaattcaggaaaaacaacactttgcttggtagtaggagccataatagtaagttcagctctcatatgagatttttgaagcttaatagaagacgaagaagatacactaatcacttctaatcttatgttagaaagactaaaagagttttgagacatgaattgtttactaggcttaattgaaacaagggaaaatgtacaactactcatttttcgcaacctttttcgacactatttctttctcaaagagaaaactcaaaagggttgctaaacaaggaaagaaagaatgaaaattgaaaaggattagacacttttttcttgtactatcttccaatgtaagtatgttatatttatataactagtagaactagttagaggcataatatatagtatattatatatcaaatattatccaagatttgatgccaaagtgaaaaaaataaagatagaaaagaaagtagtgacttgtaagacagggtgttattagcttgtttgtatgttcctatgttattttaataatgagttatgtgttgaaaatttgtatgtatatacaatgtcttatttagttttaaactaattaggatatatataatgtgacattgaaatgttcttaaggttagagaagagcgtaaactacgaagatgctggttttgtctttaagtaagatgtccaaagcatagttggagaccattgtcttcttatggagttcactattggaatctttatcaaatttgattctaaaaaaagttgttagggtaaataccgttttgaacttgtgtttttataaaaatgatagatttgaccctctttgttttgttatatgtttgtattttttaaaatagtacaaaataatacaccaagtacaattttgattaaaataacatttaataatagtttgatcttggagatgttatgactagactgattacatttttttatctgtttgtgctagaagttaacttcaggttggttatattaaaaaaattgactaaaattgaattcacgatattattttgtactattttgaaaagttacaagtttagttgttatgtaacaaaatagagggtacaatctataatatatgtaaaatgtaaagtccaaaatatggtatttacctttattgttagtttactttgtattttttaaacattatttctaattgtgtttggatttcaagtgttgtccatggattttgttagaacaagatcattattgttgaagtagagggattagtgttaatttttttcattcttgaaactatcacaagaagtagtttttacctatgacaagtcaataattttgagtagtttaagttaaaaatgttttataacaacaaggttaatagtagtttacctatggcatgttaatattttaaagtagtttaagttaaaattgtttttataacaactaagttaactataggcacactaaattttgatgttatgtatctgcaactttcacacacacaaaaaaaaaaacttaaataatttttgctattaatatcccatttatcaataacacactttcaatctttgaacaataaaataaataaataatttaaaataatgaagggatgcactaagttttcttagtgccactctcatgttattatattatagtccctcaatgtcattatctatgttgaagtcactcttaaccaagctcctaataaaatacattatattcttttctttcttaaataaagatcagttaaggcaccaccatacatatatatatatatatatatatatatatatttaattttgacagaaggcaccaccattttggtgtaaccaaattgccaaagtgactttggaactcaataatgcatgcaatatatttaagatagagtttaatcatataacaccctaactagcataggcgtattacgtgatt

SEQ ID NO: 220296 - DNA, 4205 bp, Cannabis indica
attggatgattcaagatgttttggaaaagctagaagagagatctagaacttttattcaaatattttttctcaacgtgaatgtatcatagttaaaaaccatcttaaaactttagacttgattttcaatcacaaacggagtgtgttgagcatctaaaacatagaatttttcatcacttatatcctagaactctaaattctatgataattcatcatattcatctcatttaatatgtttcttcttattttcaatttacattatgaattataccatttaaacttgaaataaatagaaaaaaagcgtaattctgtaaaaaaataaatataatcaattgaaacaacctctaaaatactttataaaatacacataaaactagcctatcgaacacccccaaacttaatcgttactcgtcctcgagtaaaaatcaacactaaactaaattaaagcaaacaaacatgagcaatccttagttcaatttacactacactactgctactcacaagattcaattgttataagaccaaatttttaatctgattgctaccaatactcgacaagcacttgctagaaaacacaaggcttgataattcttaaaattatgttctaaagagttctcttagtgtttatggatatgagaaataagttgttggacaaaggtgtaaacatgatgatctccactattctatgcttaaagttgtgagtgagtattttaacatattcttttcatttaggtattgtaacattgatttattcaatttcttattttgtgcttgtgttattttataatagagttgtaatttatgttaattttattctattaacatgtaatatctcttacagaatcaggaaaataaaagtcaaatttaggcttgaatggttaaatgagaatgataaattatctagttataataataaactcttgtatgctatttttaatggtgttgatgaaaattttattaaattgctatatttaattaggtgtatggacgcctaattacaagtcggatatctatttatattttatgcttttcttactgtcgactcacaaatatttttttgtgtaggtaaaagtaagattaaagctgaacaatagtgagtttggaactcaatgaagattgtatatatttagctggttagacctgaagtgttaagatctttgggacaacacgagctcaattttattagttgttgggcgacacattggatatgttgcagtttgtttgtgtttgaaaaatagattcgcaatcttgagagttgcaaaatttatgtagttataatgtatattagtaaagttgttatacattatgaaagtttttattaattatgattttatactaaaacctttgaataacaaaggttagcacaataattaacaaaacacactaatatgcgtaagttagtagggtgttacacccgtggtgctaagcatcatttaaatgtgtcatatcactattggtgtaattaagtgtcatgctttacataatttaatttaataactattatagaatatcgctagccatttacaagatatcacatctaagtggtgctagacaccacttgtgccttataccaatgttgtatgtaatactcattatataataatttatttaaatcactttcaaaaacagtccaacactataaggagtaatttgatttcattacgaacgaaatatttctatatacttttattgtggtggatactatttgaagggttggaaatgataagatacataataataacatgtctagcataaagtactatattgattctattactcattgttatgcagattatgattctgttatccttcttatcccctttgttgttttggtggagggctggtccccatccttttaagacttaataaagataaattatgatgttaaggtggggtggagtctatttgtattgtggccttagctagaaaccatcttggggaagttttgtgaacggcttcgaggaaactctaattttatgatcctctcattggagaagtagcggcttgcttgctggaacttgaaacggcaacaccgagacattatcgattcatgatggtggaaagcgattcggagatagttatcaacattttaaagggtacatggccttgttggagtattgatagttatgtttatcattgtcttaagttatctaaactgtttttgagttgttattgttttaatatttttagactgtaattttgctgctcacaatatggttaagttgagttttgctcacaatatggttaagttgagttttgctcacaatatttctagtatggttgaaattttttctataccaacgaatagtatttgtaatgactatgagatctaatttgatctatctataaattccatatttctaaaaaaaaattgtttctattacaataatactcttttgagtaatttacgttataaatacataaatttaactcctaattataaataaatatctcaattatatttttgacgatattaatatttaaactatagttttaaaactttcataagtacctcactattaagtttcaggttaataatatcgttatttaaaaattaatttaaatatactaacaaaaaatatacataaatagggatatgattttgttctgttattgtactttcacggattgtaatccgtgatgtacgacagccgtcagatgagggagttatttgattagattgatctagaggtaattagggttaaaaagtagaaatgtaccctgacacacatttaatgtagcctgagacccatctaatgtaccacggaatacattccgtgaaagtacatcacgggacaaaatcatatccctacataaataatgacttagacacttacctaaagaagttctaaaaataaaaataagtattattattgtaaaaatgaaccattacaataatattgatgtccacaaaccaaacatgccaaagatgcaattatatttacaatggataggagaggccagtccagggctaacatagtctttttcacaaaaaagctgaggttttaggctttgagatactcttctcttctctcgtactagcttagctttgtcgaccctgcaactgcgacgatgaccacctcatcatcaatggcgttcattcacaacgtctgctccgcttccttcactcatgcctttcgtacacgcactttagtagccactaccattatatcttcacaaaagcacaacaacctctccaccgctgcaaccacacccacacccacacccactctcacactcaaaccatcatcttcttcttcttcctcctcctctcgtatccaaaacaacgactccaaagttctcttgggcttgtccgaagccgaccttcaacaagtcgcccttgattttggtcaggtaacaaaaatattaccagtaattttaataaaaaatgaactaattcaatcacttttttagctttaaatttatttttatttttgttattgtatagcaaggttacagagggaaacaactgcatcatctaatttaccagagaaaaatcagacaagttgaagattttagtcagtgtaagtgggttttattttatttagttatttattttgtttaattttgggcctgtgtgtgaaatttggttcctttttcatataaaagtgcctcaagcatttaggaaagggcttcaggaagctggatggagagttggtcggtctcccatacacagttctgtcactgcagctgatggaactatcaaggtagtttatttatccaagactattgtaatgggcaatattgtttgaattgaaatgaataacaaagaatacaatatgtaatcaaagatagtggtttacctcttcagttttcaactctacttttgtgatggggctcacccaaacttgtttatctaagcgtgtaaataaacacatgaatgaaggacaaaagtaaaatttccctgtttcactatctgggaggtgggaattagtcctttttatttttaaacggtgtatatatacatggatgaaatgttatcaagaatataatgtaagtttttgtgagattttgtttcttatgctattggctggccaattagctgctttgcataggcctaaattttgtctttgttaaaatgttgtaattgtactgaggtgcttgataatagttttgtttgccttatgtattggtttctattttaccacttttttttttccgggaattttgtgtgtgtgtgtgtctctctctctctctctctcctccct

SEQ ID NO: 220297 - DNA, 1484 bp, Cannabis indica
taagaattgaaaaaatttaacacgtcaaaaacagtggtcaaagagtctgttacacttgcacacgtgatttttttattttatgcgtgtaagtaacatcaaggagtggttctcccggccctcgaacaacctgcaagggaaggtgctaaacgaggttgttttggcgactttatactttatttggaaaaatagaaactgctgtatatatgaattgaaatgtaattctattggttacattagcaaagagattaggatggctgtgaaatataggctgctaagttttagcagtgggggaaaacaaagcttgataaatacattatcaatgtaatcaatagttggtagaggggctgattgttttgtgcttttggttgtatctgttgttgacttgtttcttgccggttttgaataaagatttcctttcttgttcaaaaaagaaaagaaaaacttttaggaatacatatttttcccatgaggatgggctccgcctctaatgggacggagattctccgtctaaatagagagcgggacgaggatgaagattattttttgtcctcgaatgttaaacgggtggggatggtgccggcgaagacccgtttaatttattaattattttttattaatattttataatatatggttgtattttttttagtatactagtgttatttttataattttttaggttgtgtttttgtataataatttgtatattgaataattaataatatgtaatattttaatttttatttaatttaataattttatagattaattttttttttgttaaaataatctttatttttacattagagggttcttcgttccactcccgatgaggaataatcagggatgaagattaaaatcaatgaggacaagaggagcacggcccacaaatttcccgctttgtgtgcattcctaatcactagttaattgtaagatgacacttctaaaaagtgttaaacactactgatgccagtatcaatgctcaaagagttaatgtggttcaaattaattggaaattacacaaaaattatgcttgtattgtttttgtgtctgcattactttggcctgtcaattttttcttcttaatgaaaagatgacaaaaataacaaaatgtccaatataaataatcagaattgttacaaacaacaatactttttagtgttaattctattttagattgatcttttcaattgaatgataaaaaaaattctgtattttctaaaataaataggatcatgggttcaatttttgacaattttttttatttaaccaacttgaaaataatttttaacacgaacaaatgtagaaaacgtaatcagttttgtcataacacttctatatcggactattattaagttttatttttgactctaaaaaaagttttatttttgattctaaaaaaagttttattttgataaaaaattattagggtactgttgggttttatgccctaaataaaactctttacaatctgattagttatc

SEQ ID NO: 220298 - DNA, 2756 bp, Cannabis indica
gttatggttgttagagttggttagattagctgtcaaagtctgttacaattctgttatttcagctaattctcaactgtatctctttcttgcttttagcatctttgtatataatctgtattcgattccctaatcaataataagacacttctttgtcttcatcatcttttctctatcttttctctcttctttctctgctctgtttcttctttacttctctgttcatgatttctttgctgcacaacaatgtcacggagactcaagtcacctaacatggtatcagagctggagtttccaccattaatggcgaatatggcaaccactggtcctggatcaaacaccaatggtggaattccgatcaacgcttcaactcgaaatcaaaacagaggatcagatgagaacactccggttcatttcaatcactcgatttccattaaactaaacgatcataactttcttctttggaaacagcaggtcctggcagctatacgaggaaatcgtctgatgaaattcatccaagattttgctcctcctccacagttcttgaacaacactgatcaaaccaatggaaactataatcctgctttcatcgactgggaggtgcaagatcagcttttggtatcgtggctcctgtcgtctatgactgagagccttctaactcggatggttggatgcaactctgcacgtcagatatggaacgccttggagaaatacttcgctttgcgagtctcgtctaagatactggagtttcgaaccaagcttcaaaatcttcgcaaaggatcgatgtcgttgaatgagtatctgttaaaggttaaacaaacggtcgatcttcttgcaagtgttggcgaggaactcaatgatcgtgatcatatatctgcgattttcaaaggactaccgagtgaatacgacacgttcataatttcctccaacaccagaattgaaggatatacagtcgctgaaattgaagctttgcttctatcatctgagtcaagaattgagaaaacggaattggaacctgagatgagtgctaatcttgtcaagactgatgctgattactctcttgaacaagaatcgaatcttgaagcatattacactcagttcaatcgaaacatgaggccgtctgcaccaaatcgcaactttacacagtcatatttcaactttcctagaagtggatacactgctggaactcctagaggaactggttttcactcatatcagcaaggttctagttctcgaggaggtacatctgcaggaagaggagtcagatttcccccaccaccttccaggatacaatgtcaactctgtcacagacttggtcatgttgctatagattgcttctatcgctttgacaaaagctttacaggtgtcaacatcaatgtctcacagcaacctcaagctaatttagctcaaaactcagctgcagcacctcaagatcccacctggtacccagattctggtgcaacaaaccattgcactcctgatgtgcaaaatctgatgcatagagctgactataatggccaagagaatctcttcgttggagatggtacaggtttgtccatttctcatattggtaattcttcaattattacagaatctaatcattctcttgtccttaacaacttgcttcatgtgccaaaaatcacaaaaaatctgctaagtgtatcaaagtttgctagagataacaaagtattctttgaatttcaccctgatttttgtcttgttaaggaccaggtgactcgcaccactctcttgactggggttcacaggaatggcctgtattcttttgatcatattcagcttcagcccttccccaatccagtgtctataccagatgacagtgacaacaatctgcccaattcagttcaagccaatgtcattaattccatttcttctcaatgtaataagcctagcaattctctgtacactctatggcacaatagactaggtcatcctagtgacaaagtaattagaaatgttcttcaatcttgtaatatttctatcaataataaagaacacttttctaattgctctgcctgctgtctagggaaaattcacaagcttcccttcccaaaattttctacaattgaatacaatcaaccattgcagcttgttgtcacagatttgtggggaccttcccacacaacatctctcaatggatataaatattatattcatttcctagatgcctatactaggttcacttggctttatttactcaaaaacaagtctgatgcactaaagacttttcaattgttcaaagctgaagctgaacttcagttaggcaccaaaattaaagttctacagagtgactggggaggtgaatacaggtcctttaccccataccttaaccaatgtggcataatacataggcacccttgtcccacaacccatgagcaaaatggtttggctgaacgaaaacacagacatattgttgagaacggccttaccttacttgctcaagcttctatgccattgaaattctgggatgaagcatttcgaactgctgtctacatccataataggttacctactccagttcttggaaacaaatccccaatagaagtgttgttcaatatcacacccgattatacaaccttcaaaacctttggatgtcaatgcttccctaacattagaccttacaacaaacacaaattacaatttagatcctcaccttgcacctttcttggctatagcataaatcataaaggatataagtgtttagattctaatggtcgtgtctacatctctagagatgttat

SEQ ID NO: 220299 - DNA, 1636 bp, Cannabis indica
atgttgtgactaaaaagttattaccagaagtaatatttttttgcagtcccttattattagaatcagtaaattgatcaaatagtagtaatagttgagacataatcatcatcactactactactaattcgtgcgatattaatattattaggagcgacacaagtctcttgaggcctaactagatttggtacatagtaaaattggggtagcaacaagactgcctaaactgactgtagaagcaacactcaccaagtctgggacatacataccgaacccaacccgattatgctacctccacaatacagtccttcacagcaaataatgcttcccttcgagaaagtgacaaaattcaccaagaaccctacaacgatcgccataacagcaccggccatcgccatcacattaaccataatcatacatattattattgtttaacttttctcatattttctttgtttgctatatattgcattagttttgtttatggtatactttttttgcatgaatatatcatcattatatatttattagttttatctattgtatttctcatatttgctttactcatcaaactgtgttctgtgaatcttattatcattcttattttttgatttaatttaggtcgggtccaggtctagatttgagtctgagttcagattcgagttcggatcttgggtcgagtccgggtccagggtcagtgccaagttatataggggtgggattcaaaattatatatgtgttttttaaaaaatatatttggtttttataataagaaaaaataaaattaaaagaacgaagtccattaacgtgcgtgaagcaaaaaaaaaaaacaaaaaccaagcctgacacataggcaggtgcaaccatttttttctttctcttttttaacgaaaaaaaaacacgtgtacatacagactaatataccatgtaaccttttattgactttaatctgattggccaagaaaactaccccatgcaattagaaataaactaaggatcctacaattaattaaattactctacatatatattttgaaatattattgatatgatcatgtactagtagtactactccaccaccataacaccacccccatattattaactattgtataacactataaatagtattattaaaatttgtgactaaaagtgaaaaattgacgaaacataaatcattaatactcctatattaccactaaaaatctgtgattgaaagtgtatttagttataaaataatcacaatttattgtcactaaatgtatttttagctacaaaatttattgcagtttttgaaattaaaataaattagtgtctgattaaatactacttcttagtaacaaataatttttgttgtgattaaaatagatatttagtcacaaaaaatacatatgtaactaagaccttattactaaaagtaatatttttggtaatgtatatattaaccttttcctgcttttctataaatatatatattatgataatcttgttttaatttttcttgatgatatatgtgtatgggcaagtgtataagtagtcatatttataggagaaattaagctagtaaatagtagggctgaatatttgtcgcccagacccgaccaatctgcacgaacctgacccgtaaaacccaaaaatc

SEQ ID NO: 220300 - DNA, 3028 bp, Cannabis indica
cacacacacacacacacacactgcatggtagtgacaattgttttttttctttttcatcactttaggtaagctccataatctagcaagagctatagcagatgaagaagcagaaccaaattttcttaaaggtgaaggccagccttctgatcagaaggctttttctgattttgacaaggaaggggttcttgggctagggctaagaattataaagaagaaagctttaccttcaccccctggagattttagtgagcagcctgtggattatgatgtaaaggagacagggaagagattatttggtcccataagtaacaagcccacaacctatctttcacagtttattcttcatattgctgcgattggtgacatagtagatgggactgatacaactcacgacttcaactttttctcacttgtgtatgaatggcctaaggatgtaagacaatatcttcataattgagttatgtgctcttaaatttatgtttggtttgttatgacaacttttcttgtttgtctgctaatgttcttgcccaaatttattttgtttatttgtgatggaatcaatttcggacatgtttatttttctacaatacttttggattgatttatataagttacaagtggaaaatcatttacttagtttctggcaatatgtattatatatgtctcctcccaagtttattagggagtttctggcaatattaagttcttgaataatacaaatcagttggggtaattgtatagatatgatctttttaatttttatgtttctacgaggatgccttattctcttattattttttcttcctgtaaatatatgttttacttcgtacatatataaatacatatattatatatatgtatttataaaacgtacatggaaatgtgttggtgtattctatcatctgtaggatcattggtgaggtggtctttgcaaatattcaatacataatgcttttgttgatatgtattaactgtattaaaaaaaaaaattcaagatcaggttgaaaacacatgaattattctggattcccctctggttgcatatcgttaaggggttcaaagagattcttttctctgttttattaagaaattggaatgttattttgtaatgtgttttatgtttttctttattgcctctttcttgttttctgtatcaccatttatatgttggcggtacctgtggtttttctttaataattcaaatatgtttagagtattttattgttttctgtatcaccatttatatgttggcggtacctgtggtttttctttaacaattcaaatatgtttagagtagttttattgttttaattatatcttaaaggttgatccttttctggatggatcactgttttaattatatcttaaaggttcatcactgctttctggatggatcactgttagttattgttattgttagttattgttacatttagacttctgttttgactcatgtttgagggggaccaactgagcctttgagggttctctctggataatataggtattgatttgatatgttcatgtttgcagcttttaactcgcctcgtatttgaccgtggtagtactgatgctgctagcaagatggctgagattatgtgtgctgactttgttcatgaagttatttcagcgtgtgtgccgtcagtgtatcctccacgctctggtcaaggatgggcttgcattccagtacccctttgcattaagaatggcacagagaataaactaccatcaccttcttcaaaaggtgaacctaattgtcatgactggtcatcaatattacccggcatccctctctaccctttacagctggatatcgtaaaacacttggttaaaatatcgccagttagggcagtattggcatgtgtttttgggagtagcattttatacagtggaagtgcctcctctacatcaagctcttggcatggtgaattgcttgaagcacctgatacgaatcgtttgttttacgagtttgctcttgatcaatcagagaggttagcttaaaagtccttgaagttattcatccttgcaaataatctactctgtgatggcccatttaaatttatatttgctgcacaggtttccaactttaaaccgatggatacaaatgcaaacaaatcttcatcgggtttcagagtttgcagtaacaaccaagcaaactgctgatagcagcagagttaaagatgaagtaagagctgctttaaagagacttcatgagcatgatagtgatacagagtccgaggttgatgaaaatgttggtggcactaatatgcccacaaatttatcatcttttaacagccaaagtggtgcagctccagatacatcttggcaagatgccatgaaaactgatgttcccgaacatgataattcggttttcctttcttttaattgggagaatgaagaaccctatcagaaagcaatagaacggtatacaatttattccatctttacccttaaaatttatgagggttagcttgtttggctttcttgctcgtgtattatattgctgtcaaaaagtttcttctgtacattatatttggatatctttcagtacaagggttatcgtcactctaagttagagtctaattaaccatcctagtactgcttgaaaatgatcccagtttttgatattagcaatctgaaagattattgctaattgcattttcattttctggtaaaaaattgtaatggtacttgtaagttatgataccatcctactaaacatctcactcctttatatcttaaaggcttgtcggtctctgcactagcaatttgataaatggaaaatttaggatctaatttttcattaggctgacatctgaaacttacgtagtatgaaagaaaaaccatatttagccacatgtaattctaggtgtgagtatattgctaagacatcttctttttgagttgctaactatgatgattgaagatatacatatttagcattgcaatgatgatggacattcacatgctgatggatgtcatcaattggtcttcctttcagattaattgatgaaggaaaactaatgga

SEQ ID NO: 220301 - DNA, 10422 bp, Cannabis indica
tatgattcaatatatgaatcaagtagaaaaatactcaagtgagagagagagagagagagagagtctagggtgtatagaagagagagagaagagagaattagaggtttaggacttagagaattagggttaggttaatgcactttatatagtagagcttacatgaatattaaccactaatatcccttaaaagtagcaagataaagccttatttacataattaaataataaataataaataggataattatcactcaaaaataggaaagttgctaatattttcctcctatttttgtgggttgtcaaggtccaaaccgccacatagcttgttgtccacagatgaaggttgtgcaccaaaggcttgctttaaaaaggctagccggccatgttcttgccagggtttggccgaccatgtgcttgcaaggttcggttggccatgtgcctgtcagggtcttgttggccgtgttcttgccaaggtttgcatggtgtacatcaagtgcctaccaacctccaggctacatatcaagtgatggccagcctttgtaagtgatggtgaacctttgtatgtgatgtccaacctttgttggtgatggttagcctttgtatgtgatggccaacctttgtaggtgatggccagccttggtacaactttcgttgcaaaggtcaggcttccttggtcaaacaggccctttctttgtctgacaatcacacttttggttggccaacttgtgctcaaaccctagctggccatataagcttatcctagctggcctatacactccttttggccaggcaaacattgttatgcagctccttgacggctcacttaactcctttttcttgttgcttgacgattcagccatgccttgtaaagatactttctcttgctattcgcaaggttgtattccatgtgtacttagtcttggcttacatgtacatgcaacattaggtggaaaaaaatttggatagcatttgctccccatgtccctattcaaacatttagtcagatagggactttctagctctcatcttacttgtagtagcctttatcgaatagccttgtctagccaagtgttggcttttttgtatggaatgcttttagatatttgatcttatctctccatatatgcctcatcttcttttcattgacatctcttctttgaacccgccattgataagtttcaagctttttaagcttttagaaactttttgattctcacgttagattgtaatctttttggtattctaatctgcatgacaatttagaatacataatgtgtaatttcctaatggaaaagacttgactttggccttcattgtgattcttgactctttgagtcataaagagcatgaagaacacagtctaattatgaacaaacacacctttcaattcaaaactaaccttggtcggccctaaagatcttgcttgtgacctggccaaccctaggattcaatcatgggagctgtccatcactatggtttcactttaggaagcttacctgttcatgcttgggtttagtagccttggccagttctttgctgagtcatgggccatggtcaacccttttaaggctaggaaacactggctgacctaggccttggttccaagtgggtggccagttttttgtccttttttgacctaagtgagaatcctgttatggccttgtaggcatatacaaccttagtcttatgcatggtttccttagaaactctgtatgaaacttaatggtgagtctattatagtcaaatgttcaacttaagagtcaatatttgtccaagctgttacacttgagacttgtacttcgttgatacttagccttgtacaaggacattatctagcaattacccttaggtatggttgccaagagttttgtatgtggcttggaacctgcaagaaactctaccttgccttacaaatttagctcaatacatggttcctataggaactctgtcttgctcttctctggttgtaaggttcttccaaggccttcgcctcatgcatttgaaccaattttttattcatattcggccttgaggatttcatgttcctatttttagcctataatcacactgtttcaaaaactactattatttagccttaaaggcttttactgtggacatatgatcatcttggctatccacttattgcctttacatgtatgtatccaaatttactttcctttatgcaaagttgaagtatgccataacttgacttagaggtaagtttagtagcttattctaagcgttaaaatttctctacataagttctccgtgctagttcaatgcattgtatggtgtgggtgcccccaaagtgagcatgcagacttacggcatcttggtcacttgcaattcaccaaatttcatagaccctgcctgggaattttcttggggatgctaccaggtgtacacatgtggaactgaaaaagaatatctttaagaagttacctttgttagcaagtgatttagaaacaatttgtcttacatataataaaagcttacaacttattgtttgcttttgaaatcactttttggctacccttgcgtgaggtgtcaggcacaggccatcactgaagagcgatgggaggccatgctaacaaataatggatattggctctttttatatttggctaccactgtagggcttaccgtggaaaggccatcgctgaaaaatgatgggaggccatcgctgaagagcaatgggtatagctcttttgtgaattcctacaaggtgaaataatagaggaaccactatacgaggttgctagtgagagaacttaccgagatgttttctattctagtattttggtaaaagtggcaactccaagctcttattgtgctcaccgggattgtatgcaccttttcttgttatcttgtaacttggtgcagacctttttagtttggtccaaacatgcttgttgcaggatctttgttgttaaggaatgttctttaaagcactaagtctcttatgaagaatttcatctctttaacctgtttgttgaagcacctagcaactttttgcaggcagacatgccgctttaagttggcttggtgtcttcttttttctcttttgtctggggattctactactaagatgtggtttacttctttgtcattgtagacaaaaagtatgagagcagactgttggtggactgggccaactagggtatagaccaagtggccatccacgttgagggagcattgcctggccagttggataaggctatggctaactagcctgtggaggtagtggtcggccaagttgtggattctatgatcggccagcatgttgaggccatggttagtcagccttttggaggccaagtcgatgttgcagtttaaccccttttgcactcagttcgctttacccctagcatgattaccatagagcctttatgcactcttgtaaatagttattcagctttgttcttagtaacacttcttagaggtagattggaatacaatgtatatgcattatgttgtctaggattggacactcatcagttatcctccttaaccctactttctagcaagattttcgtttggaggtatgttactataggtgtatccatgttggatggttgtccagcatatttatttgtttttaaatagggatgcttagttctttactgaactaagtggataccaagttttccttggttttcaaggcactactaattggtcgagctagtgcatcggttgttgcatcgtctttggagaattgccttttagtacaacctttgagctgacttaaaaagtgttgaaattagctcaaataggccattttctttttgtattgagttgcatattcacctaaaacatgacctacgattagttgagtgatatatgtctaggtactcacccctcgctttgtgtgctagcctgaggctagcaatttgagcttcatgtttagcctcattattagaagctttgaaactaaccttaattgcctcgtgcaaccattgcccccaggtgtccaaagggccacgcaagcatcaggaaaggggtcaatgcaccttctcggtgagtttttcttaatcttgccctcacttcttctctggctctcgcctttctttagaatcttgagagatttggagagatatgcttctatgtttagccatgaagtttgtgagagcttgaccttttatgggcatggtaggttgacaagtggacttatattggtcgagcttcggtggtccacttgagtggtcgaccaggtgcttcaggttttggtgacacatgtcaccgtggtcgattaacatgcattgcattgggagttttggtaggagagtgaagcatgtacacttctcctcctttcccttagacttcatggcataatagaatcgttgaatttcccttttttcaattatgttggatgcagccatcgttgttgtgcgtgcctccaccattctcagttggagaattggcagagattgtttccactagccgacatgtcacatagtacttgcgacactatgatgccctgtgtctgtttttgacttgccctcttgtttggacttgctggacggcttcttccaactttatgaagccaccagcttgctcaaggaactccttcatgttgcttgttaagatccttctgatatgtttccagaattactcaacggtaagatgcctccgaatattgccatatattagcattctttggtcatgcctttgacctctatgaccttagccatgaacctttgaatatattgtttcaaaggttcatcttgtctttattttaactcgacaaagtcctcgagtcgtgaaggtatttgtcttaaggtagagaactggatataactctcagaagaattcttcccaagaattaaatcttcctcgggctagcttgaaatgccaatgttggggctagttcagtaagagttgtcagaaatatttggcattacgaatctccagatacttgttggagatttgtttggatcttaaagcatttcaagtatactaggggatctttattccccatgtgcatcttccaagttggcatcttgaatttgggcaaggcattgatgtatgttgagaaaggtgagccccttgacttatctagctcaaggtttgatggttttgggcctgccaagtccttgagcatgtttcgtatttgatccaaccgtgcttgtatagaaggatctgttgctgtaggggccttgttgattggcctttcttgattaacctgcagccctagattggcaaaagcctagtcagccataccctgggagagggtacgttcaaggtaagcaagccctgagtctagcagctattcatggccagccaaccatgtgccgggtagggcctggttgcccattcttctttgatttgctagtggggcctgtgcgctggcattgtgtagatgataccaattgttgtagttgcgtggatccaagtatctgaagtgattggtctaacttctcaagttgttgttgccttggttgtttccacccgttcctgggccttggcggttaaagactttccttagggtcactcactccaagattctccgaaatgagaggtcaccctgttggtcggcaaaaagtgcaccactacggtgatgtctggacaaaggttggccaattggggatgttgttgtaccagagacccctggccggccccccagaccaatggttcttttgtctggctgttctcatcaatagattttcgtgctaatacttctcttccttcaaacaggggaaggcctgtcctggttccagaggaacttggttacacagtttatctgtagaccctccttgatctgtcaattagtcgcccttggggaggatctcagatgagatcctgacgtcttccgatagttttttcattgaaccaccttattagatcactagcttctctattacagaagtctaattctacttcatgatatcgaaggatgtactcttggtcatcaatccatctcaaaatatcgcgtctctattgtgagaatacatcgcaaccaacagcgtgtggttcttcagtttggacaacttgacatacgacctctttaactttggctaactcaagatcttctcttaagtctacatgaggctcgccaatggttagctcgccaattcttggccttgtcccagcataataccatgggccagatcttgttgtggcactcagggaatgctccatgttagccattccctcggtatgaggtccccatgcagtgtcctccctgggcagcaaaggttggccattaagaccaatcaggtcggtagtgttaacctaaccagtcgtggtggctaggtttgtgatgcctgccgagttggcagggttggccacatccgtcaggttcatagagattccagatttgactataatacgaacatcacgatttgtagtcatggggccttgagaaagacccgatgagaaaaaatttgtagccggagttctccttgagttcaactctcaatgaaagcactaaactgttgaattctgatttagccaaccgacaacggagttgtatttattacttatgatttccttgtgctgcactataatatggaaaaattaaattggacacaagattttacagaggtttggcgccttgagttagcaggtaatgacctactctccttttggttatattaatactagagataatactacacatatcataagtgtgatggaatttgaagtaactctcttatgattacaatatgtgaatcaaagtgtgtgtgtgtgtgtgagagagagagagagagtctaaggcgtgtagaaaagagggagaagagagaatgttttagacttacagttgagagcttagggagactagaggcttaggacgcagagaattagggttaagataaggctctttatatagtagagcttacatgaatattaaccattaatatcccttaaatattggaagataagcctatttacataattaaataataaaccataaataggataattatccctcaaaaatagtgaagttgttgatattttcccctattttcgtgggttgtcaaggtccaagcctccacttagcttgctatccactgatgaaggctgcgcaccaaaggcttgctaggaaaaggctagctggccatgtgcttgcaagagtttggccagccatgtgcctgccagggtccagaggtttcatatcaagtgtctacgagcctacaggatgcacatcaagtgcctaccagcctgctacacataaggtgaatgccaacctttataggtaatgaccagcctttgtaggtgatggccagcctttgtaaacctttcctagcaaaggtcatacttccttggtcgaattggctctttctcagtctaacaaacaccattttggctgaccagcttgtgctcaaaccctgactggccatataagctcatcctagcttgcctatacactccctttggccggtgagaaattgttctgtagcttcttcacgactcagttaactccttccgcttgttgcttgaccattttaccatgccttgtaaagagactttctcttgctattggcaaggctgtattccatgtatactcaatcatggcttacgtgaacatgccacgttaggtggaaaaaatttaggataacactctggaaagctcttacaatgatctccaagtattttactcttaaatctagacttcacacgtatgtttacagtaaatagaattcgtgtacattaaataagtttatagggattaattacatcaaataagtttctcaaaactaataggaaataaaatcagggaactatttattttctataattactgttatttacattttttgtaagacatgacacgtggaatttatcagagaaggctaaattaatcctcctttgattgaactcttttgttgccactctatcgctgaaaggcttcccaaacttataaacatctaaaacagaggggcacacaaaagccttcccatgtcaatgttcacttcccaaaggcagaaaacaaaacatctctatgataagtcaatattttgttttataaatatagtcaatttatgtattaataattttaaatttattctttaaattattgattagtgtgattataattttttaggctattttaaagactaatcgtgcatttagattcatttggagggatgttagcacattttgatagaaaataatggaatccggcgagctcaattttataaggcagaacttaattacaaattttgacgatattggaagtagaattggacttgtacctaaacatgaaagttgtagatctcgatctcaaattttcagaacatcttgaatcgtccaattgcaaatttcattgaagaagttatggctaaaatactagtctaaacaccatataaaaaaaattttgcagcaagctgtcgccgtggcgaggggaactcgtggctgcggtgaggatgcgatccctgccaaattttgactttttttttttaactgatataactttagtgatatttataggagttttagggttcatttttagaatcttttagctacaaaattgagagagagacctgaaagacaacggagattaggacttcgagtgttcttcatcatagttctttttgttctcgttaaactcttactatttattatgattttgattataatgtctacttcagagtagttttcttttagttaagggttatttcaaaactcgagagattagttttaaattttattgatgaatgttaatttctagtatccattatatcaaattgcttctattcttctatgggaaatttcatgattgatgttttaatcttgtttagatgatcgtcaaattagggtttattttaatctattgtcatcataggattactattcaccttgtaatctaagattctaggtgtttgtgataaattgtaatttctaatattatcaaaagtattttaattgtgatgaagaatagaacctaggttaaatgaattatattcttcattaatttatttcctatattagcctatctccatgttaaataaatttcatgcttcgtagatttactatttgataaaagagataattattgagtgtttcaccttgattacatgtaattgagagattgtgataatttgtctactttacctttatctgcgggattaataatttgaatggaatactgaaattacattcattaataggagttaagaatgaatgttgagggtggagaataacatttaactatttatcgcatatcctagtatcacattttagttttttattttatttattttaatctcatcatcaaaaccccttttttctaattcttgacacttattttaaaattattgaataaacatagtcctcgtgggatccaccattacttacatttatactaaaattattggaagttgtggaatcaaattaatagtaaatttgatatggcatatgacacacatcaaatttttagcaccgttgccacggactatttcattcaatttattattctttgtttttttttctatttttcttgttactaatttgttcttcgagttgtggttttaatttttagatatttctttagaaatatggcaatgtaaaatcatcaatactataatccatattatatcttgccacaagtgtatcaatatgatccctactacgacacttacacatgcaatcaacaataggaagattattctaacaattcccatagtgggatcaatcaatatgctcaactaacttcttaccatcctcctgtagtaccaaaaaactaagatcactctcatatggatttgctcaatactttggtgcttctactgcttagatgcaacaaaataatgcacaatttcaataacctacttgtttacctcgcttttactcaatgacagtgattcaattaataagcgattaagaatataattaaaatagagaaaaaagaattaagtaataaagaacactagattttaaagaggttgggccccatgagggtggtaatagcctactcctcttgaatcgtattaactcaagagaaagaacgaagtgtttttctctctaaaagctcttacaatgaatctctaagtaattttcttatatctctctctgaagcaattctttcaatccctttcacagtgaggctaggtcactatttataaggccttagtgcatgaaaaaaggttttccttttgcttacaatgtataaaataagaaattacgtttattacataattacgaaatacgaaatcagaacaagttgctatatttccctaattcaataccacgatcgtagagattgcctacatgtctagaattcacaagatcattttgaagtaattaactcttgacaagtagttcggcaagctagatttatacctgcctagatgatctttctttcatcatgctagggtaatcaagggttatacatggtgacatacaatatggagtctattcgggatattcatttctgcccagctataagaaacgtaggactcgtgtcacttgagtattctgcca

SEQ ID NO: 220302 - DNA, 4006 bp, Cannabis indica
aaatgagttaataattacatagtttaataaaagtaattatttaaaaaatggtacactacaacaaaaattatcatcaggagcaacttttttcgttccagaaaacctcttacatggttattacatacaattctcatccaattctcacgagggtcatgcgaattggagagtgtaattgaaatctctcaaccacttctagctaattacatggttataatgtaattgcctagttgaacaaacacgtcaagtctaattactcagaattacactcaattccaatacatagtggctttccaaacgcgaatacaaagttacatgttgttatccatatttctacacaaggtgacataacatccacttgggtgacacatgtcagaattcatcacctggatagaaaattctactcttaatgagtcgtacagggagatttgatacttgacgtcataaacagaagttggaatatccgagtagagcatgcgaagacacccgaccagcttccatcatgcaggtggcaagcatacacccatcatgaaatgcgagttagaatattttagagatatatcctatatatcctcaagcttgcaagtaacggtaatattcctaaaatcatgggatagtttcatggtaattgagaagaaaaaaaacctaccttgtttctaattctgattattgtaattataggaagtaaatagatttcccattttattctttattgattttgggaaactaattttatgtaattaatccctataatagtggactagtctcaatattcaaggatacaaatttcattcagagaaagctcacgagataaatctaaatttaagagtttcgagagatcaagattttcttgttcatctactcacaagtcaatacaactaaaggggagtaggctattaccaccatcaagggatcgaacctctataattctggtatattctttactttatattgttcatacttattatttcaattattcttaaatcaatttaatttgactcactgtcattggctaaaagagatattaatattttagtacttttattgagagcaaagaaactcaagtctttgttgtaggtcttttttaagaaacaagatggttgtacaaacacggatggaaaattagactaaaacaacgaatccaatggctacagatctaaatatgtagacacctgcaaaccccaaagatccagccaggacggaccccgctctgactaatcctcagccaccaacaggcccacaaagagtaggtcaaggagtgactacccctttagttgggttcactccgggcatgcaagaaactgaaaccactactacttgaaccaagcaaattgcccccgatactagaatcccatctactacaaattctcaatgactaatcggtgatgacatcgaactacaaaacttgtgagatgcactagggcaaatacaaggccacaataacactcttcattatgatcaacaagatactagatagctctaaattttacttttgtagaacaaagacgccaattcgaaaaatggagggatcgagagataggaatcatgaaagcccaacaagaagtgattgacaatcattctaggaaagccgctgtactggtcaggagagcctaccaagtcaccgaccaacagccagtagcagatacttacattccacctaggccacaacacatgccataaaaatatccagctgaacacactcaacaaagccaagttttgccaacctgttactgtaggccacacaatagacgagcaagttttggccaacctgttacttaggagggaatgatcagcctaacatctgttctcagacgaaaatactgggccaaccctttgctcacaatagccaggcacgaaggcctcctggtgaatcagtctttgactgattgggcaccgttcacgatctcaggaatgatttgaatcacagaagaggattagacggacaggacattcctcctatcgttaagctaaataatacagattactaggtgcccaaccaagttctaagcgatcctcatgtgacacaggtcggtcaatatgcaagtcaagttgatctattgatgcaagcagaaatagatcaacttaagagcctcgttcaacgcctgaccggaccaaaactcataaatctagaacttgaccggaccaaaggttcaccattctcatgaaaaagtcaatgctctcgacctacttcccattttcaaaatgccaacatgaaaaatgtacacgggtaaagaagatcatttgtcgcacataaaatattttgaaaatgcaaatagacttggaagcaatgagaggcgatgtactgtgcagaatctttccagaaaccttggcaaaggccgcccagcagtggtacttcaagttctctatgaaagtataattcgtggaattctttcatttcaaagtttcacgcaaaattctcctcttcttggcagctcccatctcacttagaagacctagtcgaagtgcaacaaataccaggggaacccttgagagcttacatcagcagatttatggctggagatacaaaagtgaaaggattaatcaaagaaggttggttggccgcaatcctaagaggtattgagcctctaggagaattgtggaaagatataaaaatacttagtgtagggtcaatggcagagttcttgaatcgagcaggcggatttataaagcttgaagaaaaagtttggcgtgtggacagagttggatagaaaaagaatcaacaacacaccagtgccttcatccagcaagactagaattcacaaaaatcaagtagctccagccaaggtggtaaaaggtcaaataatggcaaccgacaaggtaatagaaagaaaagcagattcggtagaaactccaaatagcaccctcgggagaatgcttttaaattcactacttttaccatcctaacagaggtctttacaatgatccggtccataatatcatacaaaaaatatcctcccatgaagaaaaacatgagcaagagggacaccaccaagttttatcgctttcatgcaaactacgatcatgatactaacgagtgtaatatttgaagtgggaaatagagttccttattagtaaaaataacccgcacttgtagaaatatgtcaagaccgactaggaacaaaaggtcgcccaaccagataacacacaaaatcagttgatgcctccaccagtagacgggcatcttcaagttatcattagaggcctccacattgttagagactcgagcaaagctagagaaaaatatgcccaaagcttatagtatgaatagaaagatgttgttttggccataggagaaagaaagcctaagcaacctcacattggagaaccagtcatatccttcagtgaagaagattctgaccatgttatctatccgcacaacgaatctttggttgttgatgttcagattacaaacaaaatagtagcttggaccatggttgaaagtggccagacaaaaccactgcgaccagatgtgaaataccaaacaatctacaaacaacaatataaaatataatcacaaaaaatctacaaactcaaaatacaatattaatctgatattttaaacataaataaacaatctctgataacacaaacacaatccaaacttatgaaaaaatcaaatctcaagttcctctgaccaccgtcgtccacctctgctgccaccacctacgcgaaaaaaaaataaaaggagaagatgagagcaagctcgagacggatatagaagaagtgtaccattgtgtgagagatctctttaaaatctgagctcaatgtgggtctgaggagacggtggcggcagtgtgggtcttcgacaagagtggggaagcgaggtggcggcactgtagtcatggagagaggaggcggagcgagaggaggcggtttgtggtcggcctttgggtcttgctgaaagaggaggtagcaatggtcgtgggtagctcgtcgttcaaacgagagagcaaagagacgaggaagacaaggtgggtgcgttgttcgaatgtgtgtgtgtgtgtgtgtg

SEQ ID NO: 220303 - DNA, 2018 bp, Cannabis indica
caccaaaagtcccaacttcgacagtctttaattttttgtgttttgacaaattaaaattaacccaatgaacgtgaaaagcaatgtaaacgttaacagcacatattataacaattttttttatttaaaaataattgattttggttcaaactctgcacctcacttgaacaaattcattctactatcagtatttattattattttttatttaattttaaagtaataataatattattgttacaacaactaccccagaatctaaaatttgcataacatgtgtaagaaatgtaatcttcggtaagagcaagagaaaatagctaatgctatagaataaatttagaagaaaaacttcgaccaaattctactacttcttcttctccataaatattatatatatatatttacagaatcttgtcctagaccaatttcttgttgttgtgatctgagtttgtgtgtttgtgaatctaatctgtatacgtaggatatacatacatatataatataaactgatatacacctgaatcatcaaatgtccaaagcttcaaccagactcgtccatggttttctcaggcttcacaattatcattcctctcacatcgcgaaaccctcttccccaaatcccggtactacggctgcttctttgttccgagattcgctcagtcgtgcgcaccattccgcccctgctccgccacgttttgctcgaatcggagtaccgggttcgtccaatgcggtgttgacccgaattccttcgtctccctctagggctggagttgggctcagattcttctccttggggaaagctaatgtcaatacggattttgcgaagaaggtctttgagaagccggcgtcagccgttgcttccaccttctcgaggtaccgggaggccatagggttgcagattgaggctttttttagaaggaactatctcttcgtgttaggtgctgttggtgtggtggcttgtgctttactatggaggattatgtttggcattgccaatacctttattgggttctccgaaggaatggccaagtatgggtttcttgctctttcatctgccatcgtcgcttttgctgtgagttctaagtgtttaatttttgtttaaagctctaattaattaccgtttcctcttatgaggggcatttgaattttctgcaagttaaatttaagtcttgatatttgatagtaatgtggaattatatatggagagatcaccatgtccaattgttcattatagctggagtgcattcccagattaaattagagttttgtttcatggaaattttgtcatttctcccacatttctttttcttcgatattggtttgtttatcaagtagaaacttcatttcccattatttggatgtacgagattcttgcgagggtttagtttgtgcactttattgggatttttggttttatcacagaacagttagacttcttatgtttccatttatacatattgaacaggctaagataagatagatggtttctgtatatgactatgcttagttcaaatttgataccttcagcttcttgtcctagactgtgtttcattatgtatcaatatgtatatgactgccactgcatcctagttccagcagcagcctgtttgtaatttgtatcatattatattattttctttatatatgggtttgttgttggcatcaatctttggtgaggaaagaagaaatatgctttataatggactgtcatctgagaaatatgtgttcttttgttactgatagggcctttacgtccgcgcacgattcacaattaaccctgatagagtttatagaattgctatgaggaggctaaatacgtctgctgggattcttgaggttatgggagcccctctttcaggatcagatcttagagcctatgtaatgtcaggaggtggacttacaataaagaatttcaagccaagaattaggagcaagcgttgctttctcctcttccctattcgaggttcagagagaaagggtctggtcagtgttgaagtaaagaagaaaaaaggccaggtatc

SEQ ID NO: 220304 - DNA, 1227 bp, Cannabis indica
aaaaaaaaataacaaaaattgtgcttattgtttaaaacaaaaccaattaattagtactactcacttgaatttccctcactctattgctaatcacacccgagtttctttcggctctaatgatctccttctcggtcaattcgccatcctcttctctcttccctgaaaaaatttcgagtaaaatatgatttcatttgttcaattatttcatgttatgatcaaataaagtagaaagagatatgggagtatataactaaccatatctcttctccattctcatgagcaatggaccaattctttggcgaattgtgtacattgttcttccatattcggctgcaggccatatttcatccccgaaaactgcactgcacgcaattttttacaacaatttttggtcaattattttcatcttaaaactaaaatgttaacacaaaatgaaaactttaaacaagtttttgttcaaagacttggaatttgttttcccttaaggcattatttgattcaatcttttccatactagattgcgcgaaaactaaaatcgcctatagttttttttttttttgaggatttttgtgtagaaaattcaattgtagttcaaatagatttcacactattgattagcaaattcaagctcatttcaaaccagatttacaacaatgtgtaaaagtgtaggaaattcatattggtttttatttgatgacatttttttagtgggaaatttatgcacaattcataccaatatgtaaaattacttagtatgccaatattgaattgctaaaagataaagataaaagctttattagtgccctttttgtgacacattccaaaagtaaattgttctgtttctgagacttgtgaaaacaaatctttttttatttatttgaagacttctgcatatagaaaaatactcaacctaatgtgtaaaattactatcccaaaattgatttgctaaaagctataaagatcaaagctttattagtgcccttttataacacatttcttaaactaaattgttctgtttctgaaacatattcttacaaaaaattgtgaaactaaatcatttttgtaaatagaaaaattctaacaaatttaaaactagaaatatcccaagattgaattgccacgagctaaaaagatcaaatctttattttgccctctttcaaaaaaattgtatagctatgtgtaaaaactaaatcaagctcttgtctttttgaagactttgcatagaaa

SEQ ID NO: 220305 - DNA, 3220 bp, Cannabis indica
atcaagcagcagaaaggaactgagaaattcctcctaagcttcttccctcgacctgatggctcttttgcaagaccatgggcgtccgtgttgaactgatgaggcaagtaatgcaaagatgcttcagggaaattggagaagagcaaacgaatccgagacacaaaaccggaaagagcagagaggtcttgccaatcattgtaactttggaaaccaagtttaagcaatccgagaagacgaactttggatgtaaatgagaatccaaacaccataataaactttgcaacaaagcctgcccctcagcgaatataggagtagaagcaccaggtagaaggcgatgttgagaggctaccgagtgacgatgtccaatcttgaagatgaatccagatttttgtgagctagggctgcatccacagaaagagatggagaatcctcttgaaagtcatcaacttgcagccgtagggaatgatgagtgattggagtagcttccgaatccaattgatccgtatgatagctttgttgagcctcattgtattcctgtaaataattaataacaaactcttctacattgttaggaataccaaatctattaaataaaattaagttgcgtgtattccatatatgccagataagagcaataaacaaaggaaaatcctgttttgagatattttgcaatgcttgaagataaaactcattaatatctgttctacgatagtcatagtaaaaaattttgaatcttgaaagcttccaaatggtcttcgctttggggcaatccataagggcatgagtgacagattctgtattgttaccacaaattgagcaatacggttgaggaagaatcttttttttgaaataaatttaaggaacacggtaaaatatgattgaaagctttccaagtgaaatgcttaattttggggggaacagaaagagaccagagccttttccaccattgctgaaaagggttaggattggaagaagaaggtacatcaatggaggctagggaagaagcaaggtgataagctgatttaacagtgataagaccagaagagtggaatccccagatcagagaatcagtcagggttgggtccaggggaatttggaggatacggtcaacctggtaagaaggaaaaaaatgtttgagttttggcacattccaagtggtgtcatggtttatgaaaaaagagactaaagcctgagaggggtcaattggatgcaggatggtgggattggcaagaccaggaatccagtttgaagctgataaaggaacatgggtacctgcaccaatcttccaaaccagacctttcttgaggagtgacggccccaaaggagacttctccaggtgaatgaagaattatagccaacaggagcattcaaaaagtcaagtgtttaaaataacgagctttgagaatggaatgtaggagggagccagtatcagccaactctccaagcttgcttggccagaagagcttgattatgaaaagaaaaggtacgaaagcccaatccaccaaagaagttagagaccgagatggcagaccaacttttccaatgaacttctttagtgcccaaagaaccaccaaaacctagctataacactctggatttttaggcaacttgaagcaagacattgcaaaagaggggatgacttgaacaacagcctttataagagtttcctttccagctctagagaaaagcttatcattccatatattcaaacgggaggaaacgctttggagaagataatgaaaaaccgaattggtaaccctacccacacagtgagggacacccagatacttgctaacaaagccctccccagtaagatgcaaagactgctgaaattgatgctgagagtcagccgaggtgtttggggagaaaagaatagacttatccctattaaccagctggccagtagctctgttatagagctggagaatagcattaagggcatcactagaatgaggagtgacatgagagaataacatgctatcatcggcaaagaagagatgggatagggggctcccctatagatctggatgccaggaaagcttccattagtttcatgtaaacagatagctgcagaaagcccctcagcaaccaagagaaaaagttaaggagataaaggatctccttggcgaatgccacgggttgagtgaaaagggttagtgagggtaccgtttatggacagccgataagtgacagtagacagacaattcaaaataagagaggtgaagggtgcaggaaaaccaacatgagtgagcagttgatggatgaagtgccattcaactatatcaaaggccttttccatgtcaagcttaatagctgcccaacctatcttgcccgaacgtctagagtgaatggcgtgaataatctcgttagcaaggagaatgttgtcagtaatttgacgacccttaaggaaagcgctttggttaatgctaataatcgagtgaagaacaagttttaaacgattagcaagaaccttggagatgcacttatacagagtattacagagactaatcggcctaaagtcatggaccattttggggtttttcttttttggaatgagaacaatgatcgtttcattgatcagagaaatgttcccctggtgattaaaaatttggagcatagctcttgtgaaatcttttccaagggtggaccagtttttagataaaaaagagagttaaaaccatcagggccaggtgccttatctcccgaaaggccaaataaggcctgcttactctcaatctcagtaaagggttcttcaagaaaagcagactactgaggggagagtctattagagatcccttgaaggatagaatttatagccatatcacacactccttgagaactgaaaagagtagtgtagaaattgagaaattgggagactatagttggagtatcatgagaggtagacccatcaggaagagtgatctggcgaatggaattgttctttttacgagtggaagcgcgacgatggaaaaattttgtgttcttatcaccagcacgcagccagtcaactctagcccgttgcttccaataaatctcatccttatggagcagcccatccaattgagattggagataagcagcttgagttgaagattgaggagttggctgagtatcatttaaaagacgatggagctcagcttgagttcgagatatttggagctggagagggtgttgggttttactccaagtcttaatatccgagagacatgtagattgtctgtcc

SEQ ID NO: 220306 - DNA, 2589 bp, Cannabis indica
catatgtttagttgattaaatattacttttgacaactaatcatgtcatttacttgtgaacattttaagaacccaagttaattgtttagtgaaagtatatttcgtccatgttttgttgcattagatacttaggtgttacaaatatctctaccaataaagtacaaatattttttgttgtataaagtgtgattttctaatctctcaaacttctttgtagatttttcagaagaaaaaaaaaaggaaggacttctttttagagttcaatggaactttttaattgggctgcaaaaggtgagctgggcctatatctgaatgctgaacaaacctaacgacgtcgtaatcagaagaaatgaggggtattgaagtcttttcggaaacttgaccaaattgtacggcacaaacctccatggatgaagacgatcgaagatgaagcttgtgctattaactaagccaattactcttcttacattaaccctaagtggcactttattgttcacactagttttccgacctaacccgtcaattagaagaccagattccatggctcgaagcttcattttgtggcttcacggccttggcgactctggacccgcgaaccaacccatcaagaacttattcacttcacccgagttcaggaacacaaattggtccttcccttcagctccttcgaacccggtcacctgcaattgtacgtttacacaaccacttttctactctttttggcaattaattactaatcatgtgtgttttagtttcaaaatttgtgtctatcaatgtaaatgttttgatgacataaaatgctattactcccatgggttttcgtcctcttctattcttttgtttgtttttgttattttaaattgtttggagaacaacgtaagttttgttcccaattacagtggaactgttatcaatctggtgttcaagtcttttaacttttgtatatagaaaagaattaaacctgttttgaggtgacaaattcgttaaattagcaaaatacagtatgagtttatgagttatcacttgacttctttcttcttttcgtccttgtactacaactaggcctatgattcactttaaaatggtaggtgtcattcaagataaggactagtaaattgggaatctttattctcttggcattgcagaacaatcttatgttgataactttagggttgtctttttgttgtagatggtgctgtaatgccttcatggtttgacattcatgagattccggttactgctgtaagtactacatgtttcatacttcttaaatttgttttctaatatgttatagcatgaattggatggaatctaaagtaaaagtgttgtagtaatttgattacaattaagttctgaactgtttgagttagtcttcttggaacctatctagcaatatcttaagaccttcttgcctcctcatgattgtaggtttcattaacacgtttagtattgtagattttgaaaggagattcttaaaatgtttcaaaaagttgttctagaaaatctcaccattcatttaatttttgaaaacaaaactgaaaatggttccaagtagctcatttataacatcatttttttatttattactattgattaagttaataatatatttcaggattcaccaaaagatgaaagtagcttggttaaagctgtacagaatgtacacaagatgattgacaaagagatagctgctggcactaatcctaataatatatttgtgtgtggatttagtcaaggaggtttatctttctccttccttctatctcttttaatcttactcgtttacatcactgcattatttgtctgcatttactgctactaactttatatttatatattgaacaatctccttaggcgctttgactctggcaagtgttcttctttacccaaactctggggggaggtgcagtattcagtggatgggtcccctttaattcatcattgattaatcaaatttcaccagacgccaaaagggtactccttaggataattttgatatgtctagtcttggtctgcactttgttttgtttcttctcttgtcattttccgaagaagtaataagaaaatgcacatgtagtaaggcccatctttaattgctgtgttgtaaataatttaagtacaatatgattctagcttgagttgtaaattatgttataatacattatgacttatgagtcccaaacatgaaagacaattccattcgtgtattttttgtgtttaaacaatttctcatatctaaatcttatatgcagactcctattttgtggtcacatggaatggatgacagaacagtactgtttgaagcaggacaagctggccccccattccttgaaaaagctggtataagttgcgagtttaaggtaaaattacttctgatcaagatattaattgacctttttcttctttttaattttgtaataatgttttgacccgtgacaaactctgctttattatttgaaggcgtatcctggtctttctcattcaataagcaatgaagagctaaagtatctggagtcatggatcaaaactcgtctgcaaagttcttcttagttcctacaaagtgataactttcaaattcagagaaacccag

SEQ ID NO: 220307 - DNA, 2570 bp, Cannabis indica
tttttatgactcatgtggatcaattttcgaaaacttcaagtaactagagtctactgtatttcaaatggaggaatgataaggaaataatgtctattaagcaaccttgtgattttgcttacgaatttgggaatgaccaatttgatttctattagtgcctgcaagactttcttagaccaggtcagattctccaattattaaatcttcatgagcactaagtttattttaaagaaggcgtgttcctttctaagcacaatgtctaaacttatatactcatgatgagtttacaatatggtcatgtgactctatacatcttagaactaactttgatgtagtttattgttgtattagctatgtttttattcttgcgataggatggttttgtcttttctattatttgaataagatgattttgtcttttgaggtacattttccatatagaaaggggcttacaagttgatgttccaaattttgataatgtcatggatgaggcaaaggaaaattcaatgaatgcttaaaagaaggttattatctctttcatgtcttttatgtaatacatccaattttaatttatcaatgtaagatcatattctcaaagtagttatgcagctatgttctatatgattatcttaaactataaataataattactaagcatacgtgtcatgcactttacctattataattatcattcatgcttttgtattttgtgtttgcattagttttccattttgttattttggttcttcatatttctctgcgtttttgatttggctttctggctattatggaaattatttcttgtttatatctctcaattattttgtaagtttgcctaaacctcatattagaagaaaatataaaactgagaaaatgtaacttttaacgatattgtagcaatctatataaaatttaaaacttatagcatttgtaaattttttgaataatagaatattatgtatagctttcaaacatttgttattattttgggacataaaagaagatttggataaattattgtgtttttttagagaaacttacaacttttaagattgttgctctactttgtccatccacctagtatatatataatgtattaatagaatacatgcagtttttcgagtcaattgcaattagttaggcagaggagaggacttggtggttgtgttcgaaaaagttgtttctaatttgtagacgattgattcaatgactgagtttttgatgatttttccgagcatatatactgcaactcatacctctcattattttcttatgtgagtgaatgggataaagtttcacttgattatcaagttaaaaatagactcatggtaatatataactgattgcttttattgtggatataataattcttgacaagaaagggaagagaaaagttaattttttcttggttcaatcttcaatatggttattgattgttgaaaaaaaaaacagagaattttaagacaaactgaggagtttcaggctgatgatgtttatggaggtggttcttttagctcttatttatgttttttcctcttctttgttatcaattaattaaacatgaaagtaaaatttgttttctgagcttcccattttaatgggggaggttatttttatggtagtctttgttcttcttctctatttccaagtatgtgaagaaatgccaaattctgaactttagctgttcttgtatcccaaaattctcagctactaacaaaagattgaacatttaaatttccccttttctctaattttacattcttctacagtagcaaaaatctcctcactaatcaaccaaattaaggcatttttctatttcatgtttattgacctatattaggagatagaattggtggactaatgattttttgtttttattttcctttcaggaggtaatgatgaatacaggactagcttcactgagagggaggcccgcacaatcaagaagagcaagacaggttagcattaccctttcttacaactcaatgagataattagatgcccaaaaagtaaatatcatctcaaaatcataggttgaacctattcattcttttggcaatgcacagaaaagtttaccaagggcactgagccggttgattagatcacagattatccaaattcaagagttgtttttctggttactttttcaagtgttattatcaatgtacctctctccaataatttacacaaacaaaataaaaaaaaaaaacaagagtttctaaggcaaactgagtgttaagatcgagtaaaaagatgctgaatgttctgtaatcaaacacttactcttgtagtaatttctttggttctttatccacatttgtcaatatcttcattcctcctgaatcaacacttgactcgtgtagagagaaatatccatgtttaatatagtgcttattgatgaatttctgagcatggctggcaacctgagatggagttctagtcttgacgtaggactctgagataagtttccatctacctctgccaacctcttgtaaccctcttaaaaacctaatgtgttcatctttcttccaacctttgacattaaaaggcttgtgttcttcctctttccagat

SEQ ID NO: 220308 - DNA, 3568 bp, Cannabis indica
aaaaggcccagcacaaataatatctccttccaccattaaggaaagcaaataggcccaatgaaaggcgccccattgatagcattggggccttgcataattcttagtattttcctttttttggttacacagaatggatgaactaatatagtttcatactgaaaaggtcaaaattgtgtacatagaatttttttaatttatttgagacatctcgttattaaaagaaaaactaaagataaatgatattaaaaaatttacacattatttattgaaaattattaaaaagaaaaaaccatttaggatttttgttaaatttttaagtcagttaaaaataattcccaaactatctacagtactgtaaagtagtcctattaggttttgttataagcaaggtaaaataataaatatgtcataatttgtgggtaaaaataatatgcattaatattacaaaaaaaaaaaaaacttttaatgcaatttaatatcaaagttttttacttattttaaattgataattaatataaaaaaaaaaatcactaatcacacatgtactatcgatcagcaattaattaatggcaactttagttggtacacaaaaaatttcatgaaaaatttcaattcctagttgaaaaaaaaaatagttaattttggtaatgagagaataagataggagttgtttaaattaattttttatatgtagttttttttcttcaataaattgtgaattaaaatgacacttcatttatttagagtaaaattgtttctccaagaaagtggaaaagtttctctaacaaaagatacgaagataattaatttcttttctttctttcattactttcttaataaatgaggattaaacaattagattgttgagcgaacttaattaattatgaactctagctacgatttcgaatgtgactatgagagaatgtaatattatgaacataaatatagcacagtactacgtctacatatagtatatacatacaggagtacgtaatagtacttaggatagaacaaataaatatgcatcgatcaaaatcaagtcaaatgccacataccatcgatgaaatatcaagtaaaacacactagaaaatagacttaaattacagtttacagcatcatatataaatatatatatattgattagaagggaaggagatgagcagcagaggcagagcatgcagtggcagtagacggagcagaaggagttgaggcagcagtggcggccgcggcattacgctcggcgtggcagagctgacggagcttggttgggacgtaccaaatggagagacgcggatgggtggtgaaaattgaatcgatgtcccatgcagcctggcgagcggcgatggccacaagtggcttgtagcacgcctggcgccacgccccgacgttctcgcctcgctccttgtacgcccgcctcagcgaattggacccctcttcgtcgaggcaatgcagggcgtaacaatgcacgtaatgcctcatttttggcttgttaatgtggctcgccccagccttttttgcaaacctaaacacctcgtttgtcacctgtacgtacgcacatttcaatccatattatttatttatttatttatatattacaatcgcaaatagtattttacctagtataaattattgagatatgatagaattaatgaaagaacggttatgtaataatattgccaaacaaaacaaagcacatgtttcgaatgtactatagcgtgttatgagtgtgatatagttaaaaagaaaaaaccttatgaccacccacattgagaattgtgagtttgtgacaacactaatccaatgtgtcaaaaaccgacaagtcaatcatagagattcgtcgtatgattaggtgtttaagccagttgtcaaaagcgggtgtttccacgtggagttatatatatacttttgatttaaaagaaagaaagaaagataaggacactgaagtagtcttcacgaaagtagaccactgcccaatacagtaattcagaccagcatgggcagaaagcaacattaactattaagtggaacgtacaaacacataccatttatattcgctaattaattaattcaatttattttatgtttttttttttgtttataattttcacactctttgatttatttatctggttagacttgaacccaactagtcttgttgagttgtcaagttctgtttggaacacctgctcaactcagaaatgggtccctaacaaaacccatcagtcaccaaaatgacagaagaccccaatttccatctccctactgaactccatccaggtgaaactttcatcggaaagcagcagcatatatatatataatatctattttaaaaaatataattaattttagggtaaataagactgtttaataaaagttattaattggagtcaataacttttataaattgacaaattaaattttgtatttgtttaaaaaaatggttaaaagatattattgatgattaacacggacattatataattaattttaaaaaataatttttagatgattcgaacatcgtaaatactcacactagcaatactcaataacaataatttttttaaatcaaaaaatattataacaaaactgactaagttcataaatactatttatactattaaaaaatataaaatccattttaatcattaaaccaacaattcaatcaattatttttggaaaatacaactaaaaaatggttaatattattattttaaataagcaaaaagaaattaccttggtagggcatttatcaccgcgctccttggcgatgctctggacttgaaacaagaaatcacgacactgctcgtagagatgaaagagataatcagaccgttcttcttgccacgtgcaacctccccaggctccgtcacgataaatggatgctcacgctgtctctcgcaggtaatcctgatctgatcggaactacaactattacttcgaccgctctcctttccaaaaacgacattattattattgtcgtcgtcatcttcgtcgtattcgtcgtcatcctcctcctgatccgcagcgtcgtttatgtcgttgacgaactcgtgaatgttgctatccaccgccatcactctcctttgtgccccctttgagctccgccgtctctgcttcttattattcctcctctctacatgagaaatcactgcctggttctcccattttccccctcctcctcctccgccactccccaccatctctttctcttgttgtactggctcctccgacagtcctgatatatgatattaagggattatagagttttggtataccgtccttaacagaaaaatgttagttgaagttagttacattagctatctctttctgttattgagttagttagcagctcaatcttctttactcaaatactctgttcatgatcattatactctcaaatttatatattaataataattacaaaaaaaaatattaaataaaacagtgaatttcttcttataaaattgagcgcctagcctaagcacatggcttctgttcattgaagtaacagcaagtaataataatttataaaagatacatacggagggaaattagttatatatatata

SEQ ID NO: 220309 - DNA, 2429 bp, Cannabis indica
ggcataaaacccaacacctttgacatgtttgttcagttagagtcacccagcctttggtgacaaatctggctgaaataaaactatccaatcctactctacttcgacacagactttagattaaaatagtacccgatctcgtaaagagtgagtaaaggctagcctagctccctatacaagataaacatcgttgagagatacttgatgctcttcgacatgagttgtgttgggcacatcccaatgtaagcagcaacgtctagtaaatactggttaagtggcagtattagcccatgatcgatgtggcacccgaaccatgccaacctgcctagagggggtttgtgcactcgacagtttctatgaggaatctcgcaatggacgtatcttattaaaccactagtaaggatcttactaaaggcctcatcagtgagagcaaaagtaggcaaaatccaactccatttcggtcgtttcgcttccattgtctccagctcatgagactgctctaggacatggtccagtcctagctttaaaagctcactgagtctattcagttgattacctcgggcgtcatagtggcctaaggaacagttagggaaggtatcacacgtccgatacctcctcttcctcaatgggacaacctcctccaactcagattctgcataacaactctcaactcctgattccatctcttgcttagcatcaacagggggttgagcagtctcctcctccattctaactcaaccctgtatggccaccatggccacgtgaggatcatacataggcgccctacctatagtctattttgttctggccataagtacgaggtaaataagagatttacgtagctcacctcccctattcaacacttgacactacctacatggaagaaatgaggggaggtgagaaacttgacaaagctacaaacatattcaagtcaacggtacccaagggtaccttccaagtaaaataaagtgtgcaaggtcgataccaagtaccgtcttaagtacacttactaagacatatagtaagtcctaagttgtgtaattgactataatggactcaccacctagccttatacggagtttcaaagagaaaccatgcatgatgccacagttgtatatgcctccaaggccgtcatgagaccttagcagaggtcaaaagagggagaaaaacaggctacccacttggatccttggcccttgccgaccaaggtttcaggtcctagtggcttgccagaccctaagacccagtctagtgcccgaccaagaaccctagtacaaggcataggccggctagcctagggacacagtccccatggccggcaagaccccatgaaggccacctatacccagccaggctaaataagatctccttggacggccaaaatttcaatggatcagaacatgtgttttttcaagaattcaaacatgttctttgtgttcttcatgattcaaagagcaaagaatcacaacaaaggtcagatttagttctttcttatctacaaatcacacattatctatcctaaggctatcatgcgaatcaaaatactgaatggactacaatctattgtaagaatcaaagcatgtttaaaacaataaataatgttcatggatccatggaaaaatcaatcaaacaaagtgaaatggtgagaatagaaagcttagtcactacaagattttgatggtgaagaaggtgggaagcttggatcgttaaaatagtgcaacaatcctgagaacaatggtgcttgtgggttcggccacctagagagaaggaggagatttttgtagagcaagtttctagtgagagaaagtgaaaagtgaaaaaaggtttttcccctaaaagtcacttatgtagtacatgtgggccccttttcctcacttacctcacctacacatcataaaggcaactaaaggagttatttctctactgtaatgagatcagacagtcatgacaaggtgttttaaaagcacatcatcttttattcaagaaaatgctataaatggctagtagagtccttatctttatagttgtctgcatagggacttgggggcaaatgttatcccaatttttgtcctcctgacatggcatgcttacgtggagaaaatcagttccacgtggttgtacaactcacaataggaaggccaagttagtacctgaccaaacagagaccacaacactcaaataggcatcaagtgacagactatctccttcttaagagttggctggccacccctggccaacaatatggccgaccagccttgggactgcactatggtcagctagccttgcctccacaggggcctagcttgctaagaaatgcaatgtaggctttcttaaacacttatacatgtggaaagcaacacatgggctgcgaattgggcactataaccccaacaaaatagctgaataatatctagaatcaagggcactttggt

SEQ ID NO: 220310 - DNA, 2575 bp, Cannabis indica
attatctaaaaaaaaaaaaaaaaaaaaaaacaaaaaaaaatatatttttagaaattgtcataaatttacaatgtgtttattttggtactttaacattttcattttgttacccttttttacttttgctacttaccttacctccttggggaaaggctaaagccctaaatcgacacacacagacacacaccaggtgagccttttcattctctcttctctgcgcccgagtccctaaatccacacgcatccactcatcaccctcaactctcaagtttcactctccaccaccaccaagccgcgaacccagtccatcctttaccctgacggcaccagacaaggcaccagctaccagtccttcgttcacgtaggcggcaccgccaccaagtcttcctccacccacgacagtgacgacaccaccataagacaaagggtatttgttactattttatgtttgttattttatttgagtgttctagactaagcttcaaatgttaatgctatttttatcattgaaatcatattcaaaacaatgattggattaagaataagcaaattttgtgtgtgtgagagagagagagagagagatttaagagaccaatttattaagaaacatagcattattaaatgtgaataatgcttttagtttaactaaagatggctcagaactgctcatcaatggagttcttatgtagaattgtatcttactttgttgagaatcatatggttccattttaaaaccaattggtgataaatggagtagctcatgctcttatatatagttcaatactctactatttatttcatgtgagataatatccacaatattatctctcaagatggtggctattttttgctcaataattacatgcccgtaagggatataactctgataccatgttgagaatcatgggattgataagtagagtagcctatgttcttatatatggctcaatactctactagttattcaatgtggaacaatatccacaatatacttctcagcatccctaatagcttcaactttcttaattgaaagaggtttctcatttggttgaaactgatagatttgtattctacttagcattcctaacattttggaagagcatggaaaaccaccatctgttggaagccgctcacacagcagccttcaaagaatcagaaagtctggaaggaaaatgctctaagattgaaggctacgatttcaatcagggagtggactacccacgcttattaagctccatggtcgctactggcttccaagcctccaaccttggtgatgccatccaagttgtaaatgaaatggttggcttagcttctcttcttctccttatacccgttcctctttcaaatgcctctctcaattcatctttatttttttattaaagctagattggagacttgctgatgagactataggcgaggacgccagtgaagaggagaaagttttagattttagaagctctgtgagatgtaaagtctttctgggctttacttcaaatttggtttcatctggtgttagggatacaattcgttatctagttgagcatcacatggtggatgttttagttacaacagctggtggtattgaagaggaccttataaaatgtcttgcaccaacttacaaaggtgattttgctctacccggagcttatttgcgctccaaagggttgaatcgaattggtaacttattggttcccaatgataattattgcaagtttgaggattggatcattcctatttttgaccagatgttgaaggagcaaattgacaatgtgagtatcgtgttttgttatgcatgtttcattgtttgagtatttggagtatttgctaaacctacaattgatgagcagaacttgttatggacaccatctaagttaatcgctcgcttggggaaggagataaatgacaagagctctttcctctattgggcttataaggcaagtatttactttttcaatatatcttgcatataggctgtgaagattatgaatatattcttagtcatattatcgtttttgttaaacatttggctttgtttacttttattggcaataatcctattcagcttgttaatctcattcttggtgtgttgatcaattttaaagatttttttttttttaaaaaaatcaaagctttgaagaaattagtatcaccacaatccattacactatatcatcaaatacaagatttttaattttcacattataaattgtgttaaaaatataaattacaaagatgatattttataatataataccttcaactgttgaaagcagtatttgtttgttttattgagtttagtgaatgagtgtatttggtttttttttgtttttttttttttgtgtgatggaatgtttctttactctggtttttctttatttcatcagtaatagtttctacttcttagatttagttgcctcttttaccacttttatgccctattttctagtagctttctatatttattgaaaggcaggcccgcttgaagggttgcactatttaaagctactgaaataggatgacttaaggtagcagagataatcaattgatgtccatttggatgttttgcagaacaaca

SEQ ID NO: 220311 - DNA, 1334 bp, Cannabis indica
aggcttcagatgcatcaagaacgctcttgcttttggtatgacagatcataatattagccactactagcattataatcgtgatgtgggctcaacacgttggttgtattgttatgatagcatcaatctatacccgaaagtactattggccataatattattcttaacaagtactatactcgtactgctgactcagttatatagttggtaccactatgatagtgtcaattaatactttatatggaattaaataccagtcacacccagcactatactcgtatggctgacccgacactataatttgtgtgactatggtactaattcatgcatttcgaccactacaagcactataattgtgctgcagacctgacactattgtttgtgccaccatgatatcaatgcatataacacataacgtagtatgaaatttacatacatacacatatacatatacatatttaataattattttatctggattcttgattcaagtgtgttcgtcagcctgaatgaaaaatcacgtgttgaacggacgccatgtcacaatcacgtaaatcgggtaaacaacttgttaagcctatccagaaacctaaactcaaaactagaagttttcctatcaataaaactgcctaaaaaacggcaagttgtttctgtaaaaacagcgagccgtttttttagttctacaccagtaaaaacggtagaccgtttctgcaaaaacagtttctttcatttttcactacagaaaaacaaagagactaaaagcaatcccaatttgacccaaacttcaaatcaagctctaggtcacctaataacatcataatagacaagtttcaagcaacagaacctcaaaatatgcagaaaattaaaaaccaccattgtagagtcaagtttgagttcttgaactcaaacttgctcaacaactaaactaaccatgaattccaactcaaataaacattactcaacttaaaattaacccatatggtaatttaaaagaaatatatatggtacatgtatgtttcaaaatttaatatattaaatgtatatgtataagaaaaatataatctacgataaactaaacttttctttctacatataatattttttttctttttcttagaaaattgttgttttttgtttgttttattttaatttattgttggaaacatagaataacagcaataacttatattattttgttgttggttattgtgaaaatatattttatttttaatattaaaaaaaaaaataatctaatatccaatattgcagattagattagatttgatttgagctttcgtgtggattagattggataaaaaaatataaaatttacactt

SEQ ID NO: 220312 - DNA, 2083 bp, Cannabis indica
tctatgagaattcatgtgacgatggctttcaattcctaaacctcaaaggatatatttatgagattttgtcttgtcatctgatatggttagatttgtgtatgtttgtttgtctgagattttttcgtaataattgtgtttgctgttcgtgatgagtgtcttttttgttcgtggtgattgtggtgatttgttttttgttgtttgtagtttgtctcgttgtggttggtttgtggctttcagtatagcatctagtagttctttgagggagaattttttggatattacgttagaaaatgagaatgatgggggattgttttgtgaagaagcacctgaggaagaggtggtggcttttgatgtctgttggtgtttagttgggtgttttctcactaatggtgcgatggatttttcctcgatgcaacaaccattggtggccatggaaaccaggtaagggtgtctacattaaggagttacatacagaaaggtacttatttcaattttataatgaaattgatattacgagaattttagaaaggattccatgaatgtttagttgggtgttttctcactgatggtgcgatgaatttttcctcgatgcaacaaccattggcggctctggaagctaagtaagggtgtctacattaagcagttgaatacagaaaggtacttatttcaattttattatgaaattgatcttacgaggattttagaaaggattccgtagacgttcaatagaaatgtattagtgatgcttagattaaggaatgacgagaatccaaggagcatcccgttaaactctttatatttatgggtccaaatctacaatcttacgataggatatatgactgagctgaaccttaagaatattggtaactatattgggaagattttagaatcagattgtaaaaactttatggaaatttggagggattatatgcggagtttctatggatttgaataagccactacaaagaaagatgaaattgaagaagacggaatcatattttatattgattacgttcaaatacaataatgttcccacgttttgcttcatatgagggctattgggacatgcagaatgattttgtatgtggctgtttgatacactattggacaagataaccaaattgtatggaatgtggatgaaggctctgttaaggagccaaatgaagctcattggagcaaaatggcttcgaacgggaatggaggagatgggtggggttcacatgtgcaccgttgattaagggcaggaaggtggttggagtggtttatggcagaagaaagtcgtctttggtatggtgtcgttggttgcaagagtggggcagcttattcggaggtttggtacccctaattgtgcgggtaatactgagattattggggaaaaatctctagttagtatgcgtgtatctaccacgattttaagagaggagtgatctgtttcaacattggtcaaacctattattaatgacgctattgtggatagtgttgatgatactcaattaaatgaggcgggttgagttttttggaaattaaaaggaggagactctcttctattgggtctattggaccaaatatactagctgaagaaaatggtaataaaatggaggtagagatgtcaaaaatcttagatttggtgggccttgtgaatgggactcgctaagagtcatgagttttttaagttgaaattgtcgtgggctaggaaacccaggggtcattcacttccttaatgatgtcactgaaaagaagccctcttttattttatttttttgtgaaactttttgtgatacaaatcgcgttaattggcttggtcattatttggggtttgaggggatgttttcgattgatggggcactcagggagtattgcaatgttgtgaaagaatgctaatgaggcaaaggttattgggtattctcagcgtcatatagatattattaaacgtgtggttggcttagatgattggagcttgatgggagtttatggggaagctaatcgggtacttcggcacaacacttgttatttattaagaactcttaaggatgaatcttcattgccttggtgtctaatatgggactttaataatgttatggat

SEQ ID NO: 220313 - DNA, 1425 bp, Cannabis indica
aaaatgcgatggatggctattttaataacatgggtaagtgaagaacctttttgttagtgggatatatgttagagaaaatagaataccaggtttgaagcagggttatggtttttaaccattttacccctagactttacattgcttaagattaggcttgaggggtattttagtaattttgatgagagggtttaggtgtctgcatgggtaaatggcagctatctttttaatttattttcagcaaaatccaaggataattgatcaattatctattttgagaaataaggaaacaagaaaaaaaatcaaaaataaaaaataagagaaattccatttctctttctctctctttgtttggccaacccaaaccagaggaaaccagcactaagttcttgtgatttctgagttttagagcaaggattcaagtgactttgaagttaacgtaacccctagaacacttactctttgtttttgaagctttagttttgtttggatgtgtgattttgagatataggggatgttagcgtttgttggtgttataatcaatttttaagtttaaattgaactggaattaggttcttgctgcaagttttgttgtatgtggttgtggatgaccaagtttgggtttaaacttgagtcatcaatgtcatgttttgattcagggtgtttttctggtttttattgattgaaatatattgtggaagattattataggtgttctgtaaagtttggtggaatttggacaagttttgagcaagtttggaattgtttggggatacctggtgcaaaccggttaactggtttgcaagcagctgtaaaatcggttaaccggttttggcagattccccgaacaattcattttctcaactcgtgtccacttgggttatttcctatttcatagggtattgtggttccatttagtattaactgaaccttaggttggtggttcaggtttcccgaattaggatttttttgcatgttatttacctggttttaatctgtggttagggcatccatccagcacgagacttttcgttcaggttagccaactcacttgattcgaaaaagaggtaagaacagcgtataatatgtgatataaagatgagaatatatgcatgtgttaaatgtatatgcatgctttttatggatggtacactaccaacacttgtacggaaatggtacaaagtgcattggtatagtgtatattgtttaaaaagtacattacagtgttactagcacaagtacggggaagtacatggtgtgtgtcgtgatcacttaacggtactcagggtacaaaacaaaccctacaaacacttgtataatgttagtacaaatagtatgtggtacagtggttgtaccctagtatggaacgttcttactcctttgttaagccttgtaaataggtgtatgggcgcctagatacaagtcgat

SEQ ID NO: 220314 - DNA, 1985 bp, Cannabis indica
tttatcaaaaaaccgcctctaaatgtcaatttcgaaaaaaacgggtattttcacaccctttagcttccctttttataagtgggagtgaaaaaacagcctctaaaggccaagattgtagtagtgtgttgttttgaaggctcttttttcctacattctgctgtcaaatgacccaatccttcacagttggcacatagaacaggcttccattcatatgataaagcaactgtagtattgcaacccttgtcatcttcaaattctatgagctctggcagttcccgtttaatggcaacttcaattaaaacccttggaaaactcaacttttctcttcttttcttttgtatcttcatctaccataactggctacccaacttgtccaattatcttgaatacaaattctccgtccagtatttcaaatctaagtcatcaagattaacccaaatcggtaccatcctaatgacccctttcttcacattgattgagggctgcccaaggttttatgactaccggtctgcgattaaagaaaatatatcttccttggagaacagaatctccttggtttcaactgagttaaatcgtattatgtatatgccataagagagtaatcctaccctttctatcttatctgcccatattcttctcacaaaaacacggctaaaggaggattagctcctaaaatatagcacaatattgaaggcttcaagaaatccacttcatctatcatcttttgttatcttcaccttattattcaaggaattcgaaaatagacttcgtacaacagaaccagacctcagaacaggggtattagtgtccataccttgggatatcttcactgaacagtgctcggatgtcaatagtgtcttaattattgaacctaatatttttattattattttttttactttatactacatttaatactgaatacaaatttgtatcaatttttaacatggtatacaatgtagaaaaaaatgacaccccctcacttacaaagaaaagtgtcgtccccctttaacttaaatctcagatccgtgactgaaagttatcttaatttaaaggtagttgcataatattttctgtctattagataaaatatatcaaacttggaaaatgctcacgttttataattatttgttaaattagatagaaataactgctatcggaatcctatacacgttgaagaaagcacagtcaattttttcacttagaaaaattctatcaaattgtattctgtaaatcaagaaagccacaagtaaaaatgatttgttgagtatgtaaacttcactacaaaattacataaaaaaatcttcatctttattttataattaatatttttagagaatttattatagatttataaattatatccaaactttatttatattaacgaatattatttggtgattattatctccttcccttactccaacactcattgtttatattatgtatgaaacggcacctacaatattattacttgcacacaataaatttgagggttgagatagaccattaactgatatagaatatagttgtttaagtggtaaccaaagacaattttaatttttccacttttggatacacgccttaaaagtagtgttgatcttcgtggaactcacaaagaattcaatcgtattaatattactctttttgtgtaagacacttgtgtacgttcattatctattgcatgcacatctccacactcactagtccgcaactacttcgatcttcttcttcttctccattcatttattattgttaattaactccttttaatgcacaacgtcaatttcctacgtttcgttttaccacgtaagctcatacgtgttcttccattaactactcgtcatcataatatttatatatatatatatatatatctttatatattaaaagtgcctatctcacggcaattcttggtttaacgattcttggtttaacgattctattaacttaacagactgttaacgttaaacgttaacaaataa

SEQ ID NO: 220315 - DNA, 5205 bp, Cannabis indica
tatttatgaattttttttattaactaataatttgaaatagttaatatagaattataattaaggaataaggatatagataattatgtagatatttataaaaaaaaaatgattttttttttttgtgttatgggtgcatataattttcttaattaataaatatatatattttaattaattattaatatttataaatttaatattaataaattttttaattgattattaatcattaatatttataaaattaataaaaaattaaaaaattaagaaaattaaagaaataaaaaataatactatttaattggttttttttttattattattttgaggtcctttctcgcgcctctccctctcttttggtgacccaccggagctatggcgaaaagggcgaaattggccgggaaagttaaagctaagggcaagaagacaggtccttcatcttcagatagggtcatcaagaccagatccatggatgaaatacttggaataaaggaattagaggttctagaggctttcgaaccagtggaacaataccaagagcttccctcccctgctgcgactgaagcgttccaacgaagtgagtttcagcaggaattttctgtgtggttggatgttgcaaataagacatctcaggatgtaagtactgggacctcccctgctgcgactgaagcgttccaacaaagtgagtttcagcaggaattttctgtgtggttggatgttgcaaataaggcatcttaggatgtaagtactgggaagaatccttctcccccaatacttagatctagtgttgttcgaaatctggaaactgcgttcaaaggctcggagttgaaaagtgaagagaaagtgcagggttcgaaaaacaaagtgaagattgagtttgctgacattgaggatgaagtcaattactgacaaccatcccttgtttgctatgtaattggtgcaaatcctcctgtcaacattcttgatggcttcgtgaggcgtatatggaaggattctgtggtgaaattagggctgctggctaaggggattttcatcatcagattccaaaacatggaacagagggataaagtgatgcaacaaggatatgtattctttgataggaaacctatggtgatgaaaccatggaatcctattgatgatttcaccaaggaagaagtcaccaatgtccctacatggattcaactgaaaggcttggatatcaagtattggggggaaacttctctcttcaagattgttagccaaattggtgacccgttgcaagtggataatatcacaaagaacagagatcgacttcaatatccaaggattcttgttcaggttagtctttcacaggaatttcctagcacgatttccttcactgatgaatttgatcatgacattgatttggaagttaaatatgaatggattcctcttgtgtgctatcattgtgctggtattggtcatgagacaagtaattgcagaaaaaaagagacaaaagaggagaaagagaaacaagtgtgggttccaaaacagaaacaaagtaaggagaaggaggggattgatgaaaatgggtttcagaaggtagctaaagggaaaaaagtggttgtggatgaggttgtggccataaccgaaatgaagaacatgtttgattctcttacagagcacatttacattgggggggagatccctctacttccaatggataggctgctatgttggaatgtaagggggattaacagtcaacagaaacatcaagaaatcaagaaattgattcactcgaagcaagttggcttggttagtctccttgaaacgaaggtacagaataaaaatatggggaaattgtatgctagtcttttttcgggttggtgcttttcgaataataattcatggttggataaggggagaataataatggcgtggcaaccaaatgtttacactgtcgacattcgattttgttcaagccaaatgatgcactgtttggtgcagttcaaacaacaccagggacatttccaacttaccttgatctatggattcaatgatgagaataaaagagagcaaatgtggcatgatttggaagaattgggcaagaacattaaggagccttggctagtaatgggagactttaatgagatccttaatgctagtgagagggttggcaaaagagctgggaacaagccatcacaacggtttagagactgcactgatcaatgtggtttaaatgatttgaaatttttcaggcaatttctttacctggaacaacaagcagaagccggatgaaaggatattttctaagattgacagggctttggtgaacttggatttgatggagtctttcgtggattcagaagctgtcttcctacctgaaggtatttttgatcatagccctattcttgtatcaatatacttagataggagctttggcaaaaaaccttttagatattttaatatgtggagattggcaccagggtacgaagatagagtgggtcaaagttggaatcagccgattatggggactaaaatgtttaaagtagtcactaaactgagaaggctgaagcaggtattaaaagatatcaacaaagaggggttctcggacattcataaagcagagatcttatcgagggaggcattagcagaggctcaaaaggaactgagtactgatcctcttaatgaggaaaaaatgagaattgaacaggatgcaagcaggaactacttagaaatacacaaggcttattcgttattccttactcagaaggcaaaggtgtcatggctaaagtatgaagatgaaaactcagccttgtttcatgcttcaattaaagctagaaggaacaataaaaaaatttctattgaagatgagaaggggaattggtgtgataatctatatcgggttcaacaagcatttcttgagtactatacaggcctgctgggtagttctttggatcaaagaaggaaagttaatcagagtattattgatcttgggcctaagctcaatgaaagccataaaaggatgttgataacagattacacaccctcagaagtaaaggaggctctctttgctatccctggtaccaagtcccctggtcctgatggatttgagagtggtttctttcaggataactggcaacttgtgggatctgaagtggaggaagcagtactctctttcctgaactcaggaaagattttaaaggagatcaatgctacaaccatcactcttattcctaagctgacttgtccaaagagcgttgctgattttagaccaatctcctattgtaatgtactatataaaattgccaccaagatgatttgcaatagattaaggaccatcttgcctgatcttattgcagataatcaaggtggttttgttcatgggagattcattgtgcataatgtgttagtttgccaggatttggtaagactatatggaagaaagaattgcaaaccaagttgtatgatcaaaattgatctcaggaaggcatacgatacaattgaatgggatttcattgaggaaatgatgatagcttttgagttcccaatccaattcatttcccttgtaatgaattgcataagaactccaaagttttcattactccttaatggatccatgtgtggtttcttcaatgctaaaagtggattacgacaaggggaccccatgtccccattgctattcgtattgggcatggaatacttatcaagaatacttaagaaagtgggagaatggccaggctttaaatttcatgacaaatgctctagtatgaagttgaaccacctctgttttgctgatgaccttctaattttcagcaatgaggattttattacgataatgctgatgcttaaagggatgaagttattttctacaacctctggtctcctccctaatgagcaaaaaactgccatttattgctcaggaatggcagatggagatgttcaaagaatacttgaggcatcaaactttaagagaagttctcttccatttagatttctggggattcctatatgttcaaagaagattagtaaagctaaatgtcaagaactccttgagaaaatggtgagcagaatccgagcttggagcacgaggaatatttcttacatgggaagagtaactttaataaatgttgtcttgatctctattcacacttactgggcacagataatgatcttgcctaagaagttactcaaggatatagaagctgtatgcagatcctttttatggaaaggaatacaaggaggagcaggccctggtttaatagcatgggatgcaatctgcaatacaaaaaactcggggggacttggttttaggaatattcaacaatggaacatagcagctcttggcaggtacgtttgggacattgcaaggaagaaggactgtttatttgtgaggtggatacactcagtatatttgaaagatcaacaatggtgggagtatgatgctcccaatgactgcagctggtattggaaaaaagttgttggagtgaagaatcggttgaaggagaaacttgattctgctggttttttaatgcagcagtacatgattcaagttggatataaattgctcttcaccaacaatgaaaaagttccttggaatagagatgtatgggatagacttagtattccaaaatacaaattcatattttggctagtcatgtggggaaggttaaacatcaaagagaggatagccaaatatgacatacacatagatgagacatgtcttttctgtggaaaggagaaagaatcgatcaatcatctattttttgcttgtgattatagcaggaagtgcttgcaatagcttaaagcctggctgttatgacgaacaaatgcagattcaattcacagcctgctacgaaacattaagaacaacaaagctatatcagcaattcgcagaagcatgctgaaggttatcttagccggattggtgtatcatatttgggaggctaggaatgatgtattgtggaatcaaaaggtaagacctgttacagcagtggtgaaacaggtacaataggagagcaaactcagaattatagaaacaatgccgaaaaaaaccaaagatatagatagagaatggattggtaatatgtaatcatgtgctggaaaatgtaatattgtagtatatttacttacatagaacacataggaggggggaaaaaaagaagattttggatgtaatcaagtaagttgtaaatgttatgaatgttgttgagcaatacaagaaccttattcataaaaaaaaaaaaa

SEQ ID NO: 220316 - DNA, 2502 bp, Cannabis indica
aaatggagttttcaaaggtgagattcataatttttttctcattccccatctcgcgcgcctagctccaactctggcttctctctttctcgttcaagttctctctctctctttgattttttgttcgatgtgcttttggtggtacgatgggttgagtggtggcaatatttattacagctgttcttgttgggttgttgtggtagtccgaagggttatggtggtctaatagtttatatttttttagttttttattcttttgcctcggttcataactgaagcaaaaaaataatttgcgtcaatgctttactattttcttcggttataaactgaagcaaaagacttttagcatttgttaataagtgaagaaagggagatcgagagagggaggaagacggcgagagaggaggtcgatggtgcggaggcgtgggtggggttttggagggttaagatttttgtttcagggtgtgggaagtggagaagaaataggtagacatgtgggaaataaaatcaagtaggtgggcacgtgggaaatgtaacgagaagtaggtgacgattttttaatgggccattatacctgacggtttaaaatcgtcggctatagtatacccgacagttttaaactgtcgggtataagggcccaataaatcatgaattccaattaaaactgtcgcctattcctataattactgttataaaccatcagtaatactaatttttcgtgacggttttaaacagttatttaatttttttagcgacggtcccccaaaaaaagtatttttaggaccgtcgtgaattctgacttttgtggtagtggactcaatattaaaatgcaccaataacagtatgtcatctcttctggtgtttaacaccttaaagtgtcccttaacattttccttaaaatatagggtatttttacaatacatcccaaaaaaaatgcatagttgcattctatactgtttcaatatttagaaaaaaaaaaatttcatggtctgaataatttacaatactgaaaacagtattcaaacagtctatttcagacacgtataaaaaataaaagagtcacatgtgtcacaagctgtttaaaacttactcctaatttgttaaattttttcgaattgtttaaaattttctagaaaattttaaataattacaatgtaaacgatcatgaaaagaaaaataaattaaaacttcttctagaattactaaaataaatagggatagatgagtgcaccatttaatttaagagacgcacataaatttttcatattgatatctatatctatatatacatttataaactaatttgatatatttttatcaaaaaatataaaaatattaaagctacgagagaaacaatcaatcatatatattatataaaattataactgaaatattataaattagcacaagcatagattctacaaaacaaattcagataatatatatttatatcattggtggcttaattccactagacacttgagagcattgacctgcaactggaggcagccaatgtaacttgcaacttgtgtgagtaattgattatcatcagactctcccaatattatctcattccctccaggcaaaagtgttctcaatcgagccaaacggtcaccaacaatattaatatcctcttcttcactacttttcattgctacagtaccttttctctctcttcttctactcaacttcctcttcttcttcatcatcatcgtcatctttacctcaccactagtactactaatctcaccactcttaaaattattagtgaaagaaatttggtgcaaagaagaatatctttgatatgtggaatcattattattattagtatttttgttgttataattattcacactaatatctctttgaataataagcttcgcttccaaggcatgactccatgcaaaatagaactcttttgctgataatgcaaatgccatgtcgacttcaaatcggactgccttagctagctccttataattatcgccattttgttcgtcgcagaggcaaaacctactgctattttggttgttgatcttccttaaggctggtactaagtgactaagataatttctaacaaagtcaagatcatgatgaggtgatttgtatgtttggagaaggcgaacacgacgaattcgtttattcatcatctcactcccaaaataaaaaaaaaaaatgatgaccaaatactacaagaaaataataacaaagagtaattaataataatcggaatgttaaaaaactagtacagtctacaagcaaagctacatataatgaaagaagaagaagactatatcaagttaacaaaagaaatagacatattggaaaagcccctaagagaaagtatatattataaacgaagagtttggtgacatatatataaggtcgcaaagcgacaaactatctaataactttcacttaataaccaataagagctcctcctgatcattacaccaaccatgcacacattgacataatcatatctataatatttgttcagttgga

SEQ ID NO: 220317 - DNA, 1753 bp, Cannabis indica
gctttgcctgaatctccaactatgtgtgggccccaatgatgacttgcaaaagcccatctactggcggtggttgtaaatcttgttcattgtctgcttgggtggccctctggttcttatcggtcttgacatatttttgcacgtacgggttattcttccttatcaggaattcaatttcccgcttcaagttgttgcattcgttgctgtcatgaccataatctccatgaaaatggaaaaacttggacatgtcccctcttacttatgtcctttttcatgggagcaggtttcttatacagaactactgactgagtatccatgtagatggtctccaaatcgttggtaagtatagagaaagcaatgaatttagaatgattttctctaagggtctgttcgactttgccagcgaactttcccttttttctattgccttgcctgctgttgttgttagatcatttaccgcccgagcttgaattgcttgggtactggggcttttgaacagatgttccaagtgagggagcttgtgattggctcggtttaagctcgacatctgctcactgaatggcctcttcgagcttgatgaaaccatctgcgtgatcaaggaattcactcatagaatcttatggaccatctttcttgatgtccttccaaagctctccgagaaccttgattccccccggtatggcggctaatttcccttcttcagttaaccgtgccactttcatcgactccgtcatgaatctactgatataagctgagagaggctcttctggccttttcttcacttcgacgaggtcctctaaatgtaacgggagttggcgagaagaagagaattgtgcatgaaattccaaggagaaagccttcccttgcaagtccatttacatttcaaaatatttgagatgtgataggggatcttctttctcggtatacatcttccagattggcatcttaaacttgtgaggtagctctagaacattgatctctggagtaaatggggatccacgtgctcggtccaactcgagatcattgagcttttgaccgaccagaccttggaacatgtttttcagttcatctaaccgtgcttgaacggatggatgaacttgttcggcctcttggccgaccaatctcactttgggatctctttgagctagatcttgagtgcgggcccggggtgagtggttggtagaacacattgttcgtctaactctctctatttagatcatctctgagataatgagctgttcccagtctattaaatacagatgcaccaggttgcattagtgactagttggtttggctgagcacttggccagaaccgctcgtcttggcaaagtaattaggtataacccctcctcacgaattaccagatacggtctggttgcctaccgcttggcccacacgtggaacttgtgactggggatatgacggctgaccgttcagagtttgggaagtgtttccagctggatctttgtctaggccgccgaacgggatagtgtacgcgggttgctgataagcaacttggtagctcttcgtattaatacggtgccctatcttgttcagtcatcgatggctgcttgatgagccttcaatgtttccatctctctatccctccattcggcaaactgacgcctttgctcctcgaacgtgaggctcactgcaacacggagctcttcctgatcgtgatgcaaagtattagtatgaccttgcattagtccaagagaattatagaggttttcgatctcggtgtcatctccaatgg

SEQ ID NO: 220318 - DNA, 3639 bp, Cannabis indica
cccaaataaaaagtctaacattaagtacttttacctccaaaaataaatattaaatatttaaatatataaaatctaaaacattaagtatttatgccgcaatttaccgaataaaaaaattaaaatcttttgtacaaaatcgtaccgaaacggatatatgaatatgatatgagccactccctctaaactcctttttttaattacgccaaggaaaagaaaataataattattttaataagtggccaaaagctgagctgtacaatcaaaaaagtcacctctgccacgatatcatcaatacagtcaaaggggtcatgttaccatgtacggtgctccacactagatctacacataaattatatatttaggttatttctttttataacaataaatcataatttttttacttttaatataaattttattatagttaaaaataattttttttttaatatgtggatgcttaaccaaaaaataatataattataatatatatatatatatgtaagcaattaaatatatatttgatatcatctgaaataaaatacaatttttattcaaaattctcagaaacttttttttttctaattatctttataaaataataataacaaattaaattatgaattttatgagtaatatttatatttatatacataattatattaattttgtcaaatttatgccatgtcaaaataatgttttatcttgaatatgtcaatttcgagtttaaaggtacaatttagtagatataaaatgtcgtattagtaaattagaataaaatttgacaaaaattattgaatttttaacgacttaaaaagtttaaacaatataatttagtacacatcaaaattttgagactaaaaatcataattatccagtaaagttaggggtagaaatctgagccagatacgatgactcgaaactcacacaaaataaacagggttgtgtttgcctttaatgggttttggttatttttaggttaacacggctaacttgtttattaaacgaatcatttcaaattaacacgcttaacttgaaaataataggataatagcctataatttattatattgattacatgtaaattatactttttagttataaataggacataaatatgttaaattgctcataatgtgtcataacaagattgtaaacatattaaatatgttatatacatgttaatgagttggtaagttttagagagaaaatacttctcttattttcattataggtagccgaaattatggctgtgagaaatatgatgtgtagggtttaattacaatgtacagtgtatatatatacagtaaaaggaaaggcccagtggtctggtattgggccaagagaataaagcattctaatataccccttcaagataaactgaataagtttcttaagttcatctaggttacaagtgtatgaaaataagtggaaaaaagaagtttggtaaaaatgtcgggtatgatatttttggtggtgacatgtactagcttcaatgtgccttcgtggaccttctctcggacaacatggcagtcaatctcgttgtgttttgctctttcatgaaatacaggattctcagagatgtgaatggcggctgtattgtcacgataaaaaatgacaggatctttgtggtgaatgctgaagtcccgaagaagagctaacagctaggtgatctcacaagtggcatacattagccattgctcagtattctgcttcagcggaagaatgagagattgtagactacttttttaatttccaagagattagggagttgccaagaaagacacagtagccagaagtggaccttcaagtgtcactgcatgaggcctagtcagcatctgaaaaaatcttaagatgaaagtctgaattggacatgttagttttagcataaccatacaatttaatggaggagacagattgaaagaaaagtccttggccagaagtgcctttgagatatcgtaaaattttatgagctgtatcaagatggggagctcttgaatttgataaaaattaacttagtttgtttatatatatataaaaaaaaaatatcaggtcgaatgcgatatatttttgggttttctaatagttacccaatatcggatgagagccgaatattaggttccattggtgtagaagcaggagaagctcctaaataacatgcgtcagttaaaaattgtaaggtgaaaggtctttgggatacagaaatcccagagggagatcgaccaatttccaagccaaaaaaaaaacgtaaaggaccaagatccttaagtcgaaacatacaattaagttgttgtttaaaggaaagaacaacatcatcattatttgaggtagccactgtgtcatccacatatattataagagcaataaaaatgcctttgtgatttttaatgaataatgtgagatctgaaagggattgagtaaatctagtggataaaagataattgctaagttttgtaaaccattgtctatagtcttgtttcaagccatagagacttttgtttagtttacagacaacatttggaggaatgtctcctttaggtgtatatcccttaaggagtgtcatgtagacagtttcatgtcaatcgccatgaaaaaaagcgttattgatatcaagttggtacaaagaccaattgttaatgactgcaatagcaagcagtaattttaatgtattaaactttccaatgggggcgaaggtgtgaaagtaatcaataccttctttttggttgtagcctttagctactaaacgagctttgagtctttcaacagtgccattagaattgtattttgttttgtatacccatttgtaaccaatgacatgatgtctgttaagaatagtgacaacaatccatgcgtcgttggcttcgagagcattagttttggtgtccatggctttttgccattttgggtctttagctaccattttgtagctggtgggttcagcaatggagttggcagcgaggattgttgtacaaaagtgttgtgttaacctattataagacaaatatttattaatagggtaaggatggagtagcagtgatattacaaatgtaatctgaaagacgttaggtttggataaaattctttctgtttttgaagtgatatgggaatgaattattgactccctgggcgtagatggtacttcattaaaaggttggacatgtgtgttgatatctttcacactttaaggaatgtccattttatgagatgaagtggcatcatggtcgggaacagattcatgctcctcagaagggtgttaagatgatcttgtagagggcagtaagaatgtgagaataattgatttattaaattaggagagttagtgtcggatagtagaaaaatatctttctgaaaataaacatctctagagtgaataacttcttgagtgtctatgtttaagagagtgtaagctttcataccaggtggataaccaataaagacataaggacgagatcttggatcaagtttatgtcgtttggtttccaaggtggaggcaaaggcaagacatccaaaaactttaaggtgttcataggcaggagctttcttaaagagaatttcaaatgaagtctttttgttaagtaatatagagggagttcgatttatgagataaacaacactatttatgacataactccaataaggtaa

SEQ ID NO: 220319 - DNA, 3966 bp, Cannabis indica
tttattaaaagtaagaaactaacaactatacctaaatataagataacaaactgtgactaagttacatataatttttacaagaaacttaaatgttggtttaaataaaccattagtcaaaatatctactgatcttcaaatttcacaaatgagatacaaataacttccatttctaagttttcttttatgaagtatcgatcaacctctatatgcttggttctatcgtgttgcattgggttatgtacaatacttatagcaaccttattatcacaaataacttcataggtagactaacttcaagcttcagctcatgtagaacccgtcttatccacaggatctcacacaccccattgtcatagtcctgtactcggcctcagcactacttgcaaccacatttcactttttgcttctccaagtcaccaaatttctccatacatatgcaatacccagaggtagattttctatcagtaatcaagccggtccaatttgcattagtaaatgctgcaacatttctattgtcaacctttttaaaaagaagacctttacctggactactctataaatacctcaaaattcgataagcagctttaagatgttctttataaggacagtgcataaattgactcaccatacttaccgcaaacacaatgtcaagatgagtgtgacacaaatagataagcctccaactaaccgttggtattgttgcacatccactaatgttccgtgttgaatgtcactcagtttcttgttcgaatcaataggagtatccattagacaacactcactcattcctgcatccttcagaagatcaagaatgtattttccttgggagatggcaatcccttttttcgaccttgcaacctccatagctcaaaaatgcttcatttcacctagatctttgagcttattttcattgcctctaattcttctagatcatctcctgtaagtatattatcaacataaacaattaaagttgcaatctttccattagttgagtgttgagtgaatattatataatcagcttgtgcttgtatattgtcttgtttcttcaccacttgagtgaaacctttcaaacaaagttcgcagtgattgcttcaagccataaatagccttttccaacctacacactttatttacaaacttataaagccaggtggagggagcattctccacatcaaattgcctcaaaggccattctaaattagctcaatagacaacaagatccgaacaatattaagtttggctactggagcaaaggtctcaatgtaattaatattgtaggtttgtgtaaaccccttcgcaaccatccgagctttgaacctctctaaagtgtcatctccattaaatttgggcataaaaacccacttacagccaattatcgaagcacctttgggtagcttttcaacttttcatgtgtgatttttctccaaagcactcatttactcaagaacaagacttcttccactctagaacatttagagcttcctgtatagtatttggaatctggacatttgatattgtcaaaaatggtgaatgaattacgtattttattcaataaaatagtatgtatttaaatacaaaattagaaagtaaataggaaactaactaaatataattaatatagctaatatattataacactccccctcaagctggagcataaatgttaatcatgttcagcttattacaaatataatcaacctacaccccattcaaagcattttgtaaaaatatctcctaattgttctacagtcttcacatatcctatggagttcagaccttgttgaatttttaatgaacaaaatgataatcaatctcgatatatttagttcgctcgtggaacacaagatttgaggcaatatgaagagcagtttgattatcacaccaaaattttactagaactgacattttaaacccgaatgcagccaaaagctgataaatccatactatctcacacacaaactgtactatagccttatattctgattccgcattagatctggacacaacattttgcttcttactcttccaagagaccaaattacctccgacaaagacacaataacctgaagtggatcttctatccaccttggtactagcccaatctgcatctgagaaacactcgtctgagtgatccttttaagtaacacaaaatttgctctagggctgcccaatgatgaattgttagagaagacataaactagctaacaacactaactgagaatgcaatatctggacgagtcacaattagataatttagctttccaactaatctgcgatacttctcaaggtcttcaaatggttctccatcactcattagatgcatagcaggattcattcgagcactacaaggttttgctcccaattttttcttgtcccgttaacaaatcaagtacatacttctttgagatagaaaaataccttgtctactctgaggaacttcaactttcaagaaatacctgagcacccccaaatgcttcgtgtgaaactgggtatgaaggaatgatacctctagtatcatctccagtaataacaatatcatccacatacacaaccaacaaaataataccggcagttgatcttttataaaacacagaataatctaacttatttttcaacaaaccaaatttcttaacagttaaatttaccaaactaagcacgaggactttgtttcaaaaaatatagacttgcgacgacgacaaactttccctaactcctcctgagcaacaaacctaggaagttgctccatatactcttctttctcaagatctctatgaagaaaaacatttttaatatcaagttgatgcaaaagccaatgatgaatagctatcatagaaatgaacagtcgaacaaatgtcagttcagcaacaggagaaaaagtatcataatagtccactccatatgtttgaggataacccttggcaataagacgggtctttaagcgagcaattatttcaattggattgactttaaccgtaaactcctatttgccccttatggcccgtttttctaaaagtaaattaaccaagtcccaagtaccattcgcaactaaagcattatctcttctattattgcaggatcgaccttgagatgagacgaatgaggtggccgccttaagctccttaccgctcaggcccccattttgaaaaaagttaaaataaagttagtaataaaataaaaatattactcataatactaaatatatgttgcagcttagtggtaatttgattatagtaataattaagaggttcagagttcaaatcccaacaacctcactttttcacttgggccccaatttttatttttgcctaaagagggtcgaccctaatcattgcaacaagtcaaccaggatgagacatgacttcacgaatattttaaaaacagtaaaagaagcaataaaaggacaagaagaaaaggataaatgattataacaaacaaaagaagaaataggataagtacatttgcatttacctttacgtagtacaatgggaagatcatcgttagggttcggatccgatgacaaagaagcaggtgcaggacatgaaataggaggcaaaagaggcggaggagtaggcatgtcaagagttgtgaccaagtcgagagactcgtcaaaacatgtgtcagacgcagaagatgtgatggaatataccaacaaattgtcatcctcccctgatgagtaggagtatgtgaagatgaaaaataaggtgtatttattttccacaaaagtaaaacattgaaagaaacaagatatttgttaagatcgggacaatagcacatataccatttttgaacacaagaataaccaaggaatacacacttcaatgacttacgatctaatttaattacctgtagacgaacgtcacgaacaaagcaagtgctacaaaaaattcttggcttgataggaaatagtatcttattgggaaaaagaatattgtaaagaatttctccatgaagaacagaagatggcat

SEQ ID NO: 220320 - DNA, 4667 bp, Cannabis indica
aggatgttaatgaaacatacttcttagtaaatctagatcctggtaaaatatatccaacaccctcctcattttgaaacctttaattagacccctatcgaccttatcaataatcagtttagataaaacatcagctccaaggataaaaagggtcagggagagcgtgtctccttgtctcaaccacgttgcggttggaattttcctaaccactgaaccattgagaaggagcttgatctcttccaccataatacaagaagtggtccactgaacaaagacgatttcgaaagcctagtcagtgaagaaccgaagagatgaaatcccattccattttatcatacgccttttccatatcgagctttatcatcataaatcctctcttacccttctttctattcattgagtgggctatctctatagcaatcatggagttctccgctatatgtcttcctttcacgaatgctgcttgattgggagaaataactttattgagtatccatctcattctagaggcaagaactttagagactaccttgtaagatatgttgcatagtgctatcggtctgaagtctgcaacaacggccggggattccttcttaggaattagcacaatggatgtgtcatttatggttttcggtagctcagttgtattaaagaagtgtagtaccatttctaacagatcggcttggacagccctcgaatgatgggcgtagaaacttgttgggaggccatccggtctcggggctttatctcggcccatttcgaagagggccgaggtgatttcatcaactgtggggatagcttggagactctccatatcaaaatcatctaacattggataaagaatatgattaagcgagtctgaggcacaggatgacgttttttgaaacagctccttgaatttggatagaaagcaacaagagatttctttaggatcctcaatccaatctgctccggtagcactcttgatgcactgaatgtaatttcttcgccttctaacaatcgtcgatgcaatgaaaaacttcgtgcacttgtcaccctcttggagccattgaactctagacttttgcttccaataaatctcttctctcagcaacgcctccgaaagttttccttttgccatattgattgttaagtgatcatcaggccggttagttttagcatcacggaggagagaggtggcttcctccacttgtcttttaacatgctgaaattggataaagttccatttcttaagcattcggcctgtagctttcacctttctgtaaaagtttatcataaggtgttgagtttccttcacaatccagaagcatcttgggtccctagcccacatattttcatatttgaagaggcgacccttacaattcactccccctgttgagtccaaaataataggccgatggtctgaccccgtggaagagaggtgcttcacaatcgcattagggaaaagaatacgccaatctgaagacgctaatcccctatcaagtctggctcttttagttgatcccccatagttgttattgttgcgatccttagcccaagtgtaacaagggccttggaagcacaagtcaattagtcccactccattaaccattctgcgaaagtcgaaggcatatcttgaagagttccctcgtttggagtaatgaaagcattctgcatccttgagagttccattcatatccccaatgaggagaacatgacgtgaagattggttcaccatatccccaatactaatccaaaaatcttctttgtcttcccgatgaggtggtccatatatccccagtaacaaccatttaaggcctttttgttcaaagtcaattatagcataaattataaactttgaggaggcatctatctcacattttacatcattaatccaacacaagcctaagccgcctgatctgaccataggtgcaacgtaatgataattatcgaatctaatttttgtgcatattctcttgaaattgtccggtgctagacgagtttcagagaggagtagcacatcgggtttatgttggcgaagaagggccaattggcgaactgtcgcggtgttcccgagaccacgacagttccaagcgaagattttcatggcgactttggagacttttctgggcaagtctccacagtcccaaactgaaaatccgattctgcttgcccaattcccaaagtcgattgaactagcaattcctcctcaatctcagttatggtacaagatcctttcaggctttgttgtttctcgaccagcacaaaatgattgtccaagtcaacttttaagtcaaaaaacttaccatctttttggagttgaacagtcgtagaccctccagccattggtatagatgtttttttttccatttaaaggacttgggcgtggccgagagaccatgtttagcttttggtggtcttcccctcttcctcggagtgcagctggtcttggttgtcggagtaggagattttcttggccttccccgtctcttgctagagctgggagcttcggccgaacctgaattgaactctccaaagacatctgactggtttttgatttcagattgttgctgctgtgatgtttttgtgggggagtggtgctgggtatcagtaatgggagtattgagattggcttcattatggccatggtcataaacatgtttctctggagatggtttgaggatgataccatccgaggctttccttttatgggggcctacaagatgctcttggactctaaagtcattgatgtccattagggcatcaaacaacgtgggctctcgaaagtacttatccacagtaaggcctcccattaacagctctcgggccttgggttgggcccaacattctgttgaaggccaatccattagaagagcttgggacccgagtatggaaatgctatagggaatatcctgtgtcttggccttcgttactgggctatcaatataggccacgctttttcagtcacaataggagaagcagcctgctttgaattcgctaattccttttgttcacaaggggcagtctgcttttggtcatctgtaacggctatatcttgtttacccgagtgaggaaacctgtggggaggtgcttgaggggtctttttcctaatccatggtggactttggactattgcggcttgctccatctttatctgttatcctcgcagcagaagggttaccattggaggattctcctgcgtctcttacagccactttcttgagttcttgcaggtcttggatggatattgattttgtgttttttccaaaaggggcaacttctcctatacccggcagactaaccaacgggagttgggtaataaccaattctgcttgggaggcctcctggttatgctcctcatcggaaacaatttgtttcttgcccgggagttgccttctacattccctgagttcgtccgattctccatgacgaatcgccttctggactttcagtgggtttctgagggtagggtccaagaaaattcgcttttagagcacccagtcctggaaccactttgccaggggtgttgtgaatgttgatctttcagtgtcatcacttttaagccagactccaaactttggatagtagtttcctgagccatctttaactacagtgggggtcttgaaacaaacactctggtcatgagtgaggagaccacatttaaaacacaactttggtagtctctcgtatttgtacttaatccagaggtcttttaatttttgccgccgcagaaagaaccccgagaagatgggtttattaagatcaatggtggctctgaatcttagggtgctcatgccaaccacatatttgagggttaaacttctttctcaagcatggtttcacttgctagaataattgagtgtcttatgataaaataacttcttatctaatttatacaatatatgaatattaatagtagtactttagtgatatcatcttttttcttaaatggtatatagtaataccttactacagattttctttaaactacttttaccgagtacttttatatatgtagaaagagagcacatcacaaaatcactaattaaagtagtaaaatttgtgaattagaggaaactatttattttatttatttttatttttgtattccatatcacatttctttcttcctttttttatttagtaattacaaatactttttccctttgactatttgtatttgacctttgcttttatgtgattatctatatataataaaagagtatatatatgtgcatgacaaaaataatatattaatttagaataaattaataatttcataatataaactttactaacttttatttttattttaaaataattgttggttttttgagatattaatttaattttaaataaaatatttataattaatttttagtaattatataccgtgcatattaaaaaataatatatatatatattatattttacaatttacaatttttttaataatataaattagtataatcacaaatataaaaaatatatatgcaaataataaaataattattttttattattatttttgtagttagttatttccttactttgatttattaatttatattttgaattttttttattagtatcatgattgttgtaactgatgcttgaaactatatattgtatatagtttctcactattttttattttttaatattttagtaaaatttattattcataataa

SEQ ID NO: 220321 - DNA, 4272 bp, Cannabis indica
tctttcatctgtgtaaacctagaaacatgatagggcccatccaaattaatttgacctgtgtgagcctatatatttgcttttgggcttagatgcatataggaagctcatttaattctagatatttaaatggactaggttgctaaaataaaagggataagttgaaaaataccattttttattacacattaaccaaatataactctaaaataattttaattgataaataccctcttttataatcaaagtaccaaatataacctcacaaacttatcaaaattagacttcctaatgcacataataggaatataatttataaaagtgggtataaattaaagagtagtaaaatgaaggtaaaaattaaaatatgaaacaaaaagtgggtatagaatgtaatttcctcaaaataaaatatcacccatgatagttttatttaggcccaattagtattaggcttattcaatgaatagcaattatttaatgtaaggttaaattcctctcctttgggccttgtgtgagagttagtgggctattagtagtgggtacgacatattagacccagccctccctcacatgaacaaccccaactgtgaaggctcatttgtcttatttaaataattctattaagttaattatactagtttaacctaattaaaattgaattagtaaaataattaattttgaaataaataaaattaatttttcattagattattttaaaattaatttagaaaagcacacttaggggtgaggaaaaaatgactctgctcctgaagtgctctactagggttctgcgtctccgatcttcgaattggtggctatggcaggtcgagggagtccaaggaaggcatcacaggggtcgggcaagtcagggaaggagatgaagatggctgctaagaaaccgaagaaaagaggtccatcctcaacagttgatatacagaaaatgaagtccatggatgaggtgttggggttagagccgattgcatttactaatgatgaagacgaaatggaggaggagatggtacaggctgctaatcctttagaggacatatttccaaaacctctctctccaaatgcgtcgctgcaagccattcagaggcaggaatacattagagcagattttaccttctttcttaattatgctaatcagcaatgttctatgaacatctcacaaggtaaatctacttctcctccagtcttaagatctagttctgtagtaagaaatttggcaaagtccttcaagaattctgaagcggagcaaaaagttaagataacattagaagatattgaagaagaagtagaattttggcagccctcaattgtatgtactaggtgccaatccaccattgtcaattcttgaaggctttattagaagagtctggaaagacaaagttgaaagagtgggtatgttgtcgtatgggatttatttggttagattttgctccataaaaaatagagatgagattatcaatagtggctatgtcttttttaataataaacctgatattatgtaagtttgggaccccaatgttaatttcaaaaaagaagacattagaacagtgctaatttggatgcaactcaaagatttagacttgaaatattgggaggagaagtccttattcaaaattgttgggcaatgggggaatccattgcaagtggatgcgattactaaggaaaggcacaagctgaattttcccaaaattcttattgaagttagtctcaatcaaagcctccctgaaataatctgatttgaggatgaatttgggtgtgacacatctgtagtggtcttatatgaatggaaacctatcatatgtggtcattgtaaaggtaaagggaactctactgatgattgccaaaagaagaaagcaaaacaacaatgggtgattaagacatatgggtgaaatgcagtatcaaacaaaccaaaagagccaattactgatgcagatggttttcaacaagtgagcaaggggagaaaagggaaagataaggttgtgatggaggagacctaataagcaattactttcaggccttgtctcggccagggcaagatgaaggtaaaccctctaaaatgcagtaggtttctaacatgacagagaaggtcaattcggtgcttccactagcagaacaagaatcaagcctgtcgtcgttaattgataacacaagaggagggggagatcctcctctaagcaatggataaagtactaagttagaacgtttgagggatcaaggacaagcagaaacaaagtattgtcaggcagttgatttacacacaaaaagttgggctcgttggtctgctcgagacgagagtaaaggctcagaaacttagggctttgtatgtaaatatgtttaatggatggtgtttcacatctaacattgcttgacatgttggagggcgaatactagctgtatggaatccacatagctttacagtgagcatcttgatgtggactagtcaacttgtacacttgcaagtgtcaactgtagacggtaaaaataatttttatgctacctttgtgtatgcgttgaatgatacagagggggggaaagagctttggagggatcttcaaagaatttgaaccaaagaagcatggatagtcttgggagactttaatgagatagtgttgaaagaagagcgaattggcaagagaattaactatagaccagcagctgagtttatagattgtgtcgagacatgccaactggaagatattaaatatagtggaagctttttcacatggagtaacaagcaacaaggaattgatagagtctattaaaaaattgatggagttcttgccaaccaacaatggctgcttaaatttactaatgctgaagtaattttcttgtctgaaggattattcgatcacacgcctgccttctcacagttcatcctgaaatgcaaagtggaagaaaaccattcaagtactttaggatgtggtcctctcatcctaagtatgcagatcttgtgagctcgacttggcagcaaccaatcaatggaacaaaaatgttccaaatggtgacaaaactgaaggcacttaaaggcgtcctcaaagaccttaataaacagggtttttttaacattcaaatagctgaggagcaagcaaaaactcacttatttgaatgttaggagaatctctaagaagaccccctcaatcttgaatgacatgataaagagttggcaaccataactaaatatgtcgaattgcacaaagctctaatatctttcttgcaacaaaaagccaaattgtgttgggtgaaagacggagatgacaacacggcaatgtttcatagcagcattagagcaagaagaatgcaaaacaatatcttatctattgtaaattggaatggcatcaaagtggatgaaccagcacaagtacaagaagctttcctatcctattataaaagcttacttggtgataaaatggccagtaggaaatttgttttaaaatgtgttatccaacaaggctctttggtaaccgaaaacaaaagatatatttgtagtagggacaagagttcatgattattcaggattcagcctgatctaccaattgattatcgttgtgatatgtattagttctttatagtaaacaacatatctgataaaacaacttaattacacatcaaccaatgtcatataatctctgttatatataacactttcactaagatgtcttcttgcatcaacaatctaaattaagattatttgcatcgaataacgagcatcaataaaccgtactagcaatcgttgattaaagattctataaatttaatatgttgcttactattttattcatgattagtaattttaattcttcttataatacaatctacgacctcatatatgaattttttttttatatttatatataaattattaaatataaaatattaataatttaatattcaagcatatatcaaaatgttcaactataacaattattatttataatcaaaatttttttacaaatttttcagagcataaactaacattcacagatgaatttgataatacataaaaaaaaatattaaaaaagaaaagaaaaatctcatagcaatatgcttaaagctttttgttgacttgataattttacatgtgcatttttttaggaagcggtcaacattaacttttataaggtgtattaatttagatggcgtttggtaacacgtttttaatcagttttttgtttttaaaattgaaaaagtgaaaatatttttcaaaaacatgttctataaaactattttcactttttcaattttttaattagaaaacaaaatttt

SEQ ID NO: 220322 - DNA, 2564 bp, Cannabis indica
accgatctaagatgtaactcatgttcctcttcagacttagagaagaccaaaatatcatcaactaaaacgatcacgcatttgtccatgtaatccttgaacacccaattcataaggtccataaatgtcgttggggcattagtgagtcaaaaagacatcaccaaaaacttatgatgtccataccgagtatgaaacacaaccttggtccaacattcaccctgatggtgtgtcttgcagttcggacactctagatatgatctgaatgaagatacgcggctctgatgaccacctctatttctccaaaacttctgctacccctgatgttctggaagcattagccttccgcttgtgatcacggttaccactgttggtccccttactgatgttaccactcacaggaggatttgatgccgtgacggcatactttacagcctactccttaatcacatgttgctcagcctcctgagctatcaaggctagttcaaccactttcttttataaagtgtcttgagcaatggtaatattcaagtcctgaatgattgtggcattcagccctcacatagatgttatagaatttttttcctcaaacagactcttgaactcatcccaagtcattgtgctaacatcttgagtctgccccacaatatcccaccagacgtgggcatgatcttgtaacataaaggcagcacaattaactctctctgttcccatcacctcataatatcaaggatgtaggtaatattactcattcattcctaagctttaattatatcagtacctcccaaaaacgtcggaagttgcagctttatgaggtgctcaaacactgaatctttgtgcgacaacatgaacccctggttacccaccactagcacaagacttggtggtacccctggatctaaaagagctgtcggtgccggttgcctcaaccgatacaatgcttcctcttgacaaagtttaataccttgtatttcttgaaacatctgctgccaactagcaggtggattagcattgccaacccctacattatccctcagactcggcgaaggcctaggcggcgccggtggattggttttgtcaacaccaagctctacatgctcgccctatggtctagatgataatggagggtccattttcacaaacaaccctagcaagccaagcactaataccacacttacgcacttatcgcctttgaaccctaactcaactattccattacaattagataaacatttatcaattaatattctaagcatggtatcatatatcacataattatactagatgctcacatactgtccaaaaatggaaaagcggtaaaataaataatcacataagcagttaagcgtttactctcaacacttactgcaccacaagccgagcttgtcgctgatgatgattgtacatgttcgaccagtctacagaaagtttaaaaaccttggcgctctgatacaaaactgtaacaccctaacaattaggcacgccacgacaacagattatgaaaccctaatcccctaaacagggattactagaaggttaaacgcgagaaatttaaacttaattgaaacagaatgaaaataaacttgtaaaaattttaaatttaataatcaaccaaaagaggcaagttttgggatcccgcaaatatttttacaaaatattataagtctattttacgtgtcgacctaagcgacaaaatcaagattacaaaatacaacactggtagaccccaacccgcttggtctagtatggccagaacatgtacaagcatcgccaagctctcccactcatggctgatcacaaatagatttacctgttcctccacagtagagcacttgtgagccaagcccaacaagacaacatagatatcaattatcataacacctatataattaagccatttcacttattgtatatttgacatagacctgcgtgttacgctcacatgtctatatatttatgtctatgtggcatagacacacgtgttacgctcacacgtctatttatgtctatgtagcatagacccacgtgttgcgctcatacgtctatttatatctatatagcataaacccacatgttacactcacacgtctatttatgagaatgccttagtagagtttatctcggttatagttaccgagtctaacctgattatgccttgcccacgtaatcttattcatatatacataatccacatattatgttccttcagtggtttatcttgatgatgtatatcaggtctaacccggttttgtcttattcacaaaacccttgacatatatccacacattgaacatcttcaacatatactataatatatgaaatcttatggtaataaccctaacttgcatactaattaattacccatataacatactttatgatatgctcaaaataacgtatatagagagtaataatcctacttcatgcttttacttgattagcaaacgttttcgtacatcattgctttcttactttcatatataccctagggtaataacctagaccacattattataatacttagagtactagcttaacgagtctaacttaattatgccttgagtgcataa

SEQ ID NO: 220323 - DNA, 2036 bp, Cannabis indica
gaccataattaatttgtgaaaattcaaacttagataaattttatcagcaaattgagagaaagtatacattaaagacagcatatgttgcaaatagtaaagaagctaagttggccatccaacgaagacaaaatatatcacataaataagaataccataaaaggcaagatgttgtctcaggcaaaaggccattgttcaaaaaaattaaaaattaaactaggtctacatagtgggagacctagaggggactctaccttcttctccctcggctgcttcagctccctcctcatctttagtgcctccttgatcttcatgtttaatttgtttaaagtgagctagcatcttctcggtattagcatcaaggaaaatgaggtccatattcctattgacaacccaagctatgtaaagtgaacgatcagccattttatttaccctctcgcgagcatcaatttcaagggtttcattcacttcctataattcctttttgtcttgctcagagttatcaagaaggttcttatttaaagtcttgacctcaacctttaagtctttcttggagtttcttaatgtctctccttttttaaggcaagatacctctttgtcagcatcattcctttgagtggccaataactcgtgatgttcgttggccttactcaactctaaggaaaaataagacaagctttggtgatgggcttggagacccaagattgtcaaaagagaggcttacataaagtactacggttaaaaaaggagataaaaaggaataaagtaaaaggttagaatactaaccgagtgcaaaagctttgcacttctcattagaaggtcagtaggtgtgctagctataattaggttctaattgtctagctaataagtcttaaattggcgacacacctgggctatatgctaagagcaaaccgcttggatccttcgatacaggcgtctagaggcaagggacctgtgggatccattaagaccactgcggggttagtggcagaaaaagtgacttgatgaacagatcttagggtatattttctttttccatcacctcaagggccgagaaggaaacctcaagaattgagctattatttttctccaaaataatgttttaagcatgaggagaacttttcttgtgattatatttttttctttcacggagctttcagtttcttctcaataatgtcaaccatagaaacacctcgctttttaccccgtttaatagggacagcatgactgctaaggaggttttccaagtcgaagtccatttatgcaaaataagagaaaaatattggtaaaagagaagaaagatatataatatgttgggaagaatacataaacactctatgcaagacggtgaaaatcaaacctaaactaaagttagaaatgttagaggttgctcgaggaggagaaggatctgtacgaggagatgtgataaaaggaaggtctctaggtcccatagactcggtgatatcataaaagaaaatgaatttaagagagataacaacccaatcattagttcaccagtcatttaacccatattgataagcgatcttataaaatgagctatcacacgaggtttggacatggaactcaggataccaattatccaaactgtgggctattaggtcaacgtagttcaaaatataaaagttatattgattatctctaaactttactaatcttgttggctcaaaactaaggacggtaggagaccatccgtaaaaacaagaaagtttacctcatggagccccttcttcaatctcagtagcttctcgagtggctaagttgttttcataatggatttgagcgatatagtctcaatcctcttcttcctcaggcactcgaatttgttgtcaggttgatactagtttaggttgttttcataatggatttgagcgacatagtcacaatcctcttcttaacatattatggtcgagctattttttttttagtaaatcagtaagattcattactccaaaatattaattttacatcctactagcatcttcaatttgaagaccgatattctccaactatacaatgta

SEQ ID NO: 220324 - DNA, 1973 bp, Cannabis indica
aatttagtaacataaaaccaacactatacacctctctacacctttcttaatcaataaacttgagattcaagtttcacttgactataaaggaatttgaatttctcatctcttcttcctcaagtatacacgtctatatacacaagtatataaggtatatacattttttgagtgataataggatatgtcagataagtaagatattgagagttataatttaagagtatttacaaacacttttcttcacttattttcgtgtgcaacaagtattgagtacaaatcaagggagtactcaggatagtgtagaagactgtgtagacactcctttcaaaagaagatccaggtttgaatttttgataatactttgcgacataaaggaacaagagttaaagaatcaaacagaaggagtcataattttcgatgcactattttaagatttcttaatctcttacatgtttattttgaattattttaagtttctatgtttaggttcttagattagtaataatcaacatacttattaagtaagatcctggtaaaatatattttccaatatgtttagcatttttaattttcgctttctagagaaagtctttaatatatttcgtttgagataaatgtgtcccattagtggtatagttaaatttagtcccgagaaagtacttcagttccccaagatctttaagagaaaactttgatttacattagagatgagttgagttaccaaatttcattaagtgtgatgagaatatcatccacatacactaaaactgaaatcgtcaacttaataatgttttggatgaacactgattgatctaacttggataaaaataatataagggagagaagggactattgtaacttgtcaaaccaggaccttggagcttgtttaaatccataaagggccttgtgaagtttgaaaacaaatggaggattgaaaactacctcatagctaggaggttgaaccatgtaaaatgtctcttgcaagtgccatttaaaaaggcattatttacatctaattgtgttgtctaccatttgtaagaaaaaataataaaaaaggagtgagaaccactttaatggtgataggctttactactagactaaaagtctccgtaaaatccaactcaaattgctgattgaatcctatagttacaagtggagctttgtgcttattaatagtcccatgcagattttccttaagcttttacacccatttatgcccagtagcttatttcccttgtagtatagaaaccaaagtccaagtcttatttcttttaagtgcaagcatctcatcacctattgcataattctattgcttaaatgaaagagcatctttcatattagtaggttcttgagtgagaacatagattctaggtttgtgtattccacttatggatctagtctacataccatgagtagaagtgttagggaaaataggaggttgtgcaagtgtaatatatgaaattgttggatgataggtgtagtgactatatgagtttggttagggagaactgaggcatcatgaagtggtggagacactagaggcatattgttaaagctaaaaatagtaggagcaggcaccactacctcaggttgtgtggagaatagataacaggattaaatgctataggatgtaaagtaacactagggtaatgttgttgtaatggagtggggttactagacacatggtggccaacaaggacttatgtcatgggaattctagcagacaatagcatggaagagctagaagaacactcaaatggtttcctaatagcaaaaggaaatgtgtgctcatcaaaaattacatctcgagagatgcataagcatccattagaatctagacatttattgcccttgtgattgaggctatacccccagaaaggtgttgggttttgtgccctaaataaaaccatttacaatctgattagttatcaatataagaaatttgaagtgatttatgtttgcatgaattttac

SEQ ID NO: 220325 - DNA, 2147 bp, Cannabis indica
ttaagttgcaagatagtattgtgttgtttacggctactagctgttttatgaaaatacttactatttttgtctccttcttttaaccaaaattgcttggccctttgcttccaaaacgtctcccgctgctcgagaacttcaaacaaacggtttctagcttcagcatattattggaccgacacatcatccatcttaggctttaaaatagacatggttgttttgcattgtttgattcgagacttgaaatccccggttatctctttcccccaccgagctagaacctccgcacacaagttgatcttacccgaagtactatcattagcttgagtatcccaacaatctctaacaagctgataacacatgggctctgaaagccaagcattctcaaaacgaaaacgacgaggagtacgaaatgagacccttacaatcggctctagaaaaattgggcagtgatccgatgttgaagcttccaaattcgttaaacatgcttccggaaacagaatacgccaagaattagtgaccaatgctcgatcaggacgcacctcgatccactctctagtacctctacctctttcccaagtgaaaggatagcccaaaagatccaaatcttccaagccgcattcatccaaacaactttggaaaccttgtagcaaccattgagggtatgggcgacccccttttttgtcatcttgactaagtacattgttcaggtccccgattacacaccatggaagagtcgggttccttgttaaggtcttcaaaagagtccatgtttgatctctttgggttcggtttggctcttcataaacccctatgagtctccaccaatttccatcaagtgtagcaattttcatatcaatatggttctgggaaaaacccaataaggatccctcatctttatttttccaaagaaaggccaagcctccactaagcccgtgggcttccacaacaaaaactccttcaaaacccaaagcccgtcccacccaatcaacacgatctttttgacattttgtttcacacaaaaaaaaaattaggtttcttatgagaaataatctcttttaggaattgaaaagtccgttggttcccaagcccccggcaattccagctcaagacattcataatgcttggcgggcctagaaaccagaacccgccccattcaagttttttggactcccattctccactgttggcatactaacatcttggtctaacatttcaaaaatgccattaccatttaaatttctgccctgcccaattgaagaaggattcggcccatcatttttgtccaccacactctcacctaaccccttttccacatcagttctccttcttttattttccactaccaataaagcattattacttgaaataacctcagatgccacatcattcccaccttggattgacttatccttagccttaggatctttttccaataaatgagaaacatccccacgtataagctgttgaaatttgcccatattatgtgaattgacaatcaatccctgattactctcttccccattattattctttgatacgccagcctgtgagctctctcctccgccagtcacgggggctctgtaacttgcaccagatcggagccatggtgaaccgatggcatgttgtctcctccgtggcgccgccttcagtgaaagatcgaacattttttgaatcaactccgcaggggtgtcgaataaacgttcacagaaccgctcggaatgccccaatacaccacaaataaaacagaatgtgggtaagtcttcatacttaaattggactgtgcacgtctgtccattcttcctttccaatgtcatctttttctttaatggcttttccacgttgatagtggtacgaactctaagataatctctccaaactcctgtgaaattattgggatatgatttcacaaaagtaccaatataatttgtcatatgccttagagtactttcggacataaacccagttttcatttcatggcattgtatccagacgtccaaacgagttaggctaatctgtctgggattttcccccggtttcactctctcaaaaataaaagggacacgatcaaaagtccatggactaccatcaataactcttgtaatatcaatttcatgatagaattgaaataaaaaatgattcgggtcaag

SEQ ID NO: 220326 - DNA, 5357 bp, Cannabis indica
agggtcctatttttactattttagaaaatgcagggtccattttgtcatttaacaaaacacaaggtccaatctataacttttgcaaaacacatggtcccatctataacttttgcaaaacacatagtccattttgtcatgttgtatcatgcttaagcatatatttttcgcgttggatcgtactcgtgcctcttggacttgtactaattttatgccgtatcaaaaaattcggcccatatttacgatctattctactatatattctactttctagtattattctcgttcaaatagtgtttgaaagatcaaagatatgtagtgattattggagtggtaattatattacgagcatttttgttggacattagaagtgtcaagcattttttagaggtgatgccttataattagttggtgatatttttttttaaaagtattacattaaattatacgggatctgatacttaattacactaataacaatatgacatctcgaaaaatcttaggcatcaataacaccttttagtatttctctcatattatattctctttaaattataatatttatttggacttgatgtagtaagaattatatataagttaatgagtgctaattacaactttctatcaaaatcttttaatcaatttttatgttcgaattcacataccgaaatatttatttttcatagcgatattcgttatggttataatataatccttgtaaatttttaaaaaatttcaaatagtttacaatactaaaaataaagtttctaatattttagtttaccacgcgtgttcaaaaatcttcaaacgtattttcagcaccgtggcgtaaactattcgaaatttttcaaaaatttacaaagactgtataataaacataacgaacaccactataaaaaaaaaataaaatatattctaacatatttttctttaagtacggagaactaagaaattataatactaatcaaaatatactattacaaaattgtaattaataaaaaaataataaaaatcaatatttaaagtagttacacaaaatttgtataggagctatgaaaatgggaattgaaactccttaattaaatatttaatggaatggaagtggtgttattatcactttaaattattattacaaaaacataaatgaaaaggaaaaaatggagtgttttggggtttgagcgtgcatgtgggacccaaaacccacgggagactcccgccatcatcgcgtcccagcccagtcctccttctcatcaaatcaattctccaaatgcaaaaactcaatacacaaaacacacattcactcactcactcactcacaccttaaaattatcatattaatattaatattaactaacaaaaacccaacacactaagctaacaaaaacccaatacaatacacctccattaaagaagaaacaagaataagctccttcaaacttcactgaaacatatataaatatatatatatatatatattataatagatgaaaggcaaagctaagactcacaaaaccaagtttggcccttccattctcttccttctctgttttctcttctttcttcttggtttctttgtctctaatcttctctatcaggtttctttctctctttctatatatgtatatatttgagtttattttatttaaatttagatttgggtttgatttgattttgtgttgatcgggtttgcaggatgttcctactgtacggctacccagttcgagaattcttaaatcggttggggagaatcaagagcccatggtccatggccagactggagagagttctattcaagtgattccattccaggtgagcttcatataagcttttttcttttgtttgggggaaattccactcttattgttttctttatttggttggaatcttggtttttggtgcagtagttttggatcatgggaatttatttttatttgaaaaaatatatcttttctattttgagggatcattttaaattattcttagttattttatgcttattgatcaaaattgttgacagaagagaagggtatctacttttattccttattatgttacaaagttttgattatcaaggaagcaacatgtctgttcgatgatttttaggtagaagaaaattaagtgttagattagtgcagaatgacataactgggttgattagaaatgccaagtttatcagagatgtagtagatgattgttctggaaaaaattaaactttcaatgaagagagagaattcatgtaactgggtatcaagtgagatgagttggatcaaaatacagaaaaaggattgtgtttttcacagttgttaggattgacaactgaataaacggtttaaattgttcttgctcgacccgaacacttgatttcttacttcatctattcctttaccttatttcaattattatgtactgcagatcttaagctggaaacctcgagctctttactttccaggatttgcaactgcggaacaatgccaaaagataattgagatggcgaaagttaatcttaagccttctaccttggctttgcgaaagggagaaactgatgaaagcacaaaaggaactaggacaaggtatctctctacattatatttctagtttcagctttcagtacaatgtgttttcttaacacagtttttgtttatctatgatttacacacgcacatgtttatattcatgttcactaattcgacatagcatgatttatattaaaattggtacttatggaatcaatatgacatctttttatactctttttcgtgtgaggccattttttcttggagtgctttcttggataagaaattaacacttaatttctaattgacaatagttcaggcacctttattagtgcatctgaagacaagacgggaattttgagtgttattgaagaaaagattgctagggttacaatgctaccaacaacacacggagaggtaggttctgttacgtatacccttctctctcattttgttgtagtcaaagttaccaggcatattggtttttggatggtttttattgacgacagaatcagaatgtgattatattcctagaatagtgattgtaagggatttgtactgaactgaagtaatgcatcacaaaatggtgataatcctttaatgacacaaatgcacatgatcatcttgcgcttgggacttgcaaaagtacctaggtgtttgaatttgcggaatatcaagtaactttacagttttctgatattgtggtttagttgagcacatgtagcttctttctacaatttacattcctgttgaaaaacgatgaattccacatttagtagaagtcatgtttttacctatagtttccaggagaaacttaaaagggttaatctttcatcacaggtcagttctttattaacctgagtaatgcggggatatcaccatgttgcaggctttcaatattttgcggtatgagattggccagaagtatgattctcactatgatgcattcaacccagcagaatatggcccacaaaagagccagagggtatgtgtagctaccttctcaatcatatcatgttatgactgcatcttttggcatttaagttgttaatacttagaagtatttcggtgttttgatttgttattttgttttctgttgcttttccacttgccctgaatttggctaccattgctatcttctgtgccttaataattctttataccatccttccttgcttgttgaaaggcttctcattaaagaaaacatgctcaaatgctctttttcctttacttgtatgatatgtagattctgatatttgctttctgagtttcctgattcagttttactgattttccttttaagttcaagcttatgaaaccattgttgcttgatcataattcactaaaattgcaggttgcttcctttttattatacttaaccgatgtagaagagggtggagagaccatgtttccttttgaggtaggtttcagaaaatttagttttatcatataaggattcaaatcattaatatacattgtaaccggccagcctacactttcggtttgcagaatggcttagatatcagttttgggtttgattacaaaaagtgcattggtttgaaagtgaagcctcggcgaggtgatggcttactattttattcagtgtttccaaatggcacaatcgatcaggtgaatgtcctcccgttgtgaatcaacctagtagtgcatttaattttcacctttcttagtaataggtaaagcttttgctcatatgcggtgtatagatacgatcattcaacctttaaactcaggtttgaagctgggttttcacaggtgatcagaagtttggaatagattatagtaatggctatatatacattctcttggtaattatttttgtagtctatgacaaaacattagatctcaaaataattgattttcttacagttgtctctccatggaagctgtccagtaatcaagggggagaaatgggttgcaaccaaatggattagagatgaagaggatgactaattttatttttgacctcgattcaattccatctattgtaatatcctcaattttgaaattttggaatgtcttccagtgtggaacaagtggttattctcacatttagactctgatgaataaatttgatccactgttcttccaaatgtatgattaaattagagaatgcagagaaacctacatgtagtgattgtaatcaatcttaagaacaagatcaaagcaacataacagcaatcaaagacttagaacaacaaacaaaatgtttgtaatctaaactgtgatgagaacaaatcaaaatgtaaaatagaattgaattgcaatcgacattaataacaaatcaaacaagaaagattgttaatttgagattactcagaaaattcactctaatggatcaagatcagacaaacttcatttctttgtacaacccttaaatacactctctctctctctctctcctatatttttttttgaacaatgaacaaatattttattaaaaaccaaaagaaggtagtacatcatgaaagaaagatggagaattcatccaaactaatttattatccactctgattgcatgtacagctaattcatgaatacgaacatgaattaggaacgcctcagaaaaattggtaaataaattaggaaaaaactctaaaaaagataataattaattcaatacaccaaatacattcttttattatgacatataaaaagtgcaaaaatataaacaaaaacacaaaattcatacaccaaatgcattattttattatgccattaaaaagtaaacactaaaaaaacttataattcatgtcatttctaccataaatagtctcaattcagccaactcccaaccgaatgaagatcctgttaaaaattagtgtctca

SEQ ID NO: 220327 - DNA, 3143 bp, Cannabis indica
taggttgttagttatgttagttgattgcttagctgtcgtttatgttttgcttcaatgctacttagtataagtagcatccattggtgtttgtatcagtttttgatcattcattgaataagatcagatttcatctttttcctctgttttccctttcttcctgttctcgttcttcggagctgttagatataccacgtcactatttgattatgtagatttttttcttttaaagaagatactatattttcataaattaatgagataagtcatttataatataagagtgctgaagaatattctctaaccaaaagcaagttttattcaacctaaaatatatctagccaagctataggcaaccatattagcaatatacttaacatgagtaatagacacactagagtgtctattaaaagacgagtcgctctctctagagtgttttgttatgtgctctctttatgagtattgtttaatgtcattttggtctctttttagaactctgttttggtatgttactcttttttctactttattttgaccctttcgtattcttcgtctttgtatgttgagctttttatcctgtgcgagtgtgttcgttctggtggacttatggcgtccagtagcttcaatactaaggatctagaagatctctagagagccattcaattgaagatgaagaaaggtagagaggttctatgaggaaaatgcagaagaagaagatgaagagcaggccatcaatatactagatggtgcctcgtagaacaatattggctccatggaggagataaaaataacgagtattttcatgcctacactagtacaagctaggaagcgtaataatcaaatacaaaatctacaagacaaaaacagggtctggaaggattgggaaactagtatggatgatgttattactgaatatttaagagtaatttgcagtataaatacttaaatttaaatccaagttgcaaataaatacctaagtctaattttaccgaacttataattctaaaacttttgtaagtacctagttgttaattgttaagtaaattttcacgtggcaattcttgattggtccaagtcattaatttttttttaaataattaatttaaatataccaataagaaaatcacacgtggataatgacttaacatttaacggtcaggtacctacaaacttctaaaaatataacttaggtattattactgtcaaaaattaaaattaggtatttatttacaaccgggagttgaacttaagtatttatatcgtaaattactcttttgcttccttattttctgttggtggctcacggctgagtatggttgctaatggggttaaatgtttagttgatcactctcaaaatgaagatttgttaaagccaattcaagaagaagaagtcaagcaagccttatttcaaatgtaccccgacaaagctcctggacctgatggtatggggccaggtttttttcaaactcattgggatattgttggcaaatatattattcaatttgtcagtgatttttttaatacaaggatcttcccaattctagctccaacaataccaatcttgtcttgattcctaataaaaaaaaaaaacttctcttctatgagcgatctctgccctatcgctctttgcaatgtgagttataaggtggcttaaggtgcttcctaatagaatgagaagtattattgacaagattatatcaaatattcaaagcgcatttatacccggtcgtctcattttagataaatcatggtggctaaacatgttgctctcctagtttttaatgtgacttgttgcattaaaaactgtttaagttgtatgcttttactatatcgttcttactatttaatcctatttccttaattttaaaatacatatattttttttattatgctttatctcagttatgaccttttttatatgttactttttttgtatggaagcatttagaatttttccttacctcaattaagatccttttgatattcatattgccttattcaatcttctgctttggtagtaaccctggtagttcctctagaaagacattcaaaaactctcaaactaccggaacgtgttcaggtcccgttggtatttctcttgtggtatccaccacactggctagaaaattgacacatctatctcacaaaaattctcttgccttaagcgtcaagagtattggaatttgggatccttgaacccttctcacaaacacaaatgggccctcaccctcaggttcaaaagtcaccatctttcttttgtaatcaatggctgcgttatattttgctagccagttcattcctagtataacatcaaaatgttctagatccagttcaattagatcggccaaaaaactctcttccatccacatacactggaagggacctaactcacctactagaaataactaattatccagtaggcaataaggtaccaaaacaacttggtaaaaatatgactaggtttatgcagattcccaatcactctacttgacacataagaatgtgtggcaccagaatcaattaaaaacagtaccattaataaaaaatctaacctgtcacggtagaaggactagcatcgacctctgcttgggtcagagcaaaaactcgagcaggaactagagtgtcatctttcttatatttcggtctatacaattgtggacaatttatttttaaatggcccataccccacactaaaagcaggctcgagcttgacatttgccttgatggtatctcttgcacctcgggcactctggataggttctctagttttcatttccaccgcatcaaaaaccttgattaccttggaatcgcttgttaagacccataactggtgggtcgttaggtcttttcctgcgatcattagggtcaacacccttaccagaactgacactaggcgattgtttccataaatctcttctcatactgtttctcttttggatttgatcttccgcaccctcagcagcaagggctagctcaaccacttgagcatatgttcgaaaaacccctggttgtttggcatttacaattacatctcgagcgatatattcttccaatccccgaatgaatttggcttttctagaagccttagtggccacttcatcagaggtaaactttccaatcgatcaaacttggtggcatactctgtc

SEQ ID NO: 220328 - DNA, 2650 bp, Cannabis indica
aactaagcggtctttacaaagaagtcttttcgaggggactttcttcgaacgctttcaactgcaatgagccgtgggtagtcttggaagatttaaactctatccttaattcggctgaggagttgggaggccatgaagttacttcgagagatactagatggctagaagaattctgtcaagtcacagggggtacagatttgggattcaaaggttttcatttcacttggcaaaataaatgttttaatggaggtttagtgcgtgaaagactggaccgtgggataggctccattgattggatcactgaattgccatgtgctggtatctagaatttcccaatatcaatatctgatcatgccccaatccttttggagactcacatgttcaggagtaaaggatttataccttttagattttatgatgcctggacaagagaagaatcctgtagggaagaaataaagaaggtctgggagttggaagatcttggtaatgctagaagcttgttgcagcactttgataaaacaagatgttccttgcaagtatgaaaaaaaaagacactttgacaatttggacgaaaccattagcaatttggaaaggcatcttaaatggatccaacagcaaccaatatgcgggagatactgcctagaagaacagaatatacaactgtctctagaagaaacattgaagaaaaaaagaatcaatgtggagacaaaagtctagagaatattggttgaagcttggagatagaagtaccaagtatttctatgcctcaccagctattagaagacgaagaaatcaagtttggagtctgcaagataaagaaggaaggacgagggagcagtcgtatgaaatttcaagaataataaatgggtggttttctgatctgtttacttcctccaatcccatgatcccagatgatttagagaagatgtatacatataaggtggatgaataagctaacagtctgcttacatctatcccgtctcttgaggaaataaaagaagttgtattcaatatgcaccctcttaagtccccaggaccggatggattaccaggatgttttttcgaaaatactgggacttggtgggaatgaaggtgtgtttggccattcaagaagcttttaggattggagaaatccatcccagattaaactacacattcatctgcctcattccgaaggtagataatccgaggagaatggaacaattttgcccaataagcctttgtaatttcccatataaggtaataacaaagattctttcaaatcgattacggccctatatggatcaattaatatccccttttcaatctacatttattccgggtcgatggatttctgaatcatcgattctcactcaagaattggtgcataagtcaggaaaaaatcaggcatggggggtttaatggcattcaagttagatatgctaaaggcctatgatagaatggaatggtctttcattctaagagttcttaaagcaaatgatttcgacgagaagagctgcaggttaatcatgtcttgcatcacaggggtaacttattcggtcttattgaatggttcccctctaaagaaaatcaagcctcaaagggggttgagacaaggagaccctatatctcccttcattttctcctctgccaggaagtgctttcaaagttaattcaaaaacgagaaaacgaagggaagatccatggtatccaaattgcaagaaatgtgattccaatatctcatttaatgtttgcggatgacacaattctcttcactcaagcaaatagtgtggaagcaaaggagatgatggaatgcattaagagatatgaggattggtctggtcaagagtgcaataaagcaaaatcaagtgttttgttctcaaataatctatcagcagccagaagaaaagaaattttggagttgatagacataaaacaatctcaaggagaagaaaaacacctgggaaacctagttgtttttaaacgcagaaagaaggaagactacatgaatttgaagaacagaatgctgcagaaattagagggatggagaatgagactgctttcatatgcagagagactaactttaatcaagacggtagcagctgcaatgccggtttacatgatgtcgacaaacaaaatcccactatctacctgtagagagctggatgcgttagtttggagatactggtggataggcaattcgaacaaggatagattcatggccatgagatcgtgggacaagatttgctagcgaaaagattcgggagggcttgggataagaagatttgaataccttaacagagcactacttgctaaacttgcatggagcgtgggttagggccagaggaagccttaggtaagctgttttattagcaagtattggaagtatgaaaatttttggaaggtaaaaaagagaaactgagattccttcctatggaagtgttcgcttgatgttcgtgatattttagccaaaggttctttttccatggcggcaagtggtgaagaaatagatgtatggcatcaaccatggattccatggcttgattttaattgcttcaacagtctaatggaatccattaaaccgaagggatacactgttagaaccttagcagatctatcgatagggaatgaatggaacaaggaggtggtgcaacaaatctttggtgatttgggt

SEQ ID NO: 220329 - DNA, 2840 bp, Cannabis indica
tatatatgtttgctaagtacatatacatatatatatatatatacactaaatttttaaaataaaaatttaatatattatttttttatatatgtttattttttttttgtaaatttacagttgggttgctacagtaattttagttgctatttagattatcccaatattaattattatattataaatttctaataaaaaaaaaaaacaaaattaaaaaaaaaaataccaaaaaaaagtataaaaaatgaaagtgatgtgcataaaatatttacaattaccaattacgtaccaaaatctaattagatatgatcatattatattgtgatagtaaataatgagaagctataacaaagaagtgatgatatgcctaaggtttatatatattgacttgcactgtttcatttgtcaaatgaatatggtacaaaatatcataataacaaaatgcagattatacatttactgatgatcaatgaaattttgaaaaaataatcatcaagtatatttaatttgatatcttaggttgttgaaatatatcaatgatgtacatacatatatatatgttatatgtatacatgaaaacttaaatatatgatattaaggtaggttgatgatattattaaggcttcatctgaaacaacaaaaattcttctatatatgtcaattaataaagtaacattacttacattaccaaccatttattcacatacatatataaataaataaataaatatataaagctgaatatcatattaatatagacaaattgttttagctacttcttgcaaagtctcataatgagtcatgatgaattaataattatagatatacataaaatatatgtaaaattaaaattatgtatatgctatataattgtgcgattgtatatatagtcattttatgaaatttagtgtgaatattattcattatatagttaataaatgtgatgtataattacatccaaacaatattataagaagtatttttcggaaaatgcttcttatattataataatattctaattgaatatgcttctgaaaatattatttacaaaattgtaaaatatgcttataaacttgtaagttttaattgcaaattttaaaaaattaacttaaaaaaaattattacaaatttataaattttgtttacagaaaaataaatttatatttatggttatatttttagttattttttaaaaaagttcagacattttttaaaattctgcaatataaatttataaatgtgtgaattcaaatcaagaaaattaaataaaatacttaaattattttacatcaaattttgtaagggtagtttagtactttcggcaactatatattatatatatagagagggagagagagatgaatttattgaggtgggctctatacttgtgatgaaggggtatctatcttgaatgcatgattttggtacatcaataaaagacaaattaagagagattaattatatatgtatataaatagacaatacaaagttataattccaaaattgattaataatataattatgtaaaaatattgctgaaataaatatatatattatattattgtgtgtagtataattatatgtggagtggagtggagagtggagagtagtgtagaatgatgaggatgagtgttgattattaataaataccacatatatatatatatataaatcttttgccagctctgatcatctatgtctatggtccaaccaagctcttaaatgaccttatttaatgaatgaatgaataaatgaatgcccaaaaccaaagtcatgccctcaagggcctcaacctcatccgcatgatcaccttctgctatgagtatttgggtaatagtgttctttaacatcttttagatatattattttgtgagtagttaataatattcgttaaaagttattacattaaattatataaggtgcactaataacaatgttaacacataaaaattattaacgctttttaacactccttcttctgctatgtttatatttgcatctccgtggcctacctaactagctaggaataaaatcctatatatattcttctagtattcatcatatacccggttttagaccctgaccggccaatttcgatattcgatcctggacccacacccaaatctagccctagcatcgatcctattgatctcggactctgaactcagactttagacatggacctaaacccgaccccagactgtgaatccaaatccagacctagccctagccctaaccctagcccaaaaactaaatctagaatcgaggttcaggtctaaggtcgatgattgggatggagtatgagtttgacttgtggttgtgtcaagtttatggtataaatagtataattttacacaatttattaaatatataagttaataccaaatataatattatattaattaataattctaatacaatacaacaaagtgcatgtactaaacaagccctaatatatatatatatatatttatatatataagggctcctcttctatctaatctatatatcttaatatatattatatatgtatataaggaggcgcatagctatttagtgattatggagactttgcttcttacatataattttttgaaatatttttaattataattttgttcttttttattttattaaaaattaatgtatttaacgaccctcctcaaataatttttttgcacatttttttcttcttataaaccatttctgtctccatccctaagtaaaaaaaataagatggctggtgagctaatttttgctagatcatatatattctcttaagaaaaatcaaaatgacaagaaccaatttgattaatgtacaaaaatagtgagtatccgaatat

SEQ ID NO: 220330 - DNA, 4774 bp, Cannabis indica
gttcttcaacacaccgagtttgggaacaagaaaatgaaactgagtgtgagagagactcttggtaaggtagtcagtgatttgttcacttgagggaatgtatctaatctccaaatctttgtttagcactttgtctcggataaaattaacatctagctcaatgtgttttgtccgagcatgatagacggggttcgaggctaaagcactggcacccatattgtcacaccaagtaattggtgtactgtcaagaggcaactgaagttcttgtagaagagcttgaatccaggatatttcagcagttacttgagctagagctctatactcggattctgtgcttgatcgagacaccactagctgtttcttagagcaccatgagacaagagcatcaccaaggtatacgcaataccctgtaattgaccttcgatcatctgggcaacatgcccagtcgacatcagaaaaatctgttagaacaaatctttttgaatatggtatgtgtaagccgtgatgtggtgttcccttgatgtatcttaatactcgtttagctgcactgagatgaacatttgttggagcttttagaaattgacttagcttatttgttgcataactgatatttggcctggtgtaagtcaaatactataagcctcctataatactcctatattcatttcgattctcaagaagtactccatcagcaatcgacattgttcttcctactgccattggagttggacacgacttcaagtgcagcatcttggttctttgcagcagctgactcatcccgatgcacttctattcccaaaaagtaatgcaaaggcccaaggtcttttaaagcaaagatcttattcaaatttgaggtgaattgcttcagcttttccgaatcattacctgtaacaattataacatccacctagttcaatacaagaatcacaagtgatgatgtctggtaaaagaatagtgacgagtctgcctttaagtttttgaaattccaactcactaaagttcctttcaatcgatcgaaccaggctctcggtgcctgtcttagtccatacaaggctttggacagtttgcacactaagtcttactgtgttttgtcttcaaaaccgcttggttgcgtcatgtaaacatcttcagttagatgtccattcaagaaggcattgttaatgtcgagttgcctaacctcccatgacttcattacagccaaagttaatacaattcgcactgtcgaggccttaataagagggttgtatgtttctccaaagtccacaccaggtcgttgattataccctttcgccactaatcgagctttgtatctttgaaatgacccatcagcattcctcttttctctgtaaacccatttattttcaatgacattcatatcagcagtccttcgaaccatcttccaagttttgttttgaattaaagcacaaatctcttctttcatgacagcattccatccactgtgtcttaatgcctcttcaagagaacatggttctgagttgattttctcccatttagcactgctgagataagtctttggtttgaagattccggctttggctcgagtgatcatatggtgtgacgttggctgtaagtttttggcacgttctgcttcagctgaagtatcggtttcaacagtagtttcagctcttgaatcagtgttgacagggacaatgtttggagctggatattctcagagggattagtcatctcaaaataatcaaaaataaccacgaccacgtacctgatttgtgctaacagaagctggagacagaggtgatgcaggtggtgactggtgctgagaattgctattatttcccccgtgaacatcatcagctgaaggccctggtgtgaatttttgtgaggaggagtttagaacaaatgcaggccaataaggaacagttacagacacaggagtttcagcatgatgagtgttccagaaaaccaaaaaccaaaacgaaaaggaaattcatgttcattaaacactacatgccgagagatgtaaagcctgccagtgctacttagacatttatatcctttatggctgtcactataaccaagattaacacacttggtggaatgaatgtaaacttgtgggattggtaagggcgaagacaaggaaaacatgttgaaccaaaaaccttgagaaacctatagtcgggctatttggagaaaacaagttcgtaaggtgttttgtttccaaggacagaagtaggcagtctattaataagatacactgacgtttgaaaggcatcccaccaatacttttgaggaacacttgcttgagcaaggagagtaagtcccatttcgacgatgtgtcgatttttacattcagctcgaccattttgagttgaagtatggggacaagaatgatcaaaggcaatgccgtgatcagtgacaaaccgagtgaaagcctggtactcacctccaccatcagtgtgaagattttttatcttcctgtcaaattggttctcaactagaaccttaaattgagtaaaagcaattaaggcttcagctttggttcttaggggatgtatccatgtatatcgactgtagtcgtctataaaatggatataaaacctaaagtttgtattagataggataggtgcaggtccccatatatcggtatgcacaatctcaagaggaactttagcacgataagcatttaatttgaaaggcaaccgatcagatttaccaagttgacaggcatcacaaaaactttcattcatgtggacagcttttacatttaatttctttaaaacaaaatctaagacacgtgtggatggatggcctaatcgcttatgccatgtatccttgattgaagaagataaactaccaattttagactggtttacattgtttttggtggaagtaattaaaccagaaaaatgactcgacttagaataggaagcatcagaatgggtttggtgttgtgtggaaggaagttcaagttggtaaagcccatctttaagtctcccttgaagcaccacctgctttgtcaccttgtccttaacatagcacaaatcagagaaaaattccacaatacattattgtcagtggttaattttgagatgctaacaagattttttgcaatatttggaacatgcaacatttctttgagagataaaatcacaccagaatttgttagtaaatgactagtgccaatatgcttaatagctaactgatttccatcaccaaccattagtgtttccttaccattatattcatccttctgctgcattttgttcgggtcagctagtgatatgacttgttgctccactatcggcataccatgcttcatgatccaaagcatctggtgaagctacaaaagcttgaggtcttgctgaacttttattgttgttgttgcagttgtttccaggtgagaatcccataaaaatttcatcatacctattgtagcaataggctgctgaatgtccatatttgccacacacttggcaagtgggcttgggacctgagtttcttcctcctcttcctctagatctacctcctgaaccacctcgatttctaggataatttcctctattttagttggaccctctgccattactgttgttgtgattactgttgttgttgttattgttgtttcggttagccaagtttgcagatggattacttggatttctagaattatttccaagtttttttgtggttgaaaaagctgtgagcctctccatcttgctgtcaaaactgagaagcatgtcttgcagctcctgccatgatgtagaaggtcttgcttcgatgagcaaaacgattggaagatagtccagatctaaaccagacaaagcattcgaaaccaacaatttttctggataaggatctcctgccagcgcaagagtatcagcccactgtcgtttttgtcaaaggtagtcagccatggtaagggaacccttcctagccgtctgaatcttcgttctatactcatccattttggattttgagtgtgaaccgtagagagcttcaagagcagaccaaagagcagatgaagagtcaaacccattacttccgaagcaatcccctctgtcatagatccatagagccatccgagaagcaactgatcgttaacgatccattgctcaaaagcagggttgatttcatctgtaacactctcactacaatcgacgttagtggtaacagaaatatattcttgaggtctaggaagagtacctttaacataaccatctagtctgtgtccacgcacattcgcagagaccatggttctccacaacgtgaagttgtttctggtgggttttagcgcaacaatgtttggagtctgagctgagttggtcaaagcagggatattcgaggcagagtattgtcttccatttccacctgagacagctgagtcaccttcaactccggccatgatcgaagaagacgaagcgtctgaaaccgctcagataccaagttaaaaatacagagaatatgcaggggaatgtttgctcagctcaattgtagctgagattggtcatttcaatttatagatgagtaatattgatacaagaatattctaggcctttacacatatacaggaaataaacaaatctgcagtacacaaaatcctaacagaattgtacagaaatcattgctcaatgatgagctgtcctctaagatttagtgcagaggaaaagactaaattgcacctagccttatgacagaattacacctgagatttaactcattttcttcacacttatcacatttatattcttatttactgtgtcgtcagcatagtggaaagtaatcaagattatgtgattaa

SEQ ID NO: 220331 - DNA, 13723 bp, Cannabis indica
ttggagatgaggtttctaatgcgattttgagtttctttgcaagtggcaggttgcctcacaacttgaacgaaacggttatttcattaatccctaaggttgctaaaccttctactgctaaggactacagaccgatagcttgttgtaacactggttacaagtgcatctcgaagatgatatgttcaagattttctgaagtgctccccaacattgtctagaataaccaaggcgcatttatcaaaaataggttgcttgctcataatattatgatttttaagacctccttaacgggtatactatgaagaatatttcagtaaggtacatcatgaaaattgaccttagcaaggcgtatgatacggttggttggcagtttgcggaggatttgctcaagttactttattttccttctcgttttatcatgtggatcatgacttgtctgaagggaaccaactacaacctgcttataaatggaagaattcaaggcaaattcaaagggaaaaaggtctccgtcaatgtgatccaatgtcctcgttactctttgtcttgattatggagtatctcactaggctcctcagttactatgctgggaaaaaaaggatttggtttccatcctctatgcaaacacctacgcttaactaatttgtgtattggagatgacttagttatattctgcaaaggcaacatcaactcggtgaaacttgttaatgaagccttcatgttattctgcaaagccacagagttgtctgctaacacttcaaaagtctcaaatatactttagaggtgttagtgaagagaacaagttaaagattcttgacttagttaaaattgaagaaggctgttttcctcttaaatacttgggagtcaacctgcgtcctaccaaatggaaagcttcagattgtggagtgattttggacaagcttaacaagaatctcaactgttgggctagtaggaatctttccttagttggtcgtgtgcaattaatttactcgggtttgcttagaattagaattttttggatgagtatattcactataccctcaaaaatatcggctgccatagataagagttgtcgtgatttcctttggagaattaaccggaatagaagtaagcttcaccgagcctcttggaaaaaagtttgccttcccaaaaagcttggtggagttaggttccgagaaggtaaaaagtggaacaaggctctaatggcgaagttcctgcggacccttgttaacaaacaaggttgcttgtgggtcaaatggatcaattccatttatttgaagaaccgagatatttggagctaccataaaagctggatgttagctggtttttcaagaaattgttgtgccttcgtgataacatggataaaaccagattgaatcttgttgtgacaggtggaaaatttcatgaaaaaatgttttataccttgcaggtggaggagacaaaagcagagtatgcaggtgctgtttgagacaatttaatagtgcctaaacacatgtttatatactagcaaattgtaaataaacaactccttactagagactacttgtgcagaattattaatatgcagaatatgctttgtccggtctgtgatttcgagattgaaactcacgaccatttattttattgctacattttcactaagcaggtttgtgaagaaatcaacaattggctggggaattatagatggcctggatctatagctgaggtgattagcatgtgttgtaacttgaatcatgatctccaacatagagttgtaaatgctgttatggcagcaaccttgtatgaactttcaaaaaatagaaatacgtgtatatttgagttgacttgttcttctcctaaaagtataagtttggaagtcaggagaattgttcaacttagagtctcgagtaagggtcctttcaaagcttgtccaaaaagtttatatttacgaaatgtaattaaaaactggtagtggtggtgtgtagtggctgctgccgtgggctgtgtgtggcttttgccttgattgtttgtggcttgcttgtttttgaataaagattcttctttttaattttttttttattaaatttatttattattattattttttttcatattttaaactttaattattttttaattctatatttttttacattattattatttttttttttaaaaaaaagcgttcatattacattatttatttataccatataaactattttacattttctcatatacacctttattgaaacttggagaggtactattttgaattagattacaaaacacagggttagttggaatgtttttaggatcccagaggtaattttggtatttacattaaattagggatcaaaatggtatattcccgtttcataaataacaagaacttttctattttttttgtttttacaaactcaatttttgtaaaccctagtcggtgaaaaagagtttcctttctattcaatctagaaacctgaatagaacccttacgcacatcgtgtttttctgaaagagaaaacgaagaccacagattgttttccactgggagctaccgattatttgcagcaatgggagttccagctttttatcggtggttagcggagaagtttccgctagttgtggtcgatgtcattgaagaagaaccagtcgtaatcgatgggatttccattccggttgacaccagtaagcctaatcctaatggccttgaattcgataatctgtatctcgacatgaatggaattattcacccttgttttcaccccgaagatagggtacgttcttattatcttagtcttgctttttggatttcatattgtgttatattagggtttttggtagtgaggctttgaattaacggtgttggttcaattacgctaaatatatttatgtaatgaaagatgctggcagtgatttcttatagttgaaagccttgcttaattgttaattaattatctggcggaggagctgagttggtattgatgaatgtgcacttagaattggggagacttaggttttgatgctccttttcagggctaattcttaatttacattatgcttttgattgatgtttcactagattagtttagtatgtaatttggaattcaaaactcctgtttttggatcagttattatgtcaatggacatacagcatagagtagataaggaggtttgtttgtctctagcgtcatattggggttagtctattcgagtaattctcttagtttaattagttagatacttgggatattgagaaatattaaacaacagtgaaggagtttttaaaaactagcataaatgagacaactttccctctaagtgaaatctataaaaagtgttccttttcgagtgcaaagtctagccagaaggcttaacaattttagaattgaaaatgattagttttacccattttgtgtcccacaagttactaacaaccctaagattcccatgtgtctaatccctacctgggatgagatatctgcatctaatctttggtgatttaggtcatattaaataaattgcgagacacttttgttttatgcattgtactacggcaagtttacatttcattctttttgtcatttttcccgtctacaaatttatgtatgcccagtgagtctttttattctatttaatatgtgtttgttatgcaatgttttccttcaccatattgttttgctatgcagccttccccaacaacctttgatgaggtctttcaatgcatgtttgactacattgacaggctttttgtaatggtgcgccctcgaaagcttctgttcatggctattggtgagtgcctgagtaatttaaattgactttatttgcaatacccatatatccgttgcatttgttatgtactaattacgtggaaacaactggtagatggtgttgccccgagggcaaaaatgaatcaacaaagaagcagacgtttcagagctgcaaaagatgcaaccgatgcggtatgtgctcttgtggatgctaggtgggtccttcatgtgtttgcacataaggggcttttgataccttttgtctaatcaagataactatgttcttctgttttctttttttaattgtacttgtgatcaattaattttgttgacagtgctagcattctatttactttggcatttcttaatgtacaatacatatcaaattattttaattttggctgatgttacttatatatattatatgtacgcacataaaatacatgactgttatttctgtaggcagctgaagaagaacgcctgcgtgaagagtttgaaagggaggggagaaagcttcctcctaaatcagaatcacaagtttttgattctaatgttatcactcctggaactgaatttatggctgtattgtcaattgcattgcagtactatgtccatcttagattaaacaatgaccatggatggaaaaatgttaaggtacctattttatcaagctttttgatcatttaattttgttttaagtgttttgcagctgggattctctacttgcactgttgtgctttggtggttctcagtgatgttgtgtatctaacctttgcaagagcacttatatatgcatttcaattggctgaaaggttattctttctgatgcaaatgtcccgggcgagggagaacataagataatgtcgtacattcgtcttcaaagaaatcttccggggcatgatccaaatacacgtcattgcctgtatggtttggtatatttatctcttccatttttattgcaattttttttattattttttttaaacatcacatatttggaatgttaactaatttttactgttttattaatgtgtgtctatttgcaggatgctgatctaattatgctgggtttggctactcatgaaatccatttttcaatactgcgagaggtttccatttcctatgtttctgttttcagatgtagaaataaaaagtcttacatttagggtttacacatctcatccccacaccagaataattgcaatgttgtttgatctgtcttatttactgataggcgactgtatatttttcattgctactattcagattgttttcacccctggacagcaagacaaatgcttcatgtgtggtcagatgggtcatttagcagcagattgtgagggaaaggcaaaaagaaaggctggagagtttgatgaaaaaggtgataaaagcattgtcaaaaaaccatatcaggttagtttacatttcacttaatttgaagtcataggcagcatattccaatatgatatatcttttcccccctctagttatatttatttttgtgtttactttgttttcttttatacacagtttctcaatatctggactcttagagaatatttggactatgagctgagaattcctaatcctccatttgagattgatttggagcgcattgtggatgattttatatttatatgtttctttgtggggaatgattttttaccacatatgcccacactcgagattcgcgaggtttgttatttcttttgaagtaaatctatttatctaagactttgtagtttacaaaatttgataatgtttttgcaatttctgttctttatttttcattcagggagcaatcaacctgcttttggcagtttacaagaaggaatttagggcaatgggtggatatttgactgactcatgtaaggtaatagttgcatgtgtatttcatttatttggtgtgtaagatttccggatattgaggccagggcttaattgtttttttggatgttaattactgatttcttttgtttctcagcctaatttagatcgcgtggagcatttcattcaggcaattggatcttttgaagataaaatattccagaaacgtgctcgattgcatcaggtttgttgtctaatatcattcattttgtctactggccatgcgtttcttactagtttagagtcttgctagggaaggagaaatgtgtacattaccattgtcaaagtatcgtagccctctctttttactagtcaaatattggtttgtcacttctattttttgaacctgtaggaaaatataccttctaactgcagctgaattttttatttcttctagcggcaagcagatagaataaagcgtgaaaagggacaactaagaagaggagatgatgcacaacctcaggttcagccagaatctcttgttccagtttctcggtttcacggttctcgtcttgcttcaggttcttcaccttctccatatcaacaatcaggatctggctacaattctaggaacagacaggccatggaatcaagtggaaaaggaaattcacatgcaggcaaagttgctcgtatatcttctgctgctagtattggtgctgccatcgttgaagctgagaacaatctggaagaagacgtatgtagtttttctaacacaggagctttatgcacctttttgtcatggctattttaaaagttgccttaagttttttggtattgtttagatgatagtgaaagctttaagctggagttggagtaacttgtatcttgcatgatgcaattatgaatctttttaaattagagggcttgatgatttgctatcttttgatagttttctttactggggcaatgagttagtccataaaccacaatttaatctcagaaagtaaaagaatagtatgtttgttaaaaaaaaggcaataacttatgttgcaatcttttgtttttcaggagaaagaaaataaagaagacttaaaagcaaagctgaaggagataattcgtgggaagtccgatgcttttaattctgaaaatcctgaagaagataaggtctatttagttttttactgttattgatatgatatataactgggcaaggtttttcagtttcttagtaattatttgttgaaagctatataattgcgtctggtgttgatactaaaaaactattttccattttctaagaataagaaaatattttctgagcaagggtgtttggcattgttcttagaaatattttttaaaaccagagttaaaaaagacagatttctgatgacaatataattttttttcctttatttgttcctcgcatcaaaacttttcaccactttttctgtcctaattttgtatcatctcattctccttgttttctccgtagtcatttatctcattactttgtctccttatttttcctcactcatcgtttaacattgcatttctctggataccttctctacttgctaattcttgtcaatttctcgggtcattttttctcttttccttttccttcatgtataaatctctccatttaatttctctcatcatttcctttttggcattaactttcagtttgtaattgtattcttttttctctttaacttaaaaaagaattctaaaaattattttagaaattattatctgcccgtgttttgaaaatatcaaaaaatattttctttttctatttttcaaaacacaacattagaattagaggacaaaaaacaatgccaaagtaacgtaccctatattttcatgacaaattttcttttgtgcatacaacgtcactttaatttcatactgtttttcagtgaatgtgcccatgacacaacattttatgtttctttcttttggtacaatgtgacattttctttcaaaatgcaaaagtttgaagttaccaccccagaaatataagcaatgtattgccacatgggttatttattttgtgtattgtttatctctatcttatatcattaggttaaattgggggtaccaggttggaaagaaagatattacgaagaaaagttttctgccaaaactcccgaggaacgggaggaaatacggaaagatgttgtaagttatccgtataagttatattgatgtagagttcaatcatatttgttgtacgtcttaccttttgtgcttatgttttactaggttttgaaatacacagaaggcctatgttgggttatgcagtactactatgaaggggttagttcttggcattggtgagtttttcattcattgactcctttatgatcaatagtggatcaaggcaaattgttgactttcctgccgtggaacatttctaatttcaggttttatccataccactacgctccatttgcttctgatcttaaggatcttagtcagctgagcataaagtttgagttgggttctcccttcaaaccatttaatcagcttctgggggttttcccagctgctaggtattctatagaattttcttacccttttttccattgtaattttttagctactaaatactaactacaccaattgcagctctcatgctcttccagagcagtacaggaaattgatgactgatccaaactcacctatcattgatttttatcctactggtatacctctatccgaactgattctttacatttaaaacaaaccttttctctcattgatttttatcctctggtatacctctatccgaatactgattgcctttacatttaaaacaaaccttttctctaaatcatgtttcttacagattttgaagtggatatgaatgggaagagattttcgtggcaggtggatactttattttttttatttgatatgtcataaatcttttgggtgtagtgtgcataaattctaacatcttatttctatcatgaagggtattgcaaaattgcctttcattgacgaatcacgacttctttccgaggttgaaaaaattgaacatacattgacggtatggtttctacttgactctaatgaatcccacattggctgtactgatcatctgttttcctctaaaagtattcaaagcagtttagttagttgacttgcctgcatttttctcttcttttgtctctggctataggcagaggaagtccggagaaacagcaccatgtttgacatgctctttgtggcatcatctcatcctctttctgtgtctatttactctctcgacaaccgctgtaagcaattgtcaaacagggaaagagctgaatttaaagaaaaaattgatccagaaattaggttggtaatgtaattcatagttgctatcagttatttctattttgtacgaaatctttgatgatataataatttcatcaatatagggactcagacggaattttaatttctaatgtttgttcagatatctgttgatttaaacaatatatattttcatccttgctcactaacatatgccaataatttatgttctctgtaaaatatgggttatcttctaacttggtttagggctgcatgcagtgaagggatgaatggatatctatctccatgcggtggagaaccctgtccacctgttttccggtctcctgtattgggcttggaagatatcatggataaccaagtcatgtaagctgttaagcaatgactattagggtctcgcattgtgaagttttgaagctctacaagttgcttgtttactgaaacctttttttttttctcttttgcagatgtgcgatatacagacttcccgaccctcataagcatataactcgaccacctgcaggtgttacatttccaaagaaggtacattgctcttcacacaagttcactgtaggtggatgaaacatgtctttttttcccaaacccaatctatatttcacatacaaatgctccaccagtgcatgttatagacctttattgctttttgtcatacaatttaatattttcttagaaatattttaattattagacagatctgatagagattactgaaatttggtaatacgtatttgcattttgctttcaagctattgacgtatgattttacaccagtaagacttccactgcagtgggaggcggtaaagtttacttgcttctactgttatcttatcacctttgtctctgagacaaagtaatgttaagacagacaccatcttctgtctctccctctccctttgagcaagatcacaactttggttcatgtattgtgtttgcttttctaacaggctctattgtttcttttgttttttattttcggataaaaatattcaattgggaatgagttattagggaatatgaacttatttttctacaacaagaaatatgctgtttttgttcagttctttctattattttatacagtattttaatgtctcggaaaatggtaaatgtcaggggattgcagagcttaatacatatcttttatctcagtttttctagtttgtattaacattattttatgctattttgaatggcttaatgtcatgtggcatggctactatgtcatggcttaccaagatgttttgttctcagattgtttcattgggagatctcaaacctgaacctgtgttatggcatgaagatactgggcgaagaggtcctgataatggaaggtaaatgctatttatgtacatcttttgagaaattctagtcctgtccccttttggatcttctattttatgttgatcatctctttttgttttgaacgatatcaaccttggaattactatattatttcaggtataataatcatcctggaaccacttctggacgacaacttggagaagcagctcatcggctggtttctaatagcctacaagtgaaggcagactacaatggatatggcaatcatggccgttcaccatcttattctggtaaccatacacgacaaaattcctatgggactcatctcaggttccatgatcgggaacattcagacattcaccctcctgaaggtcaataccaatcatcaaaccgaagtagtcatcatcattacaatgatcgacgctggaatagtgacggacacatatcgtcaggtagtcgccatccacacaatgggtctcaatccctatattatgatagaaataaccgcatggctcctccgcatgggtttgttggtccgcataacgttgatcccatttacccaaatggacctatcgcacaaactcctcctgggtttgttggtgccaacccgtatcccggtggtcacaaccaatatcaaaactaccaatcagctggagcaataggccgtcaacagcaatggccggctgatggtggcagtggttggaatgcaccaccacaggctggcccgtacattgcgaggggctacagtcagccacaccaatcaggtaatccatactctgcattggatcggagagcaaataagagagagccgcctcctgcacatgggtatcgccggaattagagtcgaacccttattttctccatgtagtttctctggtagtaaagattgtaccatagtcattcttgtttggatatcagaatgctgtttaactattttatatacttgataaaatcccataatatgtgcgtctgggattggattactcaagtgttagatgttagagggtttatttgattagttattgtattttaactattttttttttctattatttcagtttgatatgataattttgtttcttttcttttcggaaggaattggatcatttttaggaatatgacgctgcagtcttttgttgtactattggttatagtttactgtttaaaggttatttttttttccccgattaagatcatttttaagtgagttttcaaagcataatttgaggaaattaaaatttttgaaagccaaatatataaattgctgcaatttaagcactaataaagctttaagattaactttatggagtattcatatgtaaacgagaattcaaatgttattggaaaataatgtaaaagagaaatgaatggtcaagaaaaaagaaaaaaaactcattgcataaagtgtaacttacattgaaaataataatattaaaatagtgtattttttatttggtaatttagaaggatttattgaagcaaactgaaaataagtcatatggtagccacaaagggggctacctcccttaacatgcacctcaaacaaacacgcgaaactctagcataataagatagcctattcgctagagagttgtccgcacgaggaatgaatgacacaacacaattggaaaacaaaggtatcaaagcacgacattcatggaacacagggaaagtactccaagcaaatggtagaacacccgaagatagggccttgacaacaatcgatgaatcaaattccaccaacaccgtattgaccttattctccttagcccattgtcgcgcattaagaatagccagtagcttagcttccagggcattgttgactttgatgtattgcagtatcaccatcgcagcctcatcaaccacatcaccttggaccaaacccaaactagcaaagccattcttaaaagacgcatctactcgcaccttgagttcccatccagggtcaagaggcatggaaacacaaggctcaaagtccctaggctagtagttatcaatcaaaacagcaccaaactcactggctctgtgcttaatagttctgattgagctttgcagatccgggaaagcaccaagaaacaggagattgttcctacatttccatatttgttcaaaaatgcaggccacatataacagcactgagtcattttctgcattactaagccacaaaaatagattctcaaaggataagtttgacaggctgctgctaaagataccccaagggctaggaaaccacaaacatctagcgaaagggcagtcatgatatagatgaatatcagtctctacttcttcctcacacagcccacataatctctcatttccctgaaggaacctcagacaatttttgagaggaagacagccagtcaaaattctctagatcagtgttgtcggtcggggatgcatcttaggtttccagagtatctttcacaccaatttctcttcattaaaatagtgaatatgatggtcaagattcaagaaattggattattgttaattgaatacataatttgatattactgtaaaaatagaataataattaaaaatattgctatgctccatacttccattgttattttttttttatttttttgaaaattcattaaaaatattgtctccagcgaaaactcgacaggaacatcactcccaccgaaacaacgatatgaaaaagaacaagaagctctaacaatacaatgagctaccttaccagccaaacaataaaataaaaatcaaaaagttttttacagtcatcagagagtatataaaaactattatgaattgcatgtacagtaagtaggtaatcaaattcgaggaccaccgaaggccatggtctcgttttgatccaatttaacgcctcctaaattccaatagcttcagctacacctggagcaattacttcctcaaaacaacaagagcgacagaattgaaagaatgtgtaatctacattgaaataatagctttcacgtttcaacaacaagagcgacaaaatttaaacaacaacaacttctgcatttggttccattgtattaaaattgaaagaattgtttaaactttatttttcaaaaaaaaaaaaaatagtattaccttataatagaatagtctcaattttgaagaaagtttggatgataatttcttcccttgttgtaaggttctaaaaactacattttagtgacttccaaaataatttaaatactaaatacttatttgttaaaaatagagtaaattatgacataaatacttaatgtttcaaattatacacttaaatgtagggctttgtgccctaaataaaactctctttcaatgtaatcttttctattcaattatcaataaagaaacagatttaatttcattacttgtttaatgtgttatttagttcatgtgatcatttattcatttatttgattttataaattcatccaaatccttatgacaattgatattgttgtttattgtgttgtcaaacacagtggaagttaatcaagattgtgtgattaaatgtattcctatgattttat

SEQ ID NO: 220332 - DNA, 2844 bp, Cannabis indica
tagagtgtttccgaaatgtggttgattactaaaattaaaaaagtttggaccccattcactttttttagatccatccgggtcactcttcacatggccccagaatccaaactacccgaccacttgcaaatagtgatatgatgatattattattattattattattattatacgacccaaacctcttattagttcttatattaaattctatctaccaactaattaaatatatttatgttgtaaggtggagcataaattaattaaggttgtaattataaattaacaataatataagaatttcattagaaaagaaaagagaagaattttaattaagaatgtttagaacgtgatggagaaatgcgtgtgaatgaatgaagaaaaagcaaagaaggtataagatgatctagatagttcgggttcacatttcacatgagcagtaacagacaatataatggaagatagccaattccacaatcttttgattaggacaacttccctatatatctacccttattacttttctaccctactactcaattttctttttatttttatttccaaaaataaattcaagcttacctcaatatttacctaatatttatataacttctttttattttattgactgatactacatttgctactgttcattttcattacttaaaagtatttgggatagggacggactcacttgcaagctttatgggggttgaaaaaaatttcatttgaagaaataaaaaataaattttttaatttgataattatacactacaataataaaaaaaaaaacccacaaatattttttataacaattaaattcctacaaaattaaataaatttattaaaattaattataatttttgtttaaaggaatataatttttttttatatattgacaataaaactactagattactattttattaagcttaagtaattttacctttttagttatatatattatatattgtatttgttgaagtttagataatgaatttaattatatatttgtgacaaatattaagcaatagagtaattgatagtgaacgaaggagttgtattatttatactctcacacagtgaaaaggactaatacaataattgtagacatatatgtagtactccaactccaagtggacaattgtctgaagtatagaaaatagtctagaatattcttcaactaatctaatgacaaagcataataataactaattagataaatctaatcctttctttggtttatcaatttctgtcgtactacttacaaaaatttataggaagttggtcacaaatatccctaaattctacttttgctacatttatggcaatcttataagtgggtattcatatatgtccagcaaaaacgaaaaccataaccatatatttgaatttcttctcacaatattttgcttagttaagttggaattgcatttatgtttttccagaagtgggccatattttacaggcccagtttatgcgtattgcccagcccatacgcaagcccaattcggagacccggaaacagttcgttgccagttccaccacgtttgtcttcgtcccgctttcgaaggcatcaggggtttttgaattgatcgatttcatcacacacagagagcgaaacccctaattttggagaagaacttgaactggggatgaagagaaatggcggttgaacgaagcgtttaactaagtatttggacgaagctctgttcaacagacccttcaaagatggaaggagccgaaaaacgagttttcaaatgggagattgatgataccctgttatgaaggtatgttatgtcctgttatatgaattggagcaatattttctggtttcgaagtcctctcatcgtaaaatttaaattgtagaaaactaaattgggagggtattcttatactgaatgtacattgttattgttcaaggttaagctgcagactatatattgtaatgtctgttcaatgtacatttgtctcattcattcaatgatttaagatagattatacctttgtaatgaagaattgggttcatttttctttgaataaaatatgaagggtttgagacccttttcttagttcctctttaagttttgtacttggtaaattattaatataacagctctcagaatcaatggaaaacaggggaacgaacaagacactcagtgatctgggtcttcatcttattttgttgatctacctaaattatcaaggaaccatctgtgttatggtgcattactcaattgttactgcaaggaattaatgactgaagaagctgaagctcttatggagaagatgaaagaaatcaatctttctctatgcaccatcaccatgccttataatagctttattgacactatgaaaagtcagagaagcctgaaaaaatacctgccatcatacaagaaatgagggctagcagtgttaggctgtgtggatgtgagctcatgctgctgtcaatgacatctgtggggttgaaggggttattttgatgagatgaagagggatggtcgagttgtcactgattggactacttatggcaaagctggcttgtttaagaaggcagaagctgcagttaaggaattggagaagtaaactgcacacaaggatctttctgcttttcaattcctcattacattgtatggtcgaacaggaaatcttcttgaagtttatcgtgtacggtgatctctaagattggcatttcttataattgctaatgtaagctacttaaacatgaatcaagtgttggtcaatttaaataacctacctgatgcagagaaatgattcaggaaatgggaatcatggtgctcaacatatgacaatagtgttgcaaattgcttatgctaaagatggtttact

SEQ ID NO: 220333 - DNA, 2205 bp, Cannabis indica
aaaaaaaaaataaatagaaaaaactacaatatcgcaaaatgatcgcacaaccaagaaataatttcgcattatgtcggacaagaaacatactgttatacctgaaatttggctgacacttcagaggatgacacgcgtcaaccttggagaatgcaaatcaataaatataatcataattatattaaaggatattataatggaataactcattaaatgcagagttgatagcatatatctacaactcgctgactgtatagtcttaagcgagacaaggatgtacaaactaattaattcacgtgttgacgagaaaccatttcatgttagaagacacaatcataaggatcacatcaataatgcataacgaggtatcaacctcagaacatataaaaggtgatgacgagacatgttggttgttaaaacactaagcgtataatatgtattatactaagtaagtacaatagctggaagaacctaagtggcagatggcgaggcgtccatctcgctataggaaggcacactcctgttaccctcattaatcagctccagacatctttcaaagagatccactgctccattgagtcagctctttcagaaagaagttgacattcaaatgatggtgactactgatgttcaccttgtcacgaagaactgcaattgtcagatggagcgttatgtcttcaatcacagaagtgacgggatttacattattaacctcagagagacatgggaaaagctaaaactcgttgctaggattattgttgcaatattcctagtgagatacactttgcagcgtatttgaatccacgtcatcatttacccattaaaagtggttaagtcactcctgtatgattttcaaataataaccacatttacttacgtgatgcgaaattaaagccaacaatttcagggaaatattgttgtgggattcgtatctgattgtaattaactgtcagcctatgttactataaataggggttgaatgtacagaaaaagggacgaaaacaacttgagagaaaaaatcctagtttgtatcagaataatctgaataagattgactcgtggactattcagaattttaactaaaaaccacgtaaaaactttgtgttgttcttatgttattattttttcttagattacaactaatttctgtgctaatcctctcacgaaataggcttttttatcgctaacgagaatctacgttaacagtttggtgctttcattgagagccttcgtgaaaaaagctcagaaaaatcactcctaacaaaaaaaaaaacttttatccttgctaacaacagggaaaatgtcaataatcaacctgaagaaattactcactgtgctagaaaagagtcggcaggtttatggaggcctcccaactcaaggaaaactcgatctacacgatcgacacattcatggagaaaccaacctaaaggtggccaaaacctagaaactatgaacaaagtacccaacaatgacgatggcggcacccttagaagcgagaatttttatgaccccaacaagtatgttccgttggttgagttggaaaattgccaactcaagtaatagttggcggagaaaaaccaacaaaatactgagttggaataggaggcagccgtagacagggcaacccaggagaatgctgctcaaaaccaacctgatcctaaagtaaggaggcactactacgatttagccttttagtgacactctttagtgacccgcacaaaagtgcatgtcactaaagagttaggagtcatatttagtgacacgcataatgagattctaaatttttggtattagtctctcataatgtgtgtcactaaaaatatgaagggtcactaaaaaaaatgctgacatatagagtcatgccaagagagactgcgaaagtgtgttctgacatgtctggtgcatcactgtatcatagtaatatatttgattattattaaataaatttagtatcatgatatagtgacgcgctaggcaagttgggacatgtgtacccagtcatgcctcgcgcgtcactatatgttaataaaaattacagattattaatttctttaataaattattaattttatttttttaagtaaataaaaaatacagcatattaatttaattttgtaagtaaataaataaacgtgacataaaaaggacattatgaaaccctaaagccccaaacctatcctcttctcttattcgatactctctctctct

SEQ ID NO: 220334 - DNA, 3310 bp, Cannabis indica
tacgtacatcacgtgagatgtactagccctaccctccttagagagaacattttataccctttatgagatagggcattataccaaagaaaaaacactatataccaaagaaaaaacacaaggtgtagacctataattgagcttaactctatttgaaggtctaaagagttttaggtaacacaagcataccaaaaaactctcaacatggtgtaatcggggtttgacatagaaaaagtgattccaaaggtgtactgaaatttaacttgggtgtaggcattttattgataagaaatacaacagtacgatatgcctcatcccaatattttagaggtaaagatgcttgagctaaaagagttaaaccactctccactatatgcctatgttttctttcaactaccccattttgttcatgagtatgaggacaagataatttatgaataatcccatgttcatttaaaagtttagtaaaggcttggtactcccctccccaatcaaattgaagctttttgattttgtaacctagttgtaattcaacttgtgccttaaatgttataaaagttggtaaagcctcacactttgttctcaacatataaatccatgtgtgtctagaataagcatctataaaactgatgtagtacttataaccactagatgaaacaataggggcaggaccccataaatcagagtgcagtaattgtaaaggctcagtgtattcagtagtggaaataagaaaaggaaacttatgatgtttccctaagcagcaagaagcacagagatcagaaaaattagcatcatcagttttattgcttattttgatattacaagtagaaagagcactttgtacaattttagctgttgggtgccctaatcgattgtgccaaagggaaaaaagagaatttcttggtggtatggatgtattattacattgttctttattatggtgcctaagatctgtaggagacgtcggttttgggaggtgagacttcttttggtggtagcaatattttgaagttgaatggagtcaaatttgtatagaccttgatcaagcttcccaaccaacaaggtcttcagagtgacctgatctttgacacaacagtgagaagggtgaaactcaaaatagacacaattatctttggcaaactgagacacactaagaagattcttggttatgtgaggaacatgtaaaagattatttaacacaagctgttgagaatggaaaggagaaaggatgaaggttttaccaatactttgtatgttgagtccagagccatcacccatatgaatctgctgatctcctccatattcagtggaatacatcagattttgggcattgggagtgaggtgatgagtagctccagaatcaggataccaactgttgtcttgaaccacctcaggagaggcatacaaatgtgaacattcagcaagattagcactgccattaaatccttgaaaagtctcgggacctgtgaaagacttatcaaaactatagaagcacttgtgaaccgtatgacccatcttgtgacatagctgacattgagccctttgtccccaagccgaatactgaccacgaccttgcacatttcctcctctatttggttgtgtgtgtccacgacctggagtagttcctcgtgactgagaatgaggctgagaagaactaaagccaggaggtggatgatgctgagaataggtgccaggggcactcctgaacatagtagagtgagattgatagttagaggaaggatagtaaagggaagagaatgtacctctacctcccgtgaaaggtttggtaaggaccagattagcttctggtttggctatgtcaagttcttcagagtctttatccaatctgacttcttgagccataagcaatgcctcaatctctgcaactgtgtaattgtccagccgtgtattgacagaattcacaaaaacattgtattcactagatagtccattaaaaatagcttctatgtgatcttgcgtagacatgggatgtccaatggaggcaagaagatcaacaagattcttgattttcagtagaaaatcattgagagaacccttcatcttagaatttctgagttgagtcttgtatttcccaatgtttgctctgtttagggctgtgtagtatgtgcaaagagtctcccaaatctgtgctgcagtttcacacccaaccatgcgtgtgagcaatttttcagacattgaagaaagtaaccaagaaacaagaatactgtcttgttgatcccagacttcatactcaggtgagtgtcgattatgtatgcgatcttcatttgtgagaaatttcagaggtgcacttgtaggatcgaggtgatgttgaaggcgacttcctttgatggcagcaaacacttgatgtcgccaggggagatagttgtgttcatctaatctgacagagagggagtgcgagaacgtaacaggagctgaacgaggtagattgagacctgagttttgagaagaacctccattgacagccatgaacgaaggcttgaagttgcagagaagaaacgaagataaagaccagaagacgaatgaaaagaattctctgtattgattatgagaagccaaaacaaatgatttatatacaagagaagagaaagtagaggaaaagaaaacagaaccacacaactaacagaaagttgttacagtgagtttgaatacagagaaaataacagaaagttagttgagaggattaactaactcttctactcttaacaaaaacacgtagtacgtaccaattaacttaacaaagttgatcttcactaaacctaatggtgattgattatagtgtgacttcaataatgacgattgattatagtagcatggtgtgattttatcaaaaaacaaaatagcaatttttttacttaaaaaaaaaaaaaaacaaaaagatggattttcttttatttttttccttatccttttggggattttctctattcattattggcggaaccagtaccaatatttataagaaaatatgtgacaataagtttgtttaattatattaagcccaaagggctaagatagacattgaggttgagccaagaacaagtgcaatgaaagaagcctttttcaaccatgaaacagaagtcatcattttgttgtggaagaaatcaagagctatgagatcaacaagagccatgtatattagtattccggaagagaaagagcctaacaaaccctccataatcaaggcgtttgtgctactgtcatcgtaccccgtcgccgagaacaatatcattcctaatactattcccattggcgtcgtcactgcaaacataaaacacatatatgctgttgttcc

SEQ ID NO: 220335 - DNA, 1678 bp, Cannabis indica
attagttattcaagccatttttaatatacttcttgcaagcaattttctagtaacaatagcattaattttagcaagtttaattacagtcattttaattttgaatcattgttcaaccattctcatatttttctttttgctttaagttgtaattagttggttttacatcatatttttgtttgcaatccctgtggagacgatcttacttatcattttattactattgtgactacgtatacttgcgtacataattttcacaacatagagcatcttgagtttggccctccgggatcgcaaactcagttgaaataggaacctcagaggtcggaggagcagagttgtccatgtgctcacatgcagggatggtggttccaggattgactactctcgatccctgaggtgcgctccttgacttgtccgccttccagtgccagtagctggggcaaaagctcctccctatcttcagcatccaggagatctatcatggcttccttatgctactagagggtatatattgaatggacaaaggcttgcaccaaagcctttacatgtcaagcctcctactcttgaagacgtccctttaaagtggagctttcaccctctaggtcggtgatcataattaaagacaaagattattatgatctccaactattctttattttacttcataatgtaattacccaacgtctcttcttcctattcaattgataaattgagttaagaagtttataatctggttaagacttataaatccaatctatatgaaaacttcttatatttctatagtaagtttaatcacaaagatagcattaaacataacaactagtaaaatcatacaaatagcctaggtattagcattacacatagcaactagtaaaatcatacaaacaacctaggtactttcgttctaaatcaatttacatatataacaatcataacatatttaaatatcacttttttagaattttgatttaaattcataaataacaattaaggatgatcagttaataattacaaaattaaaatagattgtttggaattgcataaagagaagaagaaaaaattgtataattatataattcataaaataaactcaagcagttcacataataatccttaaaagaaaatcagctcataagagtcattctaaaacaataaaaattcaattaaaaatataaaagataatgatagatgagaaagaacactatttggagtcctgcaatggtgtcttctgctcctagtcgtcctcctatgctccaaatttacctccaagttcgaatagtgtccaagctttgtcatcaaccctcctcttataatgcaaaaatccaagtttaccaaaaaaaaaaaaaaaccaaggtcgcggtactacaagtgatttcctcttttcttcgttgatttttgtagtttcccgttttcagtttcctactgcaatgaccgataatattttggccataactctctcaatataactcataattggatgattcaatatgttttgaaaagacaaaagaacgatatagaactttcattcagaaatgtttttctaaaattgaatggatcatagttaaaatttagcttgaggctctagattttattttcaatcacaaacggagctcgttcagcatcagcattcaaaacttagaattttttaatttatttttggaaagtgatcactcttgac

SEQ ID NO: 220336 - DNA, 1964 bp, Cannabis indica
tgttattggagacataaaacaatactaatttattttattttattattagtaatgtaaaaaatattaaataatctaatgttaaaaactaatcaaattgcacttgataaaaatcaaatgcacccaaaataaggattagataaaaaaaatactccttgtagtataagatcattcaacttttcagacatttaaaaagatcaattactcttaggcttgtacaaaagcatttaatggaccacattgataatactacatataaatatttacaacaatagagatagagttgtgagattaggacctatgacacaagttacacattctactaaagatcataagacaatttttattgcatatagtgactcaccaacactaacaagacaaaaccaatccaaacaggtcgtttctccatagggtctctcacacacacacattacaacaacaatgaggtataacccaattcaagacctttcccaaataccatactctaaatgatgagacactgttaatttttctgaacttaaacttggatttcaatatgccatctgtacatgtcctcttgtgggactgggatgacaagggtcaataatccactatcatagtcatagtcaaagccagtctcagagttgtccatggagcaacgcagtgggcgctgagaagaataagctccaaaccgtccacatcccctgactttgagagagattgaggctgttggagatcgattgtcattgagagaattggtcagctcggatgaaatttcaccatcaaagagctctggtttctgggaagctgtgtggatatcaaactgctcaatggccccggatgagttaaacatctcgagtaggcctattggagcaaatgaaatgtttgatgcaatttcctgcaatgcagaatgtcaatgtcattaacaagtgtataatagaatgagggagtagggaggaagagacctctctaaaactcaccttgagagggcagaaatggaaaagctcgtattctagaactttgagtgtcactggaattgaagctcctttaggtaatcgaatgacctcccctgaaattcaaagttggtttcatgttgtcagtattcaaagatacttgacactgtgcatagctaatatttcgttgttatcatcactaaccaagtttcttgtaaagttacaaactacaatacctgatctgtaggaataaactatagtttctccattccaatcagcacctgcaacttgagctattgaatcaacatcagaagcatggacagaaccggtgagggtaccgggggatgaatcgtggatacgggtcttcttggtttccttgcaccaaccagcaccttggcagttgaaaacaccaaggattcccgaacacttgttcacattccatactttgagcaaactgcaaaaggagaatcccacattagaggttagtacacgtaaaatcatcacacggttgtaaataatttagggagaataaaacaaacctggttccatctctagcaggatcagcaaagagacaatcacgggtaggtctgccaggtaactgggcacggagaacagatccatcagggaggacaagctttctcaggagctcaaagttgtggtatccaggcttatcactagggaaaaggaaaagggcaaagacaactaagaatgatgtttcatgtacagctgatgagacaacaaagtaggaaatatgaatacctgacatagattgcacatccaccaacagcacgagctgcaccgtgatactctgctgctgggtgtaaactctacaaaacaaagacaatatgttaagaccatctgtcacttgaaatggtaaattttatgaagtttcaagtatcatttctactcacatggaacatatcccagtcaggttgcataaattctcctaggaaaagtgtattgtaagctacagaagaaatatggatggtatgggaagcaggatcccgaggataaaagtcatctgaagctctcaca

SEQ ID NO: 220337 - DNA, 1842 bp, Cannabis indica
gttgtaccctagtattgaacgttcttactcatatgttgagccttgtaaataggtgtatgggcgcctaggtacaagtcggaattatatgcctttcttactgagtctatcgactcacagttctacttccatgtgtaggtaaaggaaaggcgaaaactgaacaggagtgaacctgagctaggatgggattgtacatgttgacgcggcgcgacctggagtgctcggtctcgggacatttgggagttgtattttgtagtcgctgagcgacctgtttattatgtattttgggatattaagttttaaaagtttgaaaacgggatcccagcacatgtaaatattttaatatataacaaagtttattaatgaatataaaagttttaatatgacacgtttttcaagaaaattctttgattagcaaagattgcactgtaatagaaaaagcactgtagcgtgctttagcataagggcgttacaacaatcttggaggccagtctttcccttgggaaacctaccttcctatggacctttcccttttgggaaatcaaaacaaactttctgtggatctcaggctgttttgttcctttcaggtacagttgtgggattcaccttacgcgacgcgtggtctttcagaagggtacctgattgggctaggttccctatccttctgcttttggcttcccacaggttgagaagggccttcccccgtcatctcatgcacggatggtacaccagttggatacacacgaatgcttgccttttccatcgcctttttcatagcaatcaatatttcttgcattcttttattttgttctttttattctgtcaactaagcctcatggtcagtagctcttttcctcaaagccactagttccgtgtagttatcttcatcatatgttttgaactcatcttagtcttctatatactcagggtcgttcggatctccttttccttcaacatccacccgagaagccacatcttcttcttttggaccctttgggtcattaggctggggtggtggatgtgaagtgtttttttattaataccattatatcaagaggctttttgtgatttcctcttttggaaagcttcctacaactctcaatgaaagcacaaaaatgttgaccgacattttcggcaactattaattagagttgtttatagtaattaatggaagttaaagaagagaaattttacgtggttgggacattaatgagccctagtccacgagtcattgttattaatgagtgttttcttacagagaattcccaagagtccccttcttccatacatcattggggtatttataggctcataatggtggtaaaaacgaccaccattgtacgtttgtatgagccatgccttgcacaatttccaatagatgaacatagggcatgattgcctattctctatgatgtgtttaggcttgttctaggcatttggtaagactagacttgccttctactagtgatttgatagctcataatgtagccatcaaatgatgtatggagcattgtgaaatcagagaattatgggcttaaatccttgagcacgtctttttagagtaatgtgtagtatgttcttccccatgctgcattaaatgcatgcactgttgacctcgagcagcatgccatgcttcgcatgtccctctatctcttctccgagtcgagttcacttgtatagaaggagagacaaaactgttatcctcctagtggaccctcccgaaggtgactaatctttctcaattctcgcaaattaccaaactccgaaagtggtttaatattccacgtcccgtagtgtgggtcttattgccacatggcttactcctgaactgttgggttttatgcc

SEQ ID NO: 220338 - DNA, 2740 bp, Cannabis indica
caggacattatattgcacaaacaagatttacaacctattagcaccctatacgggcctacacaaactatacatcaatatgtattcctcaattttttttacatcatagctcattaaaccactccttatctatatccttggtcttcttaggagtaaacattgccactctcattttgatgctccctttagtttcttcaacaattcggtttgagtcaatagacaccccctgccaaattctggaattcctcagcttccatatactatacaccaagctagcaatcgcagctatatacaccatctttcgaaattttgaaagttttgctctatctatccatcgtagcagctgaggcagtgatgttgaaacagcattccacttcagccattgtttaatttcctgcaatttatctacagcagtagcacattcaaagaaaaggtgctggtttgtttcttcacaatcctcacacagacagcatttcccttgtacttgtactcccatcttgagtaacctatcttgagttttcaagcgatttagcattgctaaccacaggataacactatgtttgagagtatttaatctactccaaacctccttacaccatctcgggccagcaactgaaggagaaaaaattttatatcctgctgctatagtgtattttccttgctgaaactcagttgtatcagtcaattgctttatctgattcttgatagccactagctttttccaataccaactagcatggatagaagctgagtagctccaccaatcatggtctttgagatagacactgtgtatccacctttgccaaaggctatcctgcttgtttgaaatagcccagatgtacttacatacagctgccttattccaatcctcaatctttataatccccaatccacctgatttttttggttgacaagtattttcccaagagaccgcaccagccccatgaaacatcgcttgacccttccatagataagctctacaaattgcttcaatagacttgattactttcttgggcaacaccattatctggctccagtaagcctgaatcgcaattaggactgagttgattaacgtaatccgacctacaaacgagaggtttcttgaactccaactcttgattcgagtagtcatcctctcagccagaagctcacactccttacctgagatcttccttgcacaaataggaatccccaggtaagtgaatggtaattcctgtctagagaaaccagatgctttaatcagcttcttcacactctcttctggcatattactacaataaattgcagttttgctagcattaggatgaagccctgaagagagagagagaaaagctttagggcctgaagcatatagttgacactctgtgaatctccatggcaaaaaagcagaatatcgtcagacaaaagccagatggtttagtcgaagctgagaacacctatcatgaaagcgaaagtcatttttctccccaatcttcttcataagccttgacaagtactccatacttaggacaaacaacaatggagacgtaggatccccctgcctgagacctcttttagcttcaaaaaaaccatgtaaggacccattaaacatgagagagaatctgggagtacaaacacatctcattataagctggataaacctcttgggaaactttaaaccatctaacatttcttccagaaacccccattctagagtatcatatgccttttgaaggtccaacttaatcaagcaacttggtttattgcctttcctgtggtaatgtcttaccaagtcctggcaaatcatgatattatgccctatgaatctccccttaataaagcctccttgagagtgagagattgtctcagggagaatgtctcggattcttgtactcaaaagcttagttgcaatcttgtatataacattacaacaagcaattggacgaaaatccttaacagtgttagggcattttacttttggagccaaggtaataatggtggaattgatttctttgagaatgttacctgtttccaagaaagaaattactgcctcacatatgtcgtctccaatcattacccaattatcttggaaaaaactactagaaaaaccatctggccctggagatttgcccactggaatactgaaaacagccacctttacctcctctttagagaattcccgagttaacaattgagactgctcaccagtaattagaggacccctggagagaatactatgctgcactttccttctgttcaacatgctagatcccaacagttgcttgtagaaagataggaatgcttcagttataagttctggctcatgaacccgatttcctgcttcattttcaatggatagaattcgattctgcctcacccgatgcttaatgcacgcatgaaacagagcagtattactatatccgttcccaatccacgccatttttgctttctggtgcagaaatgaagagtagtccttttgcactttgactaacaactccctagcttcattttctttgctatgtaattctgcattcaatggctgctggtgtatcatattttgccatgtctccagctccatctttgccttgttgactgcactttgcaggtctgaaaatccctccttgttagattctttcagcttaactttaaactgcttcatttttgtaaccacttggaacatatttcgaccctcttatttgttaggttttatgccctaaataaaactccatttcaatgtaatctattttattcaacatcaataaag

SEQ ID NO: 220339 - DNA, 1769 bp, Cannabis indica
aaataatttccaacagttttttctcctcaaagacatattctactccagtcattctttttattttgatccaagacggggtatgagaccttgttcacaatcttcaatgctttaataaaatgagtcacgagaagctcactaaggagcacttagcgcctaggttgatgtatagcctagtgcgctgagttcggcttattaaattctagttccatctcgagcatctgatatttttttgtattcaacaagaactaatgattatgatgagtcaaatttattctttgatatttcacctttttggtaaagcgaagtactaacaaattagttgtaaatcaagaagttttgagtctaccaaatttcacggaaagtaacatttctgagaactggcagacgacttcaccataattaagaaattgattaagtgatgtgaaaatatcacttagacatcaaaaaatataaatcaagcacgtttcccattgatacaacatccaagttaacatcagaatgtcaacctgggagctggttgctaaacatccttcagtaaaacgatcataactcattcaatattaatctgattgatacgagtcaacttgtattttaaagatcatttcaagctctttcaagaactatctcacacgcatttcgtaatttggaagatttcaagctctttcaagagcaatatttattcgcaaaatgcctgaaaaacaatccaacagatgcaatttgagctccgaaagttgacgattatcatccaaagttattttagccattagatcatcatcaatggccaagatgagcccacaaatattttttcacatttttgtattattttattaatattttaatggacatccttccctatcaaagggtagcttcactagctcatttttctcattctgaatagtattcataaggtcaaagcatctctattaatttttctctctagaaatctgagctcttttcttagtcaattctcttataattcttgtaagaaataaaaacttgaattagacgtttcattaccattttgacatagagagtgaactgctataaattttgtgtgtccccctttattacttacttaactcattacttatctctccaatctagtgagtcaatgttgacttaatttttagtgtcaacagtaagtattttagtaaataagttgtttttttttttaattttatgtaaaaatttcataattattgactttaattttaaaataattgaaatataattcacaaaacattagaataaattatttatgtataattttaaattataatttgaataaataatttaatgtattataaaattaaaattttaagttttgcttgtccaagacttattttaacccaagttcatggtgggatattatattcactgttttacccatagtataattatggccccaaatatgggtcaaggtttaattttttcaatcccatgaaatatctagtccatcaaacatggccttagtatctttgaaaaaaaaaaaaactctattctcaagtggaaattcatgtaagaacactacacgaatttaatacgaattatatttgaacaaaactaatttggttgggttaaaatcaatccttgtaacacaaaattgacattaattgacccatttatatttgatgttaggtaatagtaacatgcaattgttaaaattttataccctaaataaaactcatttcaatataatcttatttactaattaataaagatacaaaatcattttatgttgcatgattcacatgattattttcatgatt

SEQ ID NO: 220340 - DNA, 2650 bp, Cannabis indica
ggtaaaggaaaagctaagttggacgagcagtgagttggggcttggcagtgattgtacatatcgtggcagtgcagcctggagggtttcggtctttcaatattttgaattgtattttgtagatgcgtgtcaattgtaaaaaaaaaaaaaaacttgtcaaggggttttgtaatagtaaatatgattttcaactgcattttataactcgagatcccgacctatatggttatataattataatataataaaaatagcttttgagatttataaattttaaatacgggcattacaacttccttctaagcgagattaatctgaggtctgtggatatcctaaataacaaggaatttacttgtaattacaaatatcccaagtattcttcttggcagcaagttcccatcccagacgacgagacagcttaagatctcgtggctcgggcacttaccttcagcatactgcccctcaggaagccggtgaaggagcatcccgaggtaatcaatgtggttggtcacccacacttcttagggctgaatgtaacactctagttacatttcgagatagccgctttaacttctatatttggcatcccttcctcgtagatcacattacacataggtttgacagttggtatcccagattttgtgttcaaattagttgtactaagtcatactacggagtagctgatcagtacaaaactatgatggatagggcaaatcatttaggcgcgagctagaattttgaaccaattagtcactataatatattcaagatcacgggttgtagggattttagtgaatattatggtccttctaccccatcttctagtgataccttgtcttctagtgactatggtaaattccttaggcgaaaaaattatgtcccaactctccttttacttgtctttaattaatgctaatacttttatcttggctagcaaaaatgtgtttcgagggtctcatgcataggaaagggaagaagagggtgaccacttcggaggctccttctgatgttgaggtggagcccctcaaaaggcaaaggaaaacaactgctaacaagaataaggcctcccagactactgtaacaccctaagattaagaaaatagattagcaaatcctatctagttaattgtgtgttattgtggaattatcttattttataaatttattaaaagtgaattaatttaatatatgacatgttaagactccgttggtggtgagtcaggggcattttagtaattttgacccgagaagggtaaaactgtgaatttaatttaattacgtgtttatggactatattattatatagtataccttttttgtcctttttcaagtgtgttttgacaagtcggcacggtatcacaatcgggtatttcaggccgaaccgggttcagggctgaaatacaatttcgggattttttaatttggcattttagtattgagtgattaatttaaatttactttgggtagatatgtgaagttaaatgacctaattgcctttgaaagtttgtgtgtgtgaaatatggccataagggaattttggtaattttgcgtattttgattattttcaacaaaagataattttgattgaaattaaaggatattttttgttttcttaaaccccaaatcgatcccccccccctctctctccctattttcatctttgcaacttttgaatttgttgagaaatagcttgggttcaagcttgatttgtggcaatctttggagcttgtgtgattttgagatcttgaggtagtttctaactctttttgcctttaattgttgctgaaattgaagttgagttaagcatgattttgttgtagagaaccttgtgatgcatgtgtgttgaaattagtttaatcttaatgctctctatgcttgtttgtgttaaaagattgaagcagaatgcttgtgctttgtttttgagataattttggggttagatttgtgctttaaccctttcatggagctctgattttgttgttgtgtgtgagctgaaaaatgttgttggtatttgactcttgagtataaggttgtgttgatattttgctcaagtttagagcctatattgtgtattatttaaatctgaatttagatacatgtgagctttgattttgagctttaaatgtgtagtttagctctctgttgtggttatctaattctttaagaggttactttgggttggtgcatgttttggagtgattttggtgtgtttgagcatgtaaattcgaagctaaaattgggtttttctgggtttggaacctagtggtcgcggcccagctccttgggtgtcgcggtccacctcttgtttgtggcctgggattcgaacctaggtatcatggccccatgtgagggtgccgcagcccgcccccttatttttggacagattcgaatgcaatttttgaatactcataactttgtgatctgggctccgttttgggagttctttatatcgttggaaagctcattccgagctctatttgatcatctatattttgaatgccaattttatattatgtgaaagtatatttagggattaaccctatacttgtgaatcttggaaattgtgactaggataaccggcacttggtcaggagcacccagagatttggaatctccacgtttttgggacatcagttaagacagtagttagcac

SEQ ID NO: 220341 - DNA, 1381 bp, Cannabis indica
gaagaagctaaatggtaaccggtctggacagtatatattcctgaggagtggtgatgccaagctaaagtatcagtattcctgaaaaaactcaaaggaattgttagaatgcgatcgacatccggctgtgagaaccattgctgcagaaggcctatatcccattctcgattttcttttatgagattagagaccacaccatttattggtccctcatagtggaaagggaggaaagttgagttccctgggatccaaggatcagtagcacacaaaacacggcactcctcacctattttccaccttaaacccgatgagagaagctgcttgccccaatggataccttgccaagtgagagatggggagtgtccaagattggcttcaaggaaagagttttgagaatagtaacgacttttgagaagctttgcaaggagtgtatcaggataggcatgtagtctccaagcttgttttgcaagaagagcttgattgaagtgcacaaaagaacgaaaacccataccaccgctatccttcctttggcataaaagtttccatgagcgccaatgaattttggaaccattctcattcattccccaccaaaaatttgccatcatagactcaacttggttgcaaaaatacataggcaagcgaaaacaactcatagcatacgtaggaatggattggactaccgctttgagaagaacttcccgacctccggctgagaaaatcttctcattccatgtatgcataagcctccatattttttccttaataccgctgaacatctcctttttatctctgcccgagtatgatggtagccccaaatacttttcatggcatccacaaatgggcatagacaaagtcctatggaaaaaaacttgagcagcaagagtagtattgggtgagaaagacataactgatttctctgggttgaggacttgacctgaggcgcgatggtaaagatctaagacacgcttgatagcaaggtaagaactttcagtagcttgacaaaaaagaaggctgtcatctgcgaaaagtaggcggatattggtggagcttgcctggtgagtttaaaaccttggagatgtccctcggattgttcataatgaagtaagtgtgataacccttccgaacaaatgagaaagagatatggggacagcgggcatccttgccgaagaccccttgaaggagtaagagagcccgtgacttcaccgttcagcagaaacgtaaaagtgttagtggtaagacaacccataatcaaatcaatccatttggtagagaaacccatttttgtcatgacctccttgatgaaacgccattctactcgatcaaaagccttactcatatcaagctttaaagtagcaacaccacaacgacccgctgttttattttt

SEQ ID NO: 220342 - DNA, 1395 bp, Cannabis indica
cagtagcgcgtggttctattattaggccggcttggcagacgacctctctaagtctggctaacttcaaatcttctctcaagtctacatggagctcaccaatggttggctcgctaactccttgcctcatctctacagcataatattgggggccgagttttattgcgatgcatggggtcagctccacgtggatccttcctttagtgaaaggcgccagtgaagggtcctccctaagaggcatgggccgattgttcaaatccactgggatggttgtgtctaccatgccagattcattgtgcttgctgaaattgcaggattgaccacatttgtagtgttcatggaaattttagtcatgattagaacatggacatcgagatctgaagtcataaggtcttgaggaagacccgatgatgcagatggtgcaactggagctgtccttgttttaaccatggcgtttgattagatatgattttaactcgctctcaatgaaagcacaaaactgttgaccttagaaatcggccaagcgacaatggagtcatattaaactgatgcttgccacgcgttatagaattagaactagataataaataaacacaaggattttcatagaggttcaaccccccgagttagcaagtaatgacctactccccttttagttgtattgatatcaagagataatactattaaaattgctataggtgggatctgatatagctctcttcaggctgaaatgcatgaatcagtaggtaggtctctaatgagagagatgaatccttggaggtctgtgagagaaagggagaaaaatcccatttggcgtctatgagagcgagagaagtggattatggtttcagacttagagctttcttgcttaaaatgagacttaggggtgttaggattgagttaaggttctttatattggagagcttaaaccctatttagcaaataaaataagagatatttacaaattaaattaataaatataaatgaccaaatcttcctttgaatgtagatattttcgtagcatcttaatgggctgtcaaggcccaacttgtagcttggcttgctgtccacagatgaagactacgcatcaatgtcctacaagggaaaagttggccggccatacacctacaggatgcaggctagttgaccatacaaggtttgcaggttgaggtcttgtcggtcatgctcaggttgaggatttggcaggtcctattgtccccaggatgtggcaggtcctgttcttgccaggatctggcaggtcatgttcctactagggtttggcaggtcatgttcctcctagctttgttaagagttgactagatctttgcatgtattgggcaaccttagtgatggccagccttagtgatggttagccgccgtagatggaggtcagtcctt

SEQ ID NO: 220343 - DNA, 2362 bp, Cannabis indica
tttttttttccttttgtaagatatatgcttcctttaaatatatatggctgaactttaacagaagcttattaaaaatgcttcttgaaatattgagtttgttagatttaagattttttttcttctaattttagtaaaaaattttaacatagatgaaagttcaagagccataattttgtacatgacaaaattcgagaagcatgatttggtggatatcaaagtctgggaaacatggtttaatacataaacaatcattgaaatagtaaaattaaatgaaattagacaaaagtctttaaatctaacaatctcaatagtttatgagacatttttaataatgttaaaagtacagaagacatgatttagtacatgtcaaagtttagggagcaaaaatcctaattagcctatatataatactatatatgtaggaaacttaatataatattatattcattttttttagaatactatacaaaagtaaagtttaaataatttattgtacattgtaaaataaaataagtatgtatgggtataattaaatatattttttttataggtaaccaataaaacttaagataacaaaaataactacgtatgttgcgcaaaagatagaataatctttacctaataaaattgcggctaaactctccaaattactgaattagtagtaaatttgttaactgtcactatggactgcttgtgtatacacttttgtatatatgatacgtttatattggtacacctgatattattttaaaaattattttcaaaattcattttaaaattaattgaatttattaaaataaaaataaacatttaagaaaatattataaatttgaattaatttttatatttatatcatttttttttaaatataatattaggtgtgccaatataatttgacacatatacaaaagtgtacgtacatataagcagtctatgctgttaaatttacaacagtttagtaatttggaaagttttactatcaaaatttaaacttagaagattaactgcaagtgaagtgataattgagaaaatttaaccgcaaaaatacattgagaaataacccatcaaactagaaaaataaaatcttaatatcatataaaaaaaatctctaactttaagttttgacttttcaactcattggccaatagaacatatctatagaaaaaaaaatgatttgtatcaaatataataagataaaaaaaaatgttaataaatatgtgccctgtatttttgcatacctagctagtataattattataatgtacacaacattcaaataaaaaattggtttattctttaattatataccaaaaaaaaatgtccatatacgtactttggtgacttacactgtgtttggtatatgggggagagaaggatggagggagagagataaaggaattgaaaaattcttttatttggtaagatcatcatggaaagtgtaggaatttttaagtcttttccaactttaccctacaccaacaaataaaccaatcagatttaccaaggtcaatttcgacctttctttgtccctgacttttcaaagtcagcagagtcaaaacgactctgttttgcctttgaacaaaacccaatactcgagaagcttctcaatcacttcctctctcccttaggttttcctcgaaaccctagcagagagtttctctctgagaaactcaaacccaagccttgataactcagaaatcccaacacaaacacaaaccctagatcagatctaacatgatctgatctatacacaaacacacacacaaaatcagtaagaatgggttagaaaacaccaaatttttcccgaagttcaccaacgaattggctacgtctccgtttgagctgctcctcaaatttgagagctcgattccactatttcttgcagttcggaagtacaataatggagattccaagtcacaggtaattttctaactggtaatctcttatttaatacatgtatttagtgtttaatccctctctctcacaatatctaactctctgcttgttttcttgtgcatgtgagatcatcaactcctcctccttcaagtgaatcaccttcggatcttgaagcaaggccctcaaccgtacctggttgtgtatctgatgcaggtatatatagatctagggttcagccttttgtctctgtaatttgttagttaatttagttacagaaattagttaggtgtggattaacctaatccattctaactaatttctgttagggattctagaggccgaaggccaaaatagggatttgcatgtatttacttttctgtccttgtattaagtttgtttatcagtgtaagtggaggtttactccaacagaaagaataagggagactaagaggttgtttggcttcat

SEQ ID NO: 220344 - DNA, 1321 bp, Cannabis indica
gaaaaaaaaaacaatatataggataattcccctataatttaattctataaaatagagataatttaaataatataactaaataattatatttattttgtctttattttattgaatcatttaaatcttaaatatcctatactataaaatacttaattaaatatttaaatgatttatttattttgattaatctatttaataaaataatcaaaacaaataattaaattcttataaccatatttaaaaataaatacaacgacaatcaaggtgagaacaaaacattgaccacaaaaacaacaagaacacatcatgaaaaccctaatattacataagatccaattagggtgagaataaaaggaacaagtactccaataaattcaaaaatgcattaacaacacatgtttcaaatgatgggtagattcatacgggtaggcaatgcacactttatagagatatagatcttgataagcgtacatgtatgagaaggtcattaatgccaccaactcattcggaatgagactacaattttaatacaaattccacacaagactcattcaaatccaattagtaagatagtatcatatcatttctcctttcttcttcctttttcttttcttcttttttttttaacatgaggctctttttaaatcatgtagcaccatctaacactatcactgttttcttttattatctttgactgcattatgattgaaacactaactatttgtagtttatttgtggaatttctttttttttttttaggaaaggatacttgttattataaactaaaaaagagtttcgtttacaacaacagagtaaataggaggagggatattctccaaccaaaaacaggcttcatccacccttagcgcatgtttagctaacctatgagcagtcatattggcatcacgtttgacatgagaaacacatacatttgggaaaaatattaaaagactaacaacatcaacaattaaatcactaaaagataaaattgaattgaagggagctcttaaagcattagagaccaagagagcatcagtttccacacaatttattggcaattggtgttgcaaagccatgtttaaacccaaaaaatagtgatttagcttccatttcatgtgacaagtagttgccttcatcggtattgaaagtgctgcaaccacctcaccatattcattccgcactactgcacccaagccaattgtgtttgttgatgcttggacagcagcatcgacattaagttttagtagcccagcagcaggtggtttccaacgtgtgtgagatgcagcagcaactgatgaaagtaaaaattattaaaaaaaaa

SEQ ID NO: 220345 - DNA, 1817 bp, Cannabis indica
ttttttttttttaatgttatgaattgcaaactatattaaaaaaagctcaaaaaccagagcaaaacaaagaaaccagtctaggttggacacaagaggggtcaacttctcagcaataaaaaaccaaacaagaaattaaaagccaacttaaaaagtcttagccagaacatttttagtctaagggatccacaccacagttgaatccggaagttgagccaaaccatccagtacctgccaaaaaaccgaagccatcttccaatgggggccctttcgagacataattccatacactagacgaccttgacaatccgaagccaaagtcacattagtccagccaactacggtttctgcaatgaaccagttccctctggatccgttacagtaaccacaatggctgcaacagaacacaaccctttgctggaagcatcaacaaaaaccacaaaatcaccttgtctcatcacctcattgctgcatgaatttataccattgaggactcccaattacttaggacttcattagagtcttaggtttcaaagtaaggtgatatttactttgatataaaaataatgagtttttcgtgtctacatgtctcttgtcgacttggattgaattctggaaaatgcaaaaattatgttatttttggcacaaaaaatattttgtaatatatttgtatctgatataaaatttaatatttttattaaaagtgacataaaggtttgtgtatttataattatataaattttggcaaatgtttactaaatagtgaagcacgtttataatgtactgaatttgtatcatattttgggatattattagagcaaatcaattatattttaatgtatttctattagaaatgttatgatgtggggctgagaaattacttaacaatatcagcagaattatgctttaagcttcgattttctaaagaaaacacatcatgtttattagtcaactataaaattttcaataattacgtttttcaaaatgatgaaatagttaatatttttttaataaataaaattttttgtccctaaattataactacttttaaattgtatttctcaaatgtttcttgttgttaaaagtttctctcaaaatagtatcacatcactcccaaaattaatttatttattttacatttgaagagtacattttcataattataacagttagaggcacaattgcctccattgttccaagcttcaagatattcttgggagtttgccttgagtgtgctttatgtggagagttttataggtacactatcaagcatttgttcaatatgcattatgtaatcaattagttcttttctccttttagatttcaatcatacacatagacatagtatttattcaattactaaaattttatcatcacgataataaacaactttagtttatgagtaaatagattatttgtcttcaccaatttcaatttgagtaagggattgatgtggttaagctggctcaaactgcaaactagccttggtctcttcactacatctttgtggatacggtgttcaaagatggaagagctgttttggttttgaggtatttaattaaagataaggcatccatgttacaatactaattttttcagttatgattatattagtccataataataattctaatacgatgacctcgttgtttgtggcctaaggtgttaaatcaaagagttgcttactacttactagggcatgtgcaattagaaaaggcccaagtggaagttattatctttgaagattattcaattgcttgatatgttaagactctttctgtttgttgtttaatttaatctcttcccatgtattggctaaa

SEQ ID NO: 220346 - DNA, 1682 bp, Cannabis indica
tttggataccgaaacaagttaagtacatcactaatcccttttaagagggtgcattgtagaatcaccctacaatatttatattagatttttatggaattttagtaattagataaatattatatgtgtaattaaaatttgtcaaaaaaataaaaataaagtataacattttgtgataatactaaatattattgttacgcgataatatttatttttttatttttttaaatattataattataataaatatttaattttttttttattttaatgaataatgtagtgacaaatataggatttagacaattatttgtttgtgtatttacacctaattattttaaatttaaatatattttaacactataaattatttaaattatttttttttaaaaaaaaactaaaaatgcccaaataatataaaccctaaaaagttattcttccataccataccttgttggcatccaccaccaaaatttaaatgatacaaaagaaaaagaaagaatggaaatggtcctacccaacaatcaaccttcccctttggacaatatcattgtaacataccaatccaattcttaattatgtgtactattccattctcttctctacccaaaaaattaaaaatcaaaatcaaacctttcaaaagaaaaccatctctctctctctctcaaaaaaataaaaaataaaaaatcaaatcttttaaaataaaaccacctctctcacctagtaaaaatgttatttcggtacattctttatttatttcaagatttaaaataatttttactcaaatatgttttatgatcatatatattgcagttgattaaaattatctataaattttcaaattttttgaatagttagagtcttaaaaatacggtttaaatattttatggtatgcatgactatttttttatacgcctaatagataattgtttcaactttatttttagcactgtgaattatataaattttttaaaaaaaattacaagtaatactaaaaaactacaacattgctattaataacaacaaaagaaattgaggaaaaaactttcttaaatatcaacacttaaacatcttttaaaagagtaattactataattttttccaataataaaaatgaaatctttctaaaccaaactttctctctctcaatatgtacaaacaaaaaattaagaaatcaaaaagatacaactagtacttagtacattcttcattgttatataactattagtataattaagtatcaggttttatataacttaagaaaatagtttttagaaaatattgttaactaatcgtagagtgacagctataaaagatacactggtgtccaatagcaatactctaaaaaattatgagcattactattgggcactaatggtttgtaataccttccataggtgacgccttataattgattagcaatattcattaaaagttaatttcttaagttataagaacggtataacactgaataaaacgctagacaatatatagaaaattattacaagacaccaaagtatctcacacttttataacatgatgtcttataattagttaataattttttataatatttattaaattaaaattaaaatttctaacattctcttttactcaactaaaaattaaaaataaaaatctaatctttcaaacaaattctttttcttctctctctcccaatgctc

SEQ ID NO: 220347 - DNA, 1957 bp, Cannabis indica
aatgctaaatttcaatgaagttgatatttcattttcaaaaaaaataaataattattaccatatatatattataataaaaattgaaaaaaagtttttgattatatataaaagtgtatgagaaaatgataataagtttttttgcacatattttgtaattaattaaaataatgtatacaaaattgtaaaatgcccaaaaaaatatcggttgaaaagggttaacccgaccaaaccgatgaaaattattaggcgggttacacttcttttattttttcattggatgtgtcactattagatatttgcaatttggcatttatattgacttgataaaaatacactttaacccgaccaaatcgaccgatgtacacctttagtatttttagatatggggtataaaatcaaactacatgttagaaagagaataatatacatgtttatatttttggcattttaccaaaatacagaatcttaattggttaaaaccagaaaatcggttactaaaagttccaaaatgcaaaaaatttgattcataagttaattattgtttttttataactcaaaagttaacttttaaaaacataaaattcaaataggaattcgaacataatataaaattggtaactctcatttagtatattttgttgaactttattaatactgtaactaagaaaattggcaatttttagggttccagggcccgttgctgcggccacggcttggctcaccgcggcgtggcccaacaggttggagccgccgcagcgagggccttgtttgccgcgacgagaccctgtttttttttcaggaatttttgtttttttttcgtttttactataatttttgactcgggactccgttttggacgttcttgatatcgttggaaagctttttttttttcaggctctatatgttaatctataaataaaattcaaattatgtatatatgtgaaattgaatttggaattaaccctatttgtgaaattttaggaatgtgtgactaggattaccgacgcttacttagggtcaccgagatttgaaatctccacatacttggattactaggtaagacagtaaactagcacatagagtttagtgcagtggtgctcatgtatgtaattttgtatatgttatgtgagaaaccgagattagggttattaccctaaaggttagcggttatgtgatgtagggttattactctggaatttaaatggatatgaatgcaatgttatactgtatatgatcatataaagaattacgcgcacaatgcataattaggttagactagataatcagaaccgagataaatcattttaaggtcttattgtaaatagacgtgtgagcgtaacacgtaggtctatgtcaaatagacgataggtgcagtggcatcaataattatgtgatttttgattattatgcatattgttatttatattgtctagctagctaggccttggctcacaagtgctctacagtgcaggaaagggtaaatctgttgttgatcagtcatgagatcgagggctttgcggtgtattatacatgtttaggccaagctagaccatgagggttgggtctaccaggaaaaaatgttgtaatatttgcttttgccgcttaggtcagtgtgtactaataacttgtaatattttgaaaagtttttatgggatcccaaaacgaaatgttgtctttttggatgtttataaagtttagtaattacaagttataattttattctgtatttgttttaaagtttaatttccgctcttagccctagtaatcccagtttagcgggattagcgtttgtttattcgttgttcgtggcgtgccatagtgccatacaattacttagactaatataaatgtaaatttatttaatttgtcaatttaatttttagttatgctatgtataatttatacttagttcaaatatattattattaataataaatatatataaaaaattttaaaa

SEQ ID NO: 220348 - DNA, 1771 bp, Cannabis indica
aacgagctccatattttcgtcatcctgcccaagcttatatgcccccaactctagaacttcgaccacctcatatggtcatttccaattaggtttgagcataccagccatgctatcttttgtgtttaggaatatccttttgaggaccatatctcccacaaagaatttccttttcctcactgacttgttgaagtatcgagccaccttttgctggtgtgctactaagtttaggtttgtcgaggcttatttttcttcaattttgtcaagtgattctactagtagagcatgattaacttcatgattgtagatcaatcttttgtgggatggaggttctaattctacgggcaacataacttcataaccataggccattgaaaatggtgtttgtccagtagctgttttttcagttgtgtggtatgaccacaatacttctggtagttcctctgccagttccctttagcttctttaagtcattttttcatggtgtctttaggggtcttatttactgcttcaacctgaccatttgattgagggtgtgccactgcagagaaactttttatgattccatgagtcatatagaagtctataaacaatttgctgtaaaactgtttgccattgtttgggacaattttgtgcaggagtccaaatcgacatattatatacttctccacaaagtccaatactctttgagatgtaattgtttccaaaagttcagcttctgtccactttgtaaaataatcaactgcgaccactacttattgtaccccgcccttagctttgggcaattgtacgatcaagtctatttcccaaatagcaaaaggccaaggactctacatctgagttagcttgtatggcagtgcacagggtagtttcaaagatctctggcatttgtcacatttctttacataggcctttgaatcttccatcatagttggccagaaatatcattcacttagtcttttctttgataggctttgccctgcttcttggttaccacagaatctgtcatgtactttggacaggagccgtgcagcttcttcttttgttacacatctaagtaagggcatggagaatccttttctatacattacaccttcccctatgatgtaccttacaactttcctcatcatctttcgagcttcgtttctatcatttggaagttctctattgttgaggtaggccattacaggtgtcatccatttcggtgttgtgtctatcatttcaatttcctctacacaattgatgtttggttcttctaaaaattgaataggaactagattggtcgtattagtttctgtgatgtcgcaagccaggctaaggcatcagcagttgtgttttcttctttttgaatttgcctgagggtgtaacccttgaattgtgcgagtagatcttgtatcttgctgagataaggtatcatcttctatccccaggcctcatattctcctgaaacatgatttactaccaattgcaaattactaccaattagaagctttaaatccaaatttgactgcctcgtgtagatgttgcccccaagtgcgactagggcgattcacgcactagacaattgatctgtagctaacccatctacgtgcaatttccaggtaggtctatcttcattgttgtttagttgggactcttgtactggctccgagttgtcccttatgctgctttcttctttgcccgtgcactcaactacaaagtctgctaaggcctgtcctttgactgttagtcgaggttgaaagattatttcctactgacccaactctactgccca

SEQ ID NO: 220349 - DNA, 1231 bp, Cannabis indica
agtttaggcacttcactttaatagcagtcgtattaaggacttttttagttgtaagattagggtgtgggggtacgatttatagtatgctacagtcatcacacaatcagtctagtaaatggataggaagtttggacctaaaaataaagtgctctgcaacatttaaaaggtgttagtgttttcgttcagttacaggattttgttatggagtttgaacacaaatgaactcatgcattatttcaaatttggcaaaaagatctttaaaagttaacttaggtgcattattggaccttaaaacatttgaaaatgcatttaaattgtgtttgaatatatgacagaaattggggtatgatttgcatagcatcaaattttcgcttcattaaaaaaataccgtgaatctagttttatcatcaactaaagtgagaaagtatttgtgatttaagtgagaatgaatatgataaggaccccaagtatcacaatgaattaaattgaattttgctttaggacatatataacaaggagattgtttatgaacatcatcaatgttacaataaagtttattgcaaagtgaagttaaataaaagagaatatggataatacaaacaaatataacaatatatattattaattaattaaaaaataaaaatataaatacaaatgataagatgtaaaaccagtaattaaaagaaaagtcgaggcacgtgaaacacgctttctttaaagcagatttgccccctctacttgaacagtactagaggatcaacgagcaaccacttcctaggatacaacgactaacaagcagatgaatatactactttcactactccaacgaactcatattaaaatcttcactttattaccttaaaacttacgaaaaagacaaagaagaagaagacaagagagcttttagtgagtgattctttttgttggtgtgtttagaatgaaaggcgaaacctccttttataggcttcatatggggtggaaaactaagtgtgaacactagggaattaatgccgaaaattccaaaaagttagtgatatgatcaatcacaatcttcactataatttctgatatcaataagaatattgaccattattttggtgattacatcattgactaaatctgcatttattagcaattatcaatgaacccatatatttaaaggcatcaatttcttcattcacacattagtctaaagataattattcattatatatttaaaatataaattttt

SEQ ID NO: 220350 - DNA, 1235 bp, Cannabis indica
agacaatatttttgttagtgaaagctataacccccacattaatattagtgggtccgtcactgtcaacgatcatattaaataattttattgttgttattattttcggtgtatttctatataatacattagacccaaggaaagaaagatatcccttttcacatagaaaaaaataaaaaatatatataattttatcattacgattataatatgtaatattagaacaatattattttagagtatggtatttttgacggttctctacagtgcagtggaagtccgatacagtggtttgactggactgttgtatcgtggggatgatgaggctaatagtatgcttgcacaattctaagcagtgttgcgaacgtcttaaagagagcgacttagtctgtgactcaacccaaattttcattcaataatttcattccttttttattttctacaacacatttacaacaattttaagacaattacgtttgtgccatgactatcgatgacaattctagtgttgttgacattaataaatatttttcgtttgagggaaataattttaaacaatggaaaagaaaatgttatttttttcttactatgaaaaaggttgcttattttctgactaatgataaacttgtagtttctgaaactactaaggatgatgaaaagcaaaagaaaactacttcaaaaatgattttttgtgcaaaattttaattttgaatattttatatgatgacttgtatgactactacaatgctgacaaaactgctaaggaaatctgggacacaattaaaaagaaatacaacaccaaggaggttggaactaagaagtacgctaattcacaacatcattcttttaataaacattgttgttatttttggcaaactgcctcttggttggaaagattttaaaaatactcttaggcacaaaataaaagaattctctttggaaagtctgatcactagccttcacattgaggaggaggctcgcaaacaagactgaaaagaagaagtacttgttgtttcaaacaacaatgctaagaaaggcagtgcgattctgaaactcactgggagaaatttcaagaatcaaaattgcaagcatgttccaaaccacaacaatcattctcaaaataataattagaataagattccaaggaaccaaaacaaacagcatcaacttctctaataataagaatgaactagtgttgtgctaatttgcaacgcgcaagtatacgtatcgttttaaca

SEQ ID NO: 220351 - DNA, 4802 bp, Cannabis indica
aatattaaaaagtaaccaatccaaagtaaccgatccaatccgcacttttgcggattggattggattggatttgagctattatggggattggattggattaaaaaataaaatccgcaccaagtgaggattggatgttgtttgaccaaaaaagtgtagattgaaaaggatgaacagccctaagcttcagcaaagcataatcaaaaccagtaatttttctttaaaagacgccagctgatgtgtttactataccactttttcctactcaatttaatattctcaaagacaagattagactaattagcattagcactccatcttgaggggtgtattaagagtagtgagctagagttgttagtgattagctagttggttagttatgtgaaccgtcaatacccttatttttctgattttctattattgctcctctcttcattgtattgattagaagcttgagctatataaggctcactcctcttgtactcatattgttttgaacacaatcatcttcttgctctgttttttacttttcttctctgttctagttttgtaatattcttgaaaaccgagagcaaacttagtgagaaaatgtgaagaggagcaaaaacctagtagtggaaaaatcaaaagaaaaaaagtactccttattaataaggggattcggtccgattcattgaccgactactagtcgtttgccaaacccaaaagttatggcagtaatcatagccgtgttaagcactctcagtacttggaaaggtcgtctcccactaaaaaagaccttggtgatttggtaaatggcaaccaatggtttgtagttcttgattttagaggactttttttgactcttcgtaaaggtaaaggagttcggtattggccgattcaagtacgaaaaacttaaaagagtttggtcataaaatgaagacaggacgaagccactgatataacatacgacaatcttaactgaaatttccaataaaataaataatggaaagacatagtatttaattaaaatgaatattcaaatcaaatctataataaggaatacagaaaccggtattgtttattgatctaaactcatgaaactaagataaatatgatagaataaacctcccacctctgccaaatgaatactccgagctccaaaagcgaaaagctttggaaagaaagatagattaaaggtacaaggaaacaactctctaaggactgtcaaaaggttatgtcaatcacaaaacacctatttcttgggtccattggtgagttcagcagcagtgcttccagcaaccgggttcagctcatcccaagcctcaatccaagtgaccatggcatccgaaagcttgatgaagtactcatccaccttaccaagcttggccttgacttgcttggagagctcaatgtagcacttttggacggtagtacattccttcggaagggagacagcttggaagaaggggatcaactcttcttgccagtagattcccttgtactccttcttaaggttcacaaatgggttgcttgccttgctgtgccaaatgtagggcaaacctgtcttcactccccatcccaagtggtcacagataacctacataaagaagaaatcagtaagcaaccaaacaaaatagaacaaaagatattttcatgtaagataactacatacgaaagatcgtataatggaaaatcggagataccttgatacaccaaccagcccacatatcatcgtaacgtccgattggctggccatcacccataagtccaaagtacattgcagggccgatcaattcacggttgaatgcaagattcataccacacatggggaagagagttcccttagggatagtcaagactgcatccacgtacctaacaaataacacgcgcagataagatcagaaaattttaattccatataggtaacaagtaattttacaatgtaggaagcagcaaatgtacctgctgtttctctcaagaggcttaacaagttgggtgggagcatcgtagtctgggatgttgagccagagaccatgagaaacagcagttgggacaccttcccgaagactgaatggataaccacggacaaaatctgcaccctcacggtatggatcgtagagggtgttaaagaaaaatggtgttgaaggactcagaacgttcttaatgtgctgctcaagagcattgatttctttgccggaaggatcttttgcgacctgaaattcaaaaatgaaaattgtaagaatcccaaaagcaaagccagtttcacaagcacgacttacaagattaatagatctatctcataagttacaaagctcacacaaaatctcactctcaacgctatagactggagacaaaaaaatcaaccttctaacctcaacatatatttagccttacaacttctaaagcccatgaaatgtcaagtagatatggctagacagcaaaacaatcaagatctatatcaatgcaattcaagacaaaccaacttggttgatgattaaaatgtcaagtcaactgaaaaattgtatcaactacgactacaaaaagatctgatgagtaaggcggcatagacataataaacttttctaaccgaacaaaaagtgtagaaaagtaataatactcaaaattcaaacccaaaaagcagatcagagaaaactacaaaaaaatagtaccgttttaatcgacaaaaaacaataacgagcaagaactagatacagatccaacgaaacaaatcaaatctagcctttaagaaaaggccagatcaagtgaaaactaaacctcgacacaaatcatacccgaaaaacgaaagaggttcataaatctaatttcaaaattcaaaaccaaaaggcatcgggatccaaaaatccaatcgatccaatactcaaaacgcacatcagaagcagacccgtttgaacaaaagaaaaggcaaaagaagaggaaaacaaaactcacaaagcagtcatcgtcaatggtgtagatgtacttcttcttggagaccatgtagccgaagcaacgacaagcagagtccttgaacgaaatgcaggaagccttaggacccagaattcgattgatgtcgtttctgttgtagagctcgtaatcgaagccctctgggaccttgatagtcttggaggggtcaccatcttggacgatgatcaaatggtatggctggaagaagggcctccacatctccaagaaatcgaggttccggattgtgggtatcacaatatcgagttcatctttcagcaatggagtcggagagaccttgctgtcagccatggctgcaagggaaaaataagatagaaagagaaattggggatttgagttgctttgttttgagagaaatgagaactgagatgggactgtatttgtaggattttgaaaacagacatgaaccccgagactttgtgagtgtccacacaatgccctgccacgtggcaatataagggtattttcggtaaactaatcaaatgtactttttctaggaaacagctagggattttttttttgaaagaacagctagggatttttttttttgctgaacaacagctagggatttttacaatgctaaatttagtattttttttacatttttatttatttaatttttttacttttttataaaatttattttttaagaaattctttaattacaaaaatactttaattgtttatgttgtcttttcttttaattttttaatctcttttacatataaactccctttctttccttcaaaaaaaaaacctccctttctttctctttctctttttttttttttcattttctcttcgttctcttcatttttctctctctctccctctctcttcatttttctctctcttttatatttttttatcgtattattttttttataatttatttttttatatattttttaaaacttattattttttatatttttaatttaagataataattctttcttttaattaaattataatgactatgatatttttatacacttattttactttaaggctattaatactataaataaatacttcacaattttttaaaataatgcaaattagattagtttatgatatattttggacacgttggtgtgtaatattattaatgtggtaattttttagttatattaacacctctaataatcatgcattttgttggtgatgtggtattattttttgttgttttgtaatatagtttctgaatttgtatagtgtaggattgatgatgagttgattttttgttagtttgtaatttattctaggttgacgcaaaataagattgatacatgtcatttttgagttatttgttggttgtttcgtattagaatgatacaatgtgggggttgatgttgtgttgtttttacgttgtttacatggtatatatttaattttaattttggagttgttattcagttgtaatttattagttggtcaataaaaaaagtaaatatatatttagttgtttgttagttatttgcatgtaaaaacataaatatatttgtattgttgttacattctttaatttataataatatgttcttatataattttggataaatatttagttttcaaatgtgtattttaagttgatttcaagtttgtttatatattttaaataagtttaggtatatcttcaagcgcatgtcattctatatttaactcatcatcatgatttttctcaaactatattttttactggataaaatgtaaatgagttttatattaaataattttgacttttttttcttttttgtaaacgtatcaccgtgataaatttttatgttataaattattagttattaatttggagttgttatctatttgtttgttagtta

SEQ ID NO: 220352 - DNA, 1800 bp, Cannabis indica
aaaaaaaaaaaaaaactcagcttcataagccaaaacaactaaattatagctaaagatagagtttcctaaaaataaaattacaaccataaaaagaaatagtatcataccttcatatgaggagggaggttattttacacatgctagaaacatattcatgttattatatttggttccaatgagtcataataaaagaaaaaaaaatcataacatttttataaaggcaatagatcattgtcatatcaagaatcactcttttatataaatagacaccaaaggttattgaaaatttggaggacctttttgcgtaagtatgttttacttgctttttcagttttaatttaaagctaagtatgtagttagtttgtaagttacatctatctatatacatattacactaatattaatagtgacataataataattgaggatgataaaatttaactttttttatatacaacttttattcataataaagttttttgtagggtatgaccattctcattctttttatgcaattattatatcattagattactattgtattgcattgtatttataaaagtgtaaatgaaaaaactaaataataaaagtaataaataaattagaaaatctcataaactaaaaaattaagaataaaactcatatataatgccatgtcatcactattaccaaaaagtattatatagatatatagatttgtgtaagaaatgagtttgagataacgaccatacttgatcatatatagtctaaattataaaaaacttttacatgaatcaatcaaattatatattttttttattaatccataatctaaaaagaaacaaaacaaattaaaaataaaattatcaaatgtttatataacaaataaaatataaattctaacaccccaaaacgttattatatattatatatatttttgtaagaaatgagattgagataaagaccatacttaatcatactcttaatcataaaaagcttttcacatgaatcaatcaaatcatatttttttattaatcataatctaaaaacgaacaaacaaaacaaattaataataaaattaacaaatatataataaataaaatataaattttaaacaccccaacacgattaaatattgaaattttgagtaagatatcaaaagtgctctatgaacacgtaccaaaaaagtcttccaagggatgagaaggttgtctggttccataaaatagcttaagtgtgttcttatgcgaccaacctgcaaaatagagagaactgagaggttaaaaaggttaaaataaagattaagaacttttatcatcaccttttataattaaatttgttgtaaagtattattattagaattaattatggtatgaataaatttatatttatagttactgtatttattaattaattatatttaattattaatttttattacttaaatttggcgtttcttttcaattcaaagagtaaatgaatggtcattattctttttgataagcaaatgaatgatcaataactattactcattaaaagaagagagagaccacgtttaaagaaaataaattggatacatttttttgatgataaatattttacacattcatattaaaaaggtaaagaaaaaaatttacatcataaatctaaatatatataaattaaattagttatgggaaggggaatgattttttgttatagcattttgtaacattgtttagaaaaaaaaagtaatagaacatttatcttctggaaaaagattgtacacaaagagatattttaaaagggaaggggaacaattttttgttatagcattttgta

SEQ ID NO: 220353 - DNA, 1629 bp, Cannabis indica
aaaatgggggccttgtgcaatggcccaagctgcccaatgcttgggccggccctccatccacattgccatcgataattccttcttgaaaaaccttggaatgacccaaccactttcttcctctttctctcccgatatcactctctttcactcctctcttatgtgttaggatttataaaacactcaagaaatatatatatatatatattacagatctaaacattacgtgggctacttaaactatgccacgtgtacgttagtatacacttcaatcgtccactatgacacttaactaaaaattttgaacgggtgggtaaatagcataacagaagtaagatttaagtagtgttgtcgctaaaaattcgatttatgtggttaattatttaaaaaataatgtttgagtagttttgttgttaatatccatttgataaatattttgttttacaatattattttaagattttaaattcttactattagccatgatataattatatcataaattagatattttaggttattaatataaataatacaaaatgtgagatcttttaagtaaaatatatttatttagtgtgaatcattggagttgttacactaagagcttgtttggtacaccgtgatggcgtgatgtattgtattatattgtataatattgtgttggataatattatattgtattaatattatttaatacaatattatgtttgatattgacttgtactaatagatagtgtaaaattataaattctttataataaactcgaccccaacccaaaccacggcctggactcggactccgaaccaaacctgaacttggaccctggacccggcttaggacctgaacctaaacctagactcggactcagaccccaaactcggacccaaactcgaacctcgaccctaaccccaaacttgaaccaagacccagatcccaaacctcaagttccaaacccagaacatggacccaaactttggggttcagggtgtggggtctcggtctatattcaagtctgagtccaggatttgggtcaaggtcttggtgtttgggtttgagtccgagtacctagtttggatccagattcgggtctaactgtttgggatcggggttgaggttgggtctgacttccaggttgggggtttgggtctgagtcttggtctggggtctgagtccaaattggggcctaaattcgagtcagggtccgggttcaagttcgggttgaggtcaagattcgggtttgggtctaggaccaagaccatggtaaaggtatggacccgagttcaaggtccgaggttggggttaacctcagaccctttataaatattataatacaagctaatacgcatacccgaccttgggcataggcgaactaggcctgtgcctagagctcacctaacctaagagcctaaaaatatttccacttttaaaattatacgttttttttactgattttagaatatgctaattttttaaaactaaaagttcaaaaatattttttttatgagccgttatattttatgatcgactttgctaatacgagttatttgttatgtattaaataatataatttagatgatcgtaataattaatatagtataatattttatttaaatataatattattttttatt

SEQ ID NO: 220354 - DNA, 1715 bp, Cannabis indica
aaaaaaaaagaaaaaactaaagcttcttctagctactaaatttaccaggcaatatattcccactcttgtctgtgctgctcctatctctgtgattattagcaaacagccgagtatgatgtcgtttttggacaactataaaagtgactggcggttggtagttgggttccaaagaagcacaagcctgtaccataataataataataattgttacacctatattctttcaaaataatttcctgattatatattaaaaccttagaaatttctctcacctttctgatagcatcaagctcatacagtagaacttggtaaaattgcccttcacttacaccatccctgctcaccattacatgaaggaaagccatattgacttattaggcgtgtaacaatataaactgtcatctttggatatacaaaacatatactcccaataagcataagaaaataagagtgcataaagttcaagtgcaaagctcaacatcaaggtctagaggctatgtaataatcaaatttgtagcaaaaagcttcaaaaaaaaaggcaaaaaaagatctccagtaaactagagcatgtacagaaacaagcattcacctataaaatatgattctcagaggcttctgtcctgttgccttccgaaacgaaacaagaagatccctacataaagaggacattaatgaaatatttaaacagattcaagaaaaagaaaaagaatggctacaacaagcaacacataggcacagaaaacatttaggaaagcatgagtctggtgaatatttaagcatttttcaaattggccaataattagtactttaagtaagcttgttgaagaaatcaaagactcatcatacctgatcataccaccactaactgttccacgaactggatcctgccatgtcttatacagatcttgtattagttcctgtcggtgagcctgggcacaaactaatccagcatatttagtcacttcaggccagtcctgagaagctactacctacagtaagaccaagatggattagcaacagagatttcttaaaagtaaattattatggtggcataaaaggtttctagaacagtaaaatttatagtcgtacagcagctattgaagggctcgagtcttctccattctcggggtgtgtcacatctgctccaaaaattatggtgggcacatcactaactaatggtattctacagctaatagcatccaaaagaacagtgtttctaccgcccatctgcagaacacacaaaacaaatcagcagaatttaactagctcaaaaaataaatcaaatggaaccaagtctatgaatagctaacttttgatgataccgaataaatagaaagcatataaatttttcagtcctagacaggtgacttgtcaacttgtggttataattaaaagcctatcaagaatcaaaccaattctataatctttcaaatgccacatgaaatgtgaaaatcatggttaattgtagtgatttaacaagtttggaggactgctcagaccttcacattaatcttcagggacacgttagccaggtactgcttgctaattttgaagacatgtttggtaagacaacattgtgacattaaaccaagatctgtctcacatattcgtttgagatcacctaagacgagataaagaaagtcagaacaaaaacttcaattcaaaattttgatttagtatgaactcaaataattatgatttaccatatagggagc

SEQ ID NO: 220355 - DNA, 3486 bp, Cannabis indica
aaggaccaaggttcaaaattggtaacaactaaaagcacctaccaacagagcacattcacacacacccacaaaaaaaaatgaaagtctctccaataagggtgcgtttggaaagccactatgtaattggaattgagtgcaattttgagtaattacaagacttggcaagttaattcaaccaggtaattacacagtaaccatttaattgaaggtaattgagattacattctccaaatctcatagccctcgtaagaattgggtgtaattacaaaatgtcactatttttagataactaatgttgacatccaaatgcaaattatattttaatattcaatgtaatcaccactaactacacagttacttccaaacgcaccgtaagttatatccaacaaaatgaataaggtcatgccaaagacaattatttctccaccttattccaattaaccatgccaaaccttaagggtgtgtttggaagtaattacgtaattactagatagtgtaattacacactaatctcaaatacaacgtgtatttggatgtcaaatagtaattgcatatgaattagtattttcatgtttggcaaatgagttgataagtacatagtttaataacattaattacctaaaaatggtaatattttgcaattaaacagtgtaattacaatcaattttcatgaggatcatgagaattggagagtgtaattgagacccctcaattacctccaattacatggttattgtattacctgactacactcaaattcaattacatagtgattttacaaatgcattgaattacattcaagtctctaaagataaaaaaacattttatattattttttttctaatggaattcattcattcaactctaacaattacaaagaaaatggctcaccaaaccgaagagtttgacaaacacaagggggcaaaacccccgattcacatagtactagttttaggtaacaaaacttgattggctaagatgtgagcttgattggcttctctaaaaataaacaagttgttcttaaacagaaatgaaaaaaaaaaagggtaaagtgagccacaaagcaaatgcatctacaaaagatagtctcaaaaccactgtcaaaatcataatttattttctctaaaaatgtaagtgaaatttggatatgaaagctgaataattcacaatttatagaaccaataattattcacaattaggacaatcaaataccacttgaaactaaaatcatttcaacatcagaaaatgtaaacattattataacaaagaatgagaaaaacaaacctgaaaaaccagaaaattcctagccttgacaagaatatccaacgacttcaacctcgaattatactcatcccacgtcacagaaactccatcaatcctataatcacttccaccggagctagtaataatccgagtaaactgaagctcagattcattaccaagctgataaaccaatcgaacaaaagcccttcgtcccctctgctccttctccttatcatcaaaagcatagatcagatccttcaactgcgaaccacgaagttgaccagttcgaacaccaagcacgaagctaatagcgtccataagattcgattttcccgcaccattagggccaattatagcagtaaagtcatagaaaggaccaattgtttgaagtcccttatatgatttgaaattctcaagctccaaacgaacaattttcccccgagccattctggccggcatggttgagccaaaaccctagacaaagcaccagagtaaggggtttcagacaaaaagggtgaaattagggttcaaaatgatcataaaattgaggggagatgggagtgagaagttttccgggaaaatggaggaatttggagtgagaaaatggagggaaaatgggaagtgtttggaggtgaaatggcgggagtgtgtgattttagttttagagactgaaattatccatttttattagtattattttccttatatatatttcttctcaattttcgagatccattaatgtcaccaaacttcgcttatagagtatacaatgagtaacataatagttactagttactaaatatattaagtaatcgatactccgttacctttaagttttatacactaactttttttttattttacactttaaaaaacattttatttgtatttttatagaaattcacataacaactaataaaacaacttaaatcgtaacaaaaatttacatagcaaacccaaaaccataggagaacccaaatcgtaaatttgaacaaaaaaaattaaaaaaaaatatagatagggtaattctacttttttttggcaaaactccattaaatttatttttttttttgaaatttgaagcgtcagttaaatattaccgataaatatcaaatgaataactatagtgtactcatgtgtatacatgaaagtaaaatttcaaaaccgatatagtaataattcaattggtatttaatattgatatctagctggtacttcaaatttgcaaagaaaagtcaatgtaaataaattttgccactaaaaaaaagagggttaagtgtaaaaaattaaaacataaaggtgtttcgtcgcaatcagggccggccctgggcataggcgggctaggcctgtgcctaaggcccacctagtccaggggcccaaaaaaaaattttgcccttttaaaattacacaatttttttgctgattttgaaaaataccatttttttttctaaataagggtccaaaaaataatttataccctatagctcactacatttcagggccggccctggtcgcaattaacccatatattaaataattttattttttaaagataaattgaagggataattttataaatatacaaaagcaataaaaaaattttgttgttaatttttgttatttatatattgttttttatggtgttttgttgttttttttcctattattttcatatagtttttgtgtgtgtgtgtgtgtgtttttgtagaatattgtaaaaatatataaaaatatatctatatatatataaaataacaatttatgtattttttctaaattaaaaagtaaacaacatcataaatatccaaaggtaaagtatgttgctatttactaaaataaaataaaataacaacacccaacctacacaagaaccatacgagaaccacccggaaaagagatggaacatcacaagggtgcattggactcgagaacaaactataatgtaatccatggattagattaaaaatgaggtcacaaattaaaaacagaaaagacttaaaaacactaggattagaaaaattatttaaccaaaatccacctcaataatttggattacaaataaattaacaaaatagagggttccattccaccatatcatttaatttacattaaaataaatacagcctgagaattccatttgtctatcacctaaaaaagatacataaaaagagaagaaacaaaaaaagtttctctattagattctataattacaacagcataata

SEQ ID NO: 220356 - DNA, 2329 bp, Cannabis indica
taaacaacaacaggattctcctccctagcttcttatcttgcttaaattttaactgtgttttgagttttccgaattactttaattctcttaaatcataattgttttcgatttgccaaatagaattataggtatagtttagtagtatttaatctaattccctgtggttcgacctcacttgtgtgagtttactacttgattgcgtatacttgcgtagtgtttataattttcgtaacatttccccaaagatcaaaatccattttgttaaatatatcaaatatgatcaaatgaccaaaatacccctaggccaataaatctcatacacacacatcaagggtataattgtcataaatcatacacacacaacatatataaatttcagatttctcaattattcacataaagccaaaatgaaatccccaaaatgtattttgggtcccaaacccaattcggcccaaaatatccgattgtgactatgccgcgccaacttgtcagaaaatacttctagaaagacagaatacatatactatgtaataatataatccataagcacgatttatcattataattacgattttaccgttcacgcgtcataattagaaaaatgcccctcgctcaccaacggggtcttaaaatgtcatcaatcaatataattccatatattaaattatatgataataaaattctacattaataatatttaactagttagagtttgctaatctgattccttaatcttagggtattacaatataattagaaaagaaattaaaattctaattaaagcgaataagaatatgtacatattaagagcatctccaatggaaagctaaaagtgtagtatatatgcatattttaggctatctttataaaagtaatctctaatggtggtgtataaagtcgtccaaatttagcacatgttaaagttatgccaaatttggcacaaaatatagcatgagacaaattttacatcacaataaatattactttttatttaatcttttgccacgtattaatataattaatcattttttcttacattttatttattatttaattgaatttttatgtagtattgacttatttttttagctcaaattgtacactattcattggagagtataagaaaaatactaaagtaggtgctaaataccatacacggtggcttatcgttattggtgcatttcaatatcgagtttcataaaatttaatttaataaataatatgagaaactgttaaccaattattaagtgtcacgtctgtatagtgttggatattttaaggtgtcaaataataataatattaataataataataaaataattcactagaaaaatattgtataaaaaatgatacactaaaaaatcattcataaaaaagaaaaaaaaagatcagaaaaaaatcactgaatttgttgtaaaaaaaattatcattcataaaaaaatgtaaacaccataaataatgacatattattagtgaaacaccacaaatgttaacaaaaatactcagaaaagttgttgtaaaaaaatgtaaaagaaaatttataaaacaaaaaacatattaaagagttaattccaacaaaactcccaataatttcactttttttattaattgaccctcaaaacctaaattttggtagaaaaatctctaaaactactataccattagcaatttacaatttctatccaaatttggctgttaaataccatgttagattgtccacgtgaacatagtgtacatgtgatacacttttattagtccacataaataattaattttaaaaaaactaaaataaaaaaaaagtaaaaaaacactattttttcctattctttttctttttctttcttttcctttgttttttctttttcattttctcaattaatatatcatatttttttttttcattcttcttcttcaccattttcttcttcttccgtcatagtgtcaccaccaccaccctccatagccacggtaaacattacccaccactactgaaaccaccaccacagcctattttttaaatccaaataaaaaaaaaacaaaactcagaccaatttaaacaaatctaaatccaacaaataaaaaatacacacatatatatacacaaaatatcagccaaaaaactcatatttaaaaactctaaatttatttccccacaactattattctttctcatatctaaatccaaagaacacaaaattatccaagtaaggatatttatacacattataatcaacaaaaaagattgcaaaaatgtggatgagaaaccctagatcgggaaagagaaagagagaggagatcgagacagatagagagagagagagaggagatc

SEQ ID NO: 220357 - DNA, 1282 bp, Cannabis indica
tcaacaaactcaaattttcaacacgttaatcaacatgtttgtgaaagatagaaaaatgaatctatactaaagcaaaacaaggctaataactagaataagcgagtcacatttacctgcaagcacgatgtatcacaaacagcagtggaaccacagttgccatcatcgccttccttgaccagcctcgggatgagatctctaaagtacatgtcccacactttgccatttatattgattgagtctgcactgtggtgtagaacctgtgttcaactcaggggggtcagtgttcaaagtataaagagttttataaaatgttacaaaccgaattcgatatctacctgcgggtattgcattggtggcaacaatggattaggtagatcatttggaaagaaaggatgctcatcaggactcttgtatctgccaacctgattcataacaaaaattcatgtttaaatataaaaaggtcacacaatttgatcaatctgtctttaatactctaatgaacatttttgagcgctctatgttcaagtaacattatcaatactgaaaggaatataatctacttccaatcaaaggagtagattccatatctatgaaacatgtttcccgctatccatattctcataactgcaatatatcaggaattgggcctaagttgtcattaataagttacaagactataaaatatgagtcaattactcacttaaggattaagatcacgtctcaaacgatcattcagaaaaaccagcaatgtaagaaaatcatctcaatcattctttcaatcatacctgagcatgaagtttttcggtttctctaaccatgaattccaccagagatccattaaacccatccatggagaaagcactaggatcatatgcatctgcattgtaacaatattgtgttctttctaaaagactgtatattatgctatcctcttgcctaatcaaagagtatcttatggcctcaagggtcaagttgtcactatcatcagtcctttcctttgttgcaaaagacctaaacaaatcaaatttctcattacaatttaatctaagtacaaaacattcaacacaatcagttaaatgcactcaaacttgagtactttgcaataatgatttattgagccatacaagaacaatttgtcaatttaacaatggctatggtaatagtttgaatcagttaaaacattaattccagttttttctataatgaatggtaataaaaggctttttgcccaatattgaaacagaaaatgaaaatgctgagacttgagataaattacagaaaa

SEQ ID NO: 220358 - DNA, 6303 bp, Cannabis indica
gataactaatcagattgtaaagagttttatttagggcataaaacccaacataaaggtgcttgggtttttggtggcgatttcaatgagattacaaagaattccgagaagaaagggggaaatgctaaatcgacctacctaatgtataagttcaggaaagccatttcggactgtttcttgaaggaaattccttctgagggaggaagtttcacttggtgcaatggaagagtagctaacctggtgtttgaaaagctcgatagagttttttgttactcgaaatggatggataaattcaagatgaactcggttaaactattggattggagaaattcagatcataggcctttggttataacgacttaactcagtaagttagttcatgggggtaggtgttcaagaggctctcggtttcactatgagcaagcgtgggcggataacaaagagtgtcaagagattatctaaaaggtgtggagtaataccatttcagccaaccctttatcaaatctcaaatttctcttacaaggctgtggggagaagcttcatgggtggaatagaaggcaaaaacaagacctcaacaagagaagtaaagagctaaaagataagattgagtggctgtctaaatcttaatgtcaatccgattggcttaccatgaagaagttggagaatgatctcaattgtgtggaagaaaaaaaggagatgtattggaagcaaaggagtcgggcactttggctaaaacacggggatagaaacaccaaatttttccactacaaagcttctcaaagaagaagaaaaaacactattgagggcctctatgatgatcggcttcattggtagtctagtttggaaaaaatttctgaaattgcagttagttactttaaaaagctattctcaaagtcaaaccacggagttgagctaagagatatccttgttggttgcgttcccaactgaatcaatagtgaggagaatagattacttctcgaaccctttgatgaacaagatgtcaaatctgccatgttccaaattcatccattgaaagctcctggaagggatggtctgccgggtttgttcttccaaaaacattgggatttagtgggtaatgaagttactgcagcctgtcttgatatcctaaataaccaagccgattgtagaagcattaatgagactattatttgccttatccctaagaccaaacaaccaataagaatgtctgaattccggcccattagtttatgtaatgtggtgcacaaagtggtgtcgaaatgcctcgctaaccgaatgaagcctactctcaataatgcaatatcctctaatcaaagcgctttcattagtggccgaatcatacatgaaaatgctattcttggtttcgaaagtctccattgcatgagaaaagggagatttggcaatggaaaaaaaatgaccctcaagcttgacatgtcaaaagcctacgatagggtggaatggaacttcttggaaaccatgatggcttgcctcggctatgatgagacttggatctctaaggtaatgaactgtgtccgttctgtgtcattttcaattttaataaatggttcaattcatggtcattttacacccgaaagggggttatggcaaggcgaccccctttcaccttttctctttttattatgttctgaaggcttaacttgtttattgcatgagacagagagagccgggaaaatacatgggttgcgttttggtagcatggagcataatctatcccacctcctcttttcggacgatagccttgtctttttgaatgccaacttcgaggaaagtaaagctctaaaacaagttttggattgctatgcttctatatcgggtcagactattaatttagaaaaatctgatctttgtgtgggagggaagattaaagatgacatggcaaattcattggctgcctttcttggggtggaccttgtgaagaatcacacaaagtatttgggcatgccgacatttgtaggaaaaaataaaaaggaggtctttggaaagattcgtgataaggtggaagctaagctccaaggttggaaaatggggcttttctctcaagcgggaaaggagatcttaatcaaggccgtgattcaagctttaccttgctatgtcatgagttgcttccgtatttctaaaggcattcttcatgacatagaaagcatgattgctcggttttggtggggagcgaattcaaagactcataaaatacattggggaagttgggaaaaaatgtgtaaactcaaagagaatgggggtatgggctttagagctttagaggactttaaccaagcgcttttggcaaaacaaggatggaaaatagtgaccaatcccgattgtcttttagctagggtcttgaaactttacttccccaacaacaatttttttgaggccaagttgggtcatttcggatctaatatttggaggggattattatggggaagagagttgctacttaaaggctatcattgggttattgggaatggcaaatcagttagaataaatgaggacccttggatccctagaggagctccttttactcttcgtacaaaggttcaagttcctactgaagtgacaattcagactataataaccgatgaaggggaatggaaaactgaagagattgctagctggtttcataaggaagacattccttgggtgttagggattactccttcaaaagagaggaatgatacaatcggttggagccttactactaatggtcattacactgtggctagtggttacaagctgcggtttagggaccgtaatattgcagaatgttctgataattcagccaatagagcttggtggaaggttgttttggggtctcgacttactcctaaaatgaaaatcttcatttggcgtgtgttccacaattggctaccggtcaaaacagagttaatcaagcgaggtatgtccatgaatataacttgtaaccggtgtaagagtcacgtgtaggatgtttgccatgctttatggaattgccccaagttacacaatgtttggaagcatttcgggttcatacacctattcccttcttccttaaggcatgccccagactttctaatggtgatgaaggggaagctttctaaagaagagtttatattctttattggtattacttggctaatttggttccgtaggaataaatgtgtatttttcaaaataaggacattgaagatagcatttggattccttgggccatggagatgttggagttacaccttgcttctgcccaaaaagactcaatttcgaagctttcaaaggacaaggttagatggtgtcctcccccattgggttctttcatgatcaatacagatgcatctctcattgatgggcaaccaggatgtggtttaggggtgatcattctagatcatttgggtgctttagttgctgctgcaacagaattcattccaggctgcctttcagtgcttttggcagaaactttggcgatccgtttagctctaaagctcgctgcaacaaaatcactacagaacttttacattgcttcagctagtcaatctgttattacagctttgaaagggcagactcgcatcaacacagactggggtattttacttgaggattgcatcctagcaagcaaaagcttctataatctgtcttttatttttactcctaggaagtgtaatactgtagctcattgcctggcaaattggagccgtttgtttcatgtttctgatgtgtggacattgtatatacttgattgtgcagctgcttctttgaaagcagatttgcctctgggtgctagtgtgtaattccgtttttgtctcaaaaaaaaaaaaaaacttccaatgttataaattttttttacaaaaataacattctattaattagctttttaaaattatttatacgctctttttttaagtctaattatctatgttaaaaaatatcttcttcgacaatttgacttcaacctccactgactttggcttcgaattcagttaacttcggcttcgactttggcgcttcaacttcgacttaggtgccttattcatccttccttcgacttcgagcttcctctaacttgataaatccgccagctttatcgaggaactcctttatgttgttggttaagatcctccggatatctttccagaagtaactcagtggaaggatgcccccagtatgctgtatatcgaccttcttctgtaaggcctttgacctcggtggcctcggccttaaaccttttgatataatcctttaggtttttcttgtctttgtttgcctttgacaaggtcttctagctacgatggtataagccttgaggatgagaattgtgtgtagaattcttaggaaaactcattccaagaattgaatctttctggggccagcttgaagtaccattgctgagctatttcagacaaagttgcaaggaatatgcggcaccgcctatcaccagttttttttttctaatgatcaagttgcatcttctgtactggcatcttgatcttgggtaagggcaaggcagttatgtatgccgagaatgacgatccccttgacctatcaatttcaagatctgaaggctttgcacatgctaggcccttgatcatgtcacgcattggtccaactctgcttacataaaaggatctgttgttgcaagaaatcggctaactggccctccttggacgagctgggaacccaaatgtgccaagatctagctggccatactctgggagactatatggtggaggttcgctagccttgagccttgttgctggctttgtctggccagtcctatgtagggagattggacctagctagccaagcctatgatgcgtagatgttcatggccgaacaaccctgtaatgggtagggcctggttgcccgtgattcctctgttggctagtgcggccgatgtattaagaggggtagatcgcaccaattgctggagttaggttaatctagatatttgaagtaattttcaagacaaaaagtaagttgtgtatattttgatacgactgtataaataattaaaaagtaattggtaatttgcagccgaacccaatgaattacaaaattttgcacgatcaaacccctcacttaaattttcggggcatgattcctcaatctacagaatcgttttgctctatactcattctgttagtttttggctgttaaatgccaaatagacatgccacgttgtacatatggcatgatttcattagtccacattattatatttatttaaattttaaaaaataattattttatttacttttcttttcttcattctccttcttaccctaatctctctctctctctctatatatatatatatcagtcacaaaagccctaggccgaaaaacccaacctcagatgtgaagctgcaatctcaaacatacagagttggggtttctccactttaaacgacactgcgatgttgactcatgggtgctaggttcaacacgggtggagattcgaagacctgggctttgtaaggcccttcaagtgagttgggtgcggtatggtatggaaagaacctcgcggtgttagggttgattccggcactgactgagcttcttagcacaacagcaatgcccatgactccgagctcattcttattattattagttttcttttgttatttggttttgaaaaactaagttgatacagtgttgttggtcgacagtggtggttttagtgggtggttgtggtgatagtggtggtcatgataatggtggttggttatgatgacggtgttgtgggatgaggaacacagggaagaagaagaagaagaaaagaaaaaaaaaagtaaaataataattattatttaaaattatttttttctcatttttaattatctttataataattaaataaataaaatgatgtgaactaatgaaatcatgtcacgtgtagaacgtggcaggcatatctggtatttaatagccaaaattaatggaatgagtagagagcaaaacgattcggtagttggggaagttctacccccaaaatttaagtaagggggattgatcgtgccaaactctgtagtcaagggagtttgactgcaaattaaccaaaaataaattataaatatataaatgtaaacattccctgttttatccctactagttagtttataatttcattgttatactcacatattttttatttttatcgacacacaatattcttttgacaaatataaataaataaatcaaaatggaagtcaccccatttagaaataccactagctctgccactaaccctaacttgttattaattatatagaaaaatttcgcactccgtgcttaatattctcctttacaaaactttctc

SEQ ID NO: 220359 - DNA, 3378 bp, Cannabis indica
aaccttaagtttttggggacttttgccgcaattatcccgtaattaaatattgagtctcaaataatttaatctaataattttttttataaaatatcgttcatcattcacaagacactacctcataataatactaaacactactaatgcctaataataatggtcattatttttaggctagagaagcaacaacattgctcttgactcttgatgtagagagtcacaccattctaattgtttttttgcaaagaccctatcctatcacattcacaatcatttcttcatacacaaaatgaggtcactttacatttcattttcttattactaaacccaaaaaagctttgagctttatgtttgaaatgatgtgcttattaatgggtttacattgcatgttataataaaacatttgagtcttattcattaagcatctcatctatgtcccatttccgagggaaagaagataaaaagagtgaagttgaagatgaagacttggacttctcaaatgaccttgactttgatttttctgggtcatcttaactttaaacaactaataatgtgttgaaacaaatccatggaaagaaaccagtcaaaaggttctagttgtgttatcattaatgtaatcttttccataacaacatagaaaaatgtatgctttgtttcacaatgacacatcaattttcagatttttaatatataacctcttcaaattaaattataaaattaacaaatagcccccatttcgatatttcacacatgttcgcggtaaaagtggtgcgggttgtaacttttttctcaaatcaaactgcatatgtaatttttgtaatttctcaaactgcaactgcactgcaagatcttaaaaccgtaaaaattacaccacgaaattataatatagtgcaatttaagtaattcacactattattattatcaaacattataataaaaattcaaaaattaatctaataaaattttaacattcaaacaaaaaatcttattaaatattaataatatagcatatataatatagtgcggtgtaatttgaaccgcaattattaaattcaaaaccgcaaactacatcgcgcggtttggccaaatatataaaccacaactgcaccattcaaatcgtattttttatgcagtgtaatgcggtacaagcactttgtgtggtgtgaacggtttgatgaacacccctactcaatataatcggactcaatcctcttccatttctcttctcaaaaccaaaaatttatatatgaatgaaagagaacaattttcaatgtacaataagagatcaagagaaaaaagaaatcaaattgcatatttattgtatggacatatatcattaggaaatgttaatgattcccatacattctcaaactcaatagaaaaaccaaaacaaaactaaactaaactaataagagtaaagaagggaccttttgatagatatcagttgaaatccttcaatcttttcttcagcatgtccatcgatttcttcttcgcgctttgcttagtgttcctcgttgcaaggcttccaaagatcccatcaggtgcatccttaaacttctcacaaaccgtactaactttcttgtaatccaaggcattgtagtttcgctcgcgaatcacaggattcatgaagttctcgggttgactgctcgataaaaggttgattagttggcgtgcttcaatcaaacagcctctaaaactaccttccttgtacacttcgcttaatcccataccatgaaatctttcttccgcgaaattctctaacatctttagatcggtgttgatgccaataacagcagccggactaaacctcttgacgctatcgcttaggaaagcagacactatcgagttggaaatgtgctctagagctccacatccaatcttgtacaacgaatccaacggcaaaatttgctgagccgtggacataatcgtgtcaaggtaaacgatgacttcgttgatatagtcgttcccattctctgctatctcctctgaagtccattttatgttttcggttagtgccatatactcatccaacttattgttaaccaaattcaacagagcaagataagcagcatctcttgaagtttttagaactacctttgcagttaaacaagcttgagtcctctcaaccgatcgaactgggatcccacatagctgagctgcatttcgaacaaagaaatcgcaagccctttcgagaacagatatgtttgcagcgatctgcattgcttgagatacaccgatgttgctgctttgaatcgtgttgagtaagatctcattcaacacatcgattagaagcttgtctgtgtactttttcactacatcatagaaattagcatacacaccatgagacaagtaatcaaccgaacctttgataaacgatcgaacaattcgacatgaatcaggcaccatcgatgaaaaaggcgctacataaggaaatgcaggcataatatccgagttttggagattgaatagcaacacattggtttcgtaatcagagtctttcttcaaaaccatttgctcgtacgaatcgtgagcaagaacgtttacaatctgttcccgacactcttctaaaagaagtttatggtacttgtctctgcaattgtccaaagcctcaaggagtggaccaacttcatacccgtactgtctaagagttgaaccaagaagtgtgacataatctttcaccaaaagaaggtgtgttgttgaatccatatgtgagaattgttcatccaaaaccgatatcatcttagctaaagctgtttcccacattatttcaacttgttcagctaaaagcaaacccccagcagtcctgagaacccgatcctccactatgaagaaccctgcaatttgagctaaaaatgtttgataagactcaacaaaaggctgcaccgaagagatttgtaaatccgagttaagctgcagcattcgattcttatagtaataatcccgaaactgctcaggaattcctaagcaattgtgaatgtggtatgctcgataaagaggtgtaagatcgattttcaaaaccgattcctcatctacttcttccacctctaaattaaacgaaaactcttctaaccccataacattttgctcctcagctttcctttgacgttccagcatttcctcgtccctctgacgaaccgatgcagcatgacctatcgctgtttgaccgatatccttagcagaactccttatgtgcacaagccactcattgaacttactacaaactctcttctcgatatgcgatttaataacaggaattctctgctcaataaccattctcaaagccttgacaggaatcttctccaagtaattcttctcaatcaaatcgattgtcttcaatgctggataaaatcggccctcagaaacatgactattacactt

SEQ ID NO: 220360 - DNA, 1896 bp, Cannabis indica
gggcataaaacccaacacaatgagcataagagagttggtgagcttgcagagaagtttttagttgttgagcaaagagcctctgatgcgaaggccaaggtcactaactttgagaacatagtcgatgaacttgagactagtgtctcgaatttgtgaggtgccatggatagttccaatgatcgtgaaaagagcttaaataatgagctattaactctaaggagaaagacttctgaagtagaagagtccctccgtaagtctcttgacgaaaagacctcaagtgttgctgagttggaaggtcaagttcattgcctagaggactacgtggtggccctagaggcaaaggcaattgaggacgttgctctttacaggggctattacttcgatgcaacctacaactcttagtcggccagcggggtagccgtcagctttaattgggcagcctttgatgaaaataaggtttcattctttgtaggtcaatgtgagtggcatgcaaatgaggatgctctttgtgacataaattctgatttgaatggtgatgtcctagttgtcagaaacattgcaggagttgaaggctacaatcctgagcatccaaacttagctgcacttgaagatattcaatatcacatgccagatacatataaaattaactagaaaaaaagttttaaaatatataaaagtaaagtttcttaaaaaatgatgctcttcagcgcataacctaaaccaaacacacttctcaatcactaatccatgcacaatagcttgaacattcttagaagattggaacattttcttgtacacattatgtaacatccttgcttcaagcctccattggatctttatacccataaaataatgactcttatacacgagtacgatactctggccgcttcatggactgatgactgatcctacagaccaacacgagtgtttctagcatgctttatcttaaatcgcacgcttcctgagaaaacttcttaggaggtcactcatcctaaaattaccccaggtcaagcacgcttaactatagagcattttcttgaacactctcaatgtgttcaacttacttcattctactaaaggaatagaaattgtcacaaagtctatcctaatcaacttggaagtacttcaacactaagaatcacggtttttcctttctactgcagtagcaaaacaatacgtatatacaacttataagcaatgcataaacaacactgtatcaaatttattgataatttgactaatttataaaatcaaaacaaacataaataacatcagaggaacaatataaaaagcccaatttgaagaagaataaaaattataatagcacaattaaagatatcctctttctttaattaggctaatgattaagagtaactatgttatgtattttcggtaaacacatggaaggtgtgccttatatacatatgaacaaaaaattcaacttaaagaagaaaaaataattcacaaaatttgaggccaaatgagtagaatcaataataaacaatcacactacaacaatattcttattaaactttcaaatttaaaattttattaatgtaatttgaaatggcaaaaaaaagaaagaacaagaaaagaacaatttacaaaccagagcttgaaaaaatattaatagcagcaaaaaaagtttgaaagagagggagatggcttgaccaaaattttaaactcaaactagttttctttctccctagaccacgatatagaaggttgagtagagaatttacatgacatcgaggggttggggacgagaggactgaagacgagagaggttggatgggagatggaaggatggaaatggctaccgcttgaagtggatctctgtgaataggaggaagaagaagaaatagtatttaccgtataattgtagttatcaaacttcat

SEQ ID NO: 220361 - DNA, 3699 bp, Cannabis indica
aattatttttgcaggctaagagtttctttttgagcgtgacttttaatatcttattcacaacttctacttgattaattgcttgcgatcttgcaactgcagagaagattttacaactctatattttttttcttcagaattctattaatatgtcactatcaaattgcttgccattgtccgagactatctcttggggtagtctatattagtagataatattttttaccacaaagtccagagtattctttgcggtgattgaattcatcggctgcttctacccatttcatgaaatagtccactaggactaaaacacgtttgactccacttcccatttggagggacccaattaggtcaattccccataccacaaacagtgggattgtcattaatatgatttcattcggaggggcccttgggatgtttataaatttggcacgggttgcacttgtggatgtagtcaatgcaatctttcttcattgtggaccagaaatatcagtgtcttaggatctttttggatagactgggatccccagtgtggtccccgcagaaccttttgatgaacttcttccattattttcttagcttcgggattagagacacaccttaggtagggcatacttaaacctcttcagtataagatgccatcaatcatgaggtatcgaggagcttggtactgaacctttcaatagacagccctatcttggggcaattctctcttagtcaaatagttgatgatggggtccatccaactaggcacttgattggtgattgcaactaggaattgtgattttctcacctagattcagagaacactagtagggtttggagcttggattcaaggtataatgtcttggctttcttctctttggaattccttagctcaaaataggctcttatgcacgaatttgagaatttaggtgctgtggaggtttaagttgtttgaatttgtattctggagttattttagggtttttgatcgtattttgtgctgggttgggtgtttgatttggtgtttaagtgggatttgagtttaagacttaaattttttcctttaatggtgttttcaatttttgagccatttgttgtgttctactgcttgaattggttatgttggagtgtatacaggtattctggagaatattgagaagtttgggtgtgatttgaggtcttgggaatatttttgaggttcctagcactgaaccggtcgaccagtttagggggacctgtggcaactggtcgaccggttggtccccaaggaaccagaattccagttggggaaccggtctgccagttgggtcaattttggaaccctagtttttcttgtttttgtaatcttcagggtattgccatcctattcattgatatagggatatttctagttttgttttaagtccccaaaaagtgttttaacgtatctctcactagagttacaaatgttgtgttacagggtcctgtaaaacctcgagctgcaattccactcaggttgactgacaaatctgagttcggaaacgaggtaagatagcataaagtatatacatatgattaaatgcttgttataatttgtatacactactaacactgagatatattagttttaagagtgttagtatagtgtaggattttagggtagttacaaatgttaccaacacgagtatcaaagggtacgtcgtgcatgtggtacaacacttagtaactcctggaaagtacataatggccctaccaacacgggtatggagtcggtactctagtacatatggtacaatggtcatacttccgttgagaaaattcttaactatttggtgagcttggtaatcgagctcatgatggcttaagcacaaagccgatataacattgcttatatataagttatgcatatcttactgagtctgtcgacttatcagtttgctaccttgtgtaggtaagggtaaatctaagctggaggagcagtgagatgtgctcggcaaggattgtacatatcgcggtactgcaaccaaaaggatttcagtctttcaacattttgaaccgcgtttcacggttgccctgaaattttgtagtgtgtaaaaaaaatgttatgtaattttatatattatacatgtatttgcagcaagtagttttaaactcgggatcccgacctacaaggttttataaatataataaataagttttatttcaaaatagtaaatctttgagtacgggcattacaacaactctcaatgaaagtaccaaaatattgactgaagttttcaccaaccaataattggagatgtatgaggtaattaatgagtgttagaagagaagatttatgtggttgggtcatttaaaaatgagtctttgtccacgagacactatatttatgagagtatttattacagagtttctccgactgatcccccttgctatacatcattaggggtatttataggcttataatgttagtaagaaagtcactattgtcgtgtttatgtgcaccacactttgcacaatttcccgaatataattttagggcataactgcctacttttatgatgaattttgggctatctataggtgttcggtgggatttgacttattctatatttatgacttgacgactaatttatgcagctgtcaattgatgtattggatcttgtgaaatcagggaatgatgggtttaaacccttaaatatgcatgttagagtatgtcatcagatgttcttccctatgttgtattaaatatgtatacaacgtcttgatccttgagtgacatgtcatgcttcgatcatcagtcctcctgtacctttcttcgggtggacttcactcgcggagaggaaaagacaagagatattcattgtccaacaagaccctttcggaaatgactattctgtcattaatctctcgaaataataggctccagaagtaattagagtatcattttaattaattttacaaaatatagggtttcaatttgaatcatcatttaaaaaatacaactattaaactggccgtatttttgaaattagattattttctaactaataattatctagtaataaataggcaattaattaatttgcttattttttttggttttatcattcttgcaagcttatatatggacatggaaggacaatgagcttggatctatatatcaaaaatgatcataattagtaaaataaaacattttagctagtgggcgtatattcatgttctttattaactagttggggtttcttttcaggtctttggatgagcactttgatttatttaatttgtgggtgtaatttctacctaaaagtaatatctagtgtagattattgtatgttatttccacacggtctattaattaatgaaatgatttatatatattgatttgagtacgctttttctttttttttttcttaactattgatttgagtacacttttctttttttgcttaactattgatttgagtactactccactaaaatctctagtaatctctagtcttgcatgttgtcatggaattgagttggtcaatgttttctaattagttgaggactatgtttggttggacactcatatatatatatttatatatatatatagggtaatactatggtaggacctagcaaaagttccctatcggtagggaacttttttttaaccgttgattttagatcttgtggttattatgatgtaaggtatatactcttactataggactacttgtatacaattaaaac

SEQ ID NO: 220362 - DNA, 1632 bp, Cannabis indica
tagagagttcccttagtgcttagagataggggaaaataagcttttggacaaaggtgtaataccttgttcaagtcatggtgatccccactattctacactcaaggttgtgagtgagtgatcttttcttcttcatattatatatatgttatataatattgtgtaatctatatatcttcttctacatttcttatatataatatatgtagtgtatatatattgtatattatgtattgtaacatttatttaatctctttgttgatccttgtattatattgcaatagtgttgtaatgtcttgattttcttccattgtaataaaatctctaacattatgtatacaacatatattttgtaacaatatcttaacactttattaattaatcattccattaagaagtattttcatacataagtatattaatatatatagttaaaggatagaataaataggagtcccccttcaaatattactacattcaaattttgttttctgaatttttcatattagtaaaaattctttgtaattttttaattataggcgcgtagcgctgaggtgactctaccacctaaactccaaaaataccacataagcagtcttttggccacgtgtaactaaagggccaaaactctaaaaaaggactatagttcgggggatttttaccaacgaaaattttcaagggacaatagttgaatgtggtaatagttaaaggaaaaaaaatacttagcgggaatgttaggtaatcaatcaatatatatactagtcgtaaagtatgtgccagaggcacgtaatatccatcaaaacttatgagttataattatatatcttactttcattaattatgtttaaacaattattaaaaaaaatatgtttaaacaagaacatagtgtagtataagttcgtatattaaaggtaagatcatcagtcgtcctgtctaaatgtaagcttgtttgattttttcgttattatctactaataagcaaaaaaaatttttaaaaaaaataatataataactaataaaaatttatgacaaaaagatgaacaataacacaaaaaaatataatatcatatgtatgctcgtataaatttttatactattatatatttactaataaacaaataaaatgaaaaactaaaaaataataaagcaagtaaaattcattataaaaatgtcgaaaaaatggtaaaaaaattgtacaaaaaaacttttgaaaaaaagtattttaaaaaaagcaaatggagtgaaaaaaaaaataagagattttttaaagaaagaataaagtaaaaaggtgagagatttaaaaacaagagagagagagaataatgacaaaaatattaataattagggaataggcctgcacttcgggcggttttaaatatctttttaattttatattaaaattaattattttttttattatgaatgaaatttaaaatataatatttttttttttttttatgaatcagattatgtattggctcaagaacaagtgtttacaaactaatagcacatatcaagaggcaattgttatacccgaaattcagctacactttagaagttgacacgtgtccaacaaaaggaatacgaaataattctaaatgatactacgatataatgaaacaaaaaaaaaaaaag

SEQ ID NO: 220363 - DNA, 4228 bp, Cannabis indica
tacctccaactaaacaccacctagtatctccaaatttcactatcaactttttttttttaatgaagggggggtacccaaggacacccattcattaaacaaggcataaaaaacgcccaagagtctaaaacagagtacaaaacagagcaaattaaagatgcaagaaaaataaaaactggaaacagcaaaagaaactaaaactacagcagaaaactccatcagctcagatacttgacaattggtctggaggtcccaggtcccattctcttaaatcatccaagactcccgaatccatatcatgaggcacaaaggctccagattttctccccactgctgcccacttggctacattgtgtgctgcgaaatttcacattcgagatatatgagtgatttcccactcttcgaattttgagcaatattgcacaaacctcatctttgccacttcaattctaaaatccacattgcattgtgttgtggctataaaggaattcaccacacagagattatcacattggaaaacaatttttttcacacctgcctcgactgctaccttcgctgcaaaacaaaccgcctttgcttcagcaactaaagggtctgtatcattggcttcctgggttgtaatggataatatcgatcccgaatcatcccttattaccgcagccagcatactaccattggggagaactgcaacgtctgagttgcagcaggcccactgaggcggaggtggcgcccaggacaggatgttaaccaccttctgatttgctaccaataaatgttctttcacctttagtcgaattagtcttaaaatctggatcaagtcagtctctttttccccatggactcttctattcctttcactccacaccacttcaatgatacacaaggttgtgaccataagatcattaaaaggaatattgagaggacgatttgccgcttgtctaaaccaaccgaaccaattcttccaatcacttatagcataattttcagtacgaataccccagccattgcagaaccaaatttctttcacgaagctacaagaccaaaagagatgaaatgtagtctcggtcgctgccatacagagcggacagatatcacttatgtctttgagaatggatgctaatttccctctcgtaggaagaatgtcccgatagacctgccaccagagaaacttccaccgaggatgaattggggaattcctcatgagcttccaaacgtcttcctcgttagttctcgaaactgttgacttaataggtctatacgccgatttgatggaaaacaaaccattatactctcccacccactgccacgagtcatctgtgttaacctctgggagatcaatgtttagtatagcattggcatcttcttttccaaaccactctcttaccatttgggtgttccaggtgttattgttgttcaagaattggtgtacccaagccactccatgagtcgcatcctttaggggcgtgggggtgcgattggaggatgggacccagggatcgaaccagattgacgtcgaattcccattcccgattttcctgcagagccctttccccaacacactcctagcatccaaaatagctttccacaggcccgattcactcccttttttttcaagatcaaggaagttcttgtcttttatgtacttggcattcactaccatactccatatgcttgttttgtctgtcaatgctttccaagcccattttgccataaaagcttgattaatgacttcaatcctcctaaaacccaggcctcctctgaattatcttctttgtatggtatctgtgctattcataattgaatacaatcccctacgccagggaggagccaaccgattggataaggcaagttttccctgcttttgagagtagtctcgttttccaattcttaactcgttgaagtgccctatccaccaagaagtgcatatcccttgacctatttaaggatctgaataaaggaaggcctaaatacgttgcatcatttctcatccttctcatattcaacatctcccgcaatctccccggcaagtcttgatgggactccctttgaaaaaaagactgtggacttttggtagtttacggcttgacccgaccacaaataataatcctcaaggcactttcgaaatccctttgcttctttcaccgaggctttgccaaacaagatgacgtcgtctgcaaacatgaggtgtgttataggcgggccatttctggacactttgaaaccgtgaatggagctctcattcatccttgtagtgatcagtctcgagaaaacatccgctgcaatgatgaagagagccggagataaagggtctccctggcgaagcccacatgttggtttgatcgagccttgcacggatccattgattagtaaccccatctgacgaatagtaatacacttttccacccatttgacaaaattatgatggaaacccaaccctttgagtgtagctaatatgaatccccaatccattttatcatatgctttttccatatccaactttatcatcatataccctttctttccttttttctgcctcatggagtgaacaatctctctagacacagctgtgttctccgcgataagcctgccgtgaacaaaagccgacagggccggagagattatgttgggtagtaaaggcttgagcctgagagctaatatctttgatatgcacttatacgccacattgcaaagagctattggtctataatcattaacacttgtggggcaatcttttttagggataagaaccacgttagtgttattaatgaactgtggaagatcggcgtacctgaagaaatgggttaccatgtcctcaaagtcttttttgatcacgttccaatggtgtatatagaaccccaccgacattccatctggccccggtgctttatcttgtcccatggatcttatacacttcagaatttcattctccgaaggaatagagataagcgtctggtttgtagtgtcttcgataagcggattgttgattaaagagttcccctccaagtctgaacgttatctgcaggtgaagatgctgttgaattttgaggagaagagatcagctataattcttgggtcagttacccagtcaccgttttctgttcgcactgtttgaatgtaattcctccttcgtcgaatagctgttgaggccatgaaaaatttcgtgcatctatctccctgttgaagccaagctaccctggatttttgtttccagaaaatctcttctttagtgagagcttcgctaaggttcgccctggtttcccccaaggcctcttcctgaatttgattttgggtcttgttccacttctgtaaatggtcttttgtctttttaagtttacgatacaaattaatcattgggttggtatggagctcctcacgccaagcatttcgaactacccagaaacacctcaggtctcttccccacatcaattcatacttgaactgtggttttgaacatctcgcgcccccctccgtgttaagcattataggtttatgatccgacgtactaatagtgagaagttcaacaatcgcatttgggaataaaatgcgccattcagttgaggcaagagctctatcaagacgggctcttttaatcgcagcacttccgtgggttgttgaagccttttggtaccacgtaaatttcccccttggcatcctaaatcaataagccccgttctactcaccatccttctgagatcaaacgaataccttgctgaattattcttgttcacataattgatgcattcataatctgccagtgtaccatttagatcaccaaaaaggactataggagtactactcttagaaaccatgtccccaattcgagaccagaaaacctcctttcccgaatttgaaggggggccataaatccccaaaaaggtccacttaactcctggaaggtcagactcaatcgttccacagatcgcatttttccccgactcaagaatgttgcaaattacccttgctttccaacagattcccaatcccccggagagaccattgggaggggcataatcgaaatgaataaactgaagcttgtacattagcttttcaaatttttccttgactaaccttgtttcagataggagaatcatatcgggatttgaacggcggagcaccttcgtcaattgtcgaactgccgcggcattcccgagcccgcgaaaattccaagctaggatcttcatggggaccttggagacttttctgggcaagtctccatagccccaaattgaaa

SEQ ID NO: 220364 - DNA, 3958 bp, Cannabis indica
accagaaaaatcaccaagaaagtggtttcttcatatcaagaaattggtttcttcatcaagaaaccggtttcttcttcaagaaacctatttcttggtgattttttcagtgatttttcggcgacaatgccaattccgacgaattttttggcatctgtagtaactccgacaacttttccggcaacgaccgctactttggtgatttttccagcaccggtagcaaactctggtgactttttcagcattagtgacaaatataactacctaaacaaataaaaatattaaatatggaatttgaaaacctaatttacatatatatggcatatcaaataccataaaaagtcctaaaaaaaataccatataaattggtcaaatttaaatgtgtcatatttatcataagaacttctaaaatccgataataagtgtaatttcctctaattataaattatcattcttatgtcgtgactaaaagatccgcggttaaaaatatattagtcacaaaaattacaatttgttgtgactaaatgcgtttttaatcacaatatttgttatgactaaaattaaattagtgacaatttatatctaaaatatttatgttgtgactaaaagtaactttttgtattatttttgtacggggatatgtgtacatattaatattatatatttgaaatgaataaatataaaaaaaaaatagaggtttgttgatgtattttaaagaagttggtatatggtataaaataaaataaaaatggaattttaataatgtattttaaaaataaagctaaaaaattattggaaatactcttacacaagacatttaattgtatttccataccatgaataattgtttaaccttaaatttcatgacacaaatttctcatatcttcatcaaagagacgtttagaaaataaacttaattcattagattagactcacaaaatggtaaaagtagttgaaacgtccatatcaaattatatatctaatttaagagtcatcctctttgaaaatgttgaaatagaaatagtgtggttggtaaaacaagaaatttcaatcttcatctcaaccatattaatcaaaacaaactcaactagggaactaattatccttatatatttaagtaaaactttgcaaaaatgcagagatggaaaactcagctcaaaggaggccgagggaacattttctatatatattctgataagaaatacgagcaccaattggaaatggacaagtggccctaatgttggaataaaagagaccacactaatagaatacatcactcacacatacatataactattaattactgattaacatacactaaacacactgaattacagtaaaataaagatagctatgacagagtgtcattcttaccacccctcaaacgagacggtgatgatttcacaccgagtttggagatgagatgctgaaatcttgagtgagataaacctttgtcatgcaatctgcaatctgatcaacagagggtatatatcagacttccaactttttgctgagaaccttgtctctgatgtagtgtatgtcaagctcaatatgtttcgttcgagcatgatatacaggattcgaagccagagcactggcactcatattatcacaccaagtaacaggctgaggaaacctaagttcttcaagtagagattctatccaagctatctctgcactaacttgagcaagggcctggtattctgattcagtgttggatcgagacaccacagcctgtttcttggaggaccaggacacaaaggtatcaccaaaataaacacaatagcctcctactgattttctgtcatcaggattactggcccaatccgcatcagagtagctagtgatgttcattctatcactacagcaaatgtgtatgccttgtgttcttgttcccttcagatatcttaagattctcttagctgcattccaatgtgtgtctgtaggagctttgaggaattggctaagatagttcacataatagtttatgtctggtcgtgtatgacataaatattggagagccccaatgagactcctgtaaactgtaggattatgcattttctttccatcatcaatggacagaggctttccagctactgtaggtgttggacaaggcttcaaatgctgcagattgtttttccttagaagatcctcaatatacttcgtttgagtgagatacagacctatttcatctcttgcaacttcaatgccaaatgaagaagtggagatcaccaaggtctttgagtgtgaagtgcttgtttagttgttgaacaaattcccttagtctttgcttgttaccagtaacaataatatcatccacataaattaggacaagaatgataacattgttgctgatgtagaagaataatgaagtgtcggctttggaatttttaaaattccaagtcagtttggtatttttcagcttgtcaaaccaagctcttggagcttgtttcaatccatacaaggacttgtgtagtttgcatacataatcaggtctttcaggatcttcaaagccttctggttgacacatgtatatgtcctcttctatgcttccatttaggaaggcattgttaatatctaactgtctgatgtcccagttccttgatgcagcaatgcttaacactattctcactgttgatgccttgattacagggctgaatgtttctccatagtctaagcctgctctttggtgaaatcctttggcaaccaatcgagccttaaatctcaaaacccatttacaaccaattagattgtaaccatcttttctagggacaagagtgtaggttttgttggctctcaaagctttcatttgttcactcatggctttgttccagccattgtgcttcagagtttttgtaatgctgcctggttcctcacagatgtgtgaccattttgccttgctgagataggtttttggcttgaatatcccagcttttgctcttgtgaccatgggatgagttgataaatttttggtggctgtcacacctgttgatgtaccagcagtggtgatgtctgtgtcaatattatcagcttcatggtgtttcatcagcaggatctcgagtaccctgatctgtgtcattcaatgatgcaccaatgtctgtttctggaacaacaacaccatagtcaagagtatcaaagatagagtaagttgagttattttcactgacctgatgttgagaagatgctgctgctggtgttgattcaggagctgcttgagatggttcagcagtgggtaaatttggtgtagaggcactgaagtgtttgaagcttatactagggagttgagaccaagactcattgtgaatgactaactgtttttttggtgcataagtgttcagaaaaccagactggaaagggaaatcagcctcattaaacacacatttcttgatatataaattcttcctgtagtgcttagacatttatatcctctgtaagagtcattgtagcctagattgatacatctaagagagtgaaatcagaatttatgttgctggtatggtcttatgcagggattacaagcagccccaaacaccttgagttgcttgtaatcaggttttctgcagaaaagggtttcaaatggtgattttccattgagaatgggtgtaggaagtctgtttatgaggtacacagaggtttgaaatgcatcaacccaatacctcaatggcatgcttgcttgagcaagaagggttaatcccatttcaactatgtgtctgtgctttctttcagctcttcaattttgagctgaagtgtgaggacatgagtgtttaaaatagatgcgattttccctaaccaggttttcaaacacttgatattcacctccccaatcacacttaatgcttttgattttagtttcaaattgattttcaacaaaagccttaaaatcaatgaatgcatttagtgcatcagattggtgtttcaaaggataaagccatgtgtatctactaaaatcatcaatgaaatg

SEQ ID NO: 220365 - DNA, 10178 bp, Cannabis indica
ggtcacagggtacgggttcgggtctaagtttgggtctgggactgggttcgtgtctgagtttgggtccgggtcctggtctaggtttgggtccggggctgggtcccagatccagacaccaactacgggttcagtacaagccctaggtcgatatctgaatcccggtctcgggtcctagtctggttccattttggtcgtatcacgagctgggtcctaagttcatgtctaggtctggggtcgggtcttgagtccctgtcctagttccattgcccaagttcgtatcccgattctagtctgggtttgggtccgatctaggtttgggtttgggtcctagacccagttcgggtttaggtctcagtctagatttttatttgggtttggcttcgagtctgggtgttggtcctgatcctagtcgtactccggttccagttcgacttgcgattttgagtttgagtttgggttcgagttcgggtcggggttcgagtcttggtccgagtttgggttcgggtctggatctcggtctaggtttggatcgagctctaggtgtgggttagggtcttgggtcttggtctaggttcgggtctaagtctcaggtttcgatctcgatgtgagtctgtgtttagttccggtactaagtcctggtgtcgatccctatctgggttcgagttcgggtcttggtgtaggtctatgtttgggtcttattatgggtcctggtcttatttcgggttccaggttcaggtccaatttagggttcgggtccgggttcaggttcagtcctaggatgggttcatgtctaggttcctatcatggtttgggtcccgggcatgtttccggtccaatttgtgtctgacttcagattcccagatctaggtcaagtcctggttcgggttcgagtcccagatttagatctgggtctgggttccagggcataggtccgtggtctaggtcccccatcaaagtccggttcctaggtcctggtttgggtcaaggttcgggtttgggtcccgagtgttggttttagtccaggtcacggtctgggttcgggtccaggtcttgatcctagtctaggtctggattcagttttgagtccttgttcgggtctggatccttgtctgtgtcacgggtctcaggtcctggtgagggtttaggaccaggtcaggtccaggtcccatttcgtgtctcgatccaagttcgagtcccaggtctacggtcccagtcctagtcaaggtctcggtccaggttctggtatgagtttgggttctggtttgggtttattctgttcttatgtctgggtcctagtcagaattccagttttgattctgggtctgggtttggttctgggtctgggtccatgttagggtcaggtttcgagtcttagtctgagtctgtgtatgggtttttcggatcccggtctgggtccatgtctgagtctgggtccaggttcgggtcctaagtctgggtcctaagtttgggtcttggtgtaggtctcgtgtttcgatcccggtctgggtttgggtcggtatttaggtccgggtctgggttcgtgccatgtgcaggtctgaatcctagtttgggtcacgagcttggtctgggtctatgatcgagtcccgagtttgggtttgggttgaagttcgagtctcaatccttgtctgggtccagaaccgggttagggattggcctaagcccgagttttggggctaggttctgatctagttacagaacctggtccaggtctaggtctttgtcacggtctcggtcccgatccaggtccaggtcctagtcagtgttccgatcatgttccagggtcctagtcatgttctttttcaagtttcggtttcgggtcccaggttggggtctgggtccagatcttgatcaagcttcgggttcttgtttgagtccaagatcaagagatcgactatgggtcttgtccaagccctagttctcggaacccgggacaagatctggatcccaatcacgggtccaagtctaggtttgggtctaggttcgggaccgggctcttggtctgggtctaggttcgggaccgagactagggtctagttttgggtctcgatcccaattctgggtcccgagtcctgttcaatgttcgggtttgactttaggactgggtttgggtcccaaggttttgattcaggttttctacccaatggtgggtcactgtctgagtccgggtctaggtccggttacagttttgggtctgggtccaggtcttgttcttgggtcccgatcctcttctagtttcggttcaagtttcatgtcatagggtatgggttcaggtcgagtttgggtctgagtctgggttctggtcctgatttgggtccggggcgaggttcaggttcgggtttcagtctcgttcagggtccgaggctgggtccggctccaggttcacgtcttggtccaagaacaagtcccgttccaacatccctatcaagttccagtccaagtttcaattttggttctcgagtgggggtctaggtcttggtatgtgtccaggtcctggttagagttcgagtttgggtttgggttctggtttaagtcctagatccagacaccgactatgggtcgggtccaagcatcaagtctcgaatcccatgtcctgaggtgggtcctaggtccaggtttgggtctggggtagggtcccgaatcccgatccaagttttgaggcccgaattctggtcctagtttgggggcccaattccccggtcctggtcgccgatctatgttcgggtcctaggtcccggtccgtgtccaagttcgtgttctggttcgggttcggttcctgtccgagtctaggtcccgatttgtgttaggatctgagtttcagtcctagtctcagtctggattcgggtgttgggtctcaagtctgagtttggttcttgggtcctaggttcggcaccagttttttggtctgagttttggtccaggactcggtttgaattcccagtcttggtttaggtcccaggtcacagaacccggtgtgggtcccagtcccagtatgggttctggtatgagtttgagttaaagtttcggttctgttacagtcccatgtctgggttctactccgagtcccgatccgattctggttccgggtccgggtcggacatgaacatgggaccttatcccagaccagactcagaccgagatcaaaacttgggaactggattcgggccgagacccagactcaaacctggacccgtacccaagactttgactcggacttggacccaaacccagacccagaccaggatccagatttggacccatactcaaccctggactcggatgaggactcggacaccgacccaaacccggacccgaacccgaacccagagacggaatcgaaattagaactgggactaggatccgaacccaaacatagaccccaactaggacttaggacacggacctgtatgtgggacttggacacaggcctcggaacccagatctagatcagaactcgagactcggacccggacgttgatctagacttgaacccaggactcgaacccagatctagacccggaccgggatcggaaaccagaacccaaactcggaataggacttgaaccccgaccgggtcctacactcagattgggacctaggacccgaacttggatgggggacctggaataaggactcaggcttcggaattggcaccgagacagaagacctgaccccaaacccgatcgctgaacaaggacccagaccaggatttgggacccgaaggggaactagactgggacgcgagactgggatctagatctggacctggggctcggacttgactcatagtcgatgtttaatctggccatacccgaactcaaacccagacaaaaatctggactcgaacccaaatctagaccccaaacacagacccgtaccttgtgacccgaaactaaaagtagaactgaaagcggatcgggactcgggaacaagactaaaggactaggatctggtcttggtccaggaagtggattctgactaggacccagacctagacccagatcgggacgcagacccaaatcaaaatgtggattaggacttgggacacaaattcgaacccagactgggactttgacctagtctcagttcagttttgggtctcagtctgggtttttatctgggttcgggttttgggttaggtccttgtccttgtcctagtcttgttctagttccagttgcgattatgagtttgagttagggttcgagtttaggtcgggattcgagtccttgtccgagtttggattcgggtccagatttttgtctaggttcggatcaggctacgagtgtggggtcgggtcctgtgtttaggtctaggtcaaggtccgagtcccaagttccgatctcgatttgagtccaggtttagttctgggtctaagtcttgggtttcgatcccaatgagggttcgagtttggttccagatccaggtctaggtttgagtgtaattctaggtctggatctgagttttgtactgggttcgagtctgattttgggttcatgtccaggttcaggtttggtcctggtccgtgtctaggttcctttcctagttttgattcgggggaggtttcaggtctgggcatgggtccgacttcagattcctaggtccaggtcaggtcctggtttgggttcgagtcctaaattctgatatgggtctgggttccggggcataggtccctggtctaggtcccccttctaagtccgattcctaggtcctggtctgggtccaggtttgggtttaggtcccgagtctttgtttgagtctaggtctgggtctggattcgggtctaggtctcggtcccaatcttggtccgggttcgaattcgagtccctgttaaggtgtggatcctgatttggttctcaacaagggtttaggactaggttccggtccacgttcgggtcccaggtctcaggtcctagtcctagtcgaggtctcggtccaacttctggttcgagtttgagttatggtttcaattcggttctagtctcaggtccaggacctagtcacagttctagttcttattttgggtctgggttttgttctgggtcaggatctgggtccaggttggggtcaaggtccgagtcttagtctgagttagggtacatgtttttcggatctcctgttcggtccaggtctgagttcaggtttgggtctgagtctaggtctcgtgttttgatcctgatctggatttgggtcgatatttggttccgggtcttggttcgtgtccatgttcaggtccgaatcacaatctcgattaagggcttggtctaggttcacgatggagtcctaagttcgggttcgggtatgagtctcagtgcttgtctgggttcgggaaagggtcaaggactgggtccgaactcgagttttggggcttggttatggtctagttcttggtgtcgctccaagtccaggacctggtcacggtccctagccttttccggggtcccggccacattctaattgaagttttagttatgtgtcccatgttggggattggttccaagtcttggtgcagcttcgggtccttgtttgagtcccaatcaagacactgactatgggtcttgtctaagcccccatttctgaatcccggggcaagatgtagatcctaatgatgggtcccaggctagttcggttcatgtcgaaggtccaggtctaggtctcggtctagttccaaggcccagagtagggtgcagttcttggtttcgatcctaattctttcccgagtcctgttccatgttcgggtttgagttctgctctgggttcgagtctcgagtcctggttcgggtttggatccaggtttgggacccaatcccagggtgtgtctgtgtttgagttcgggtcctggtccggttacaattttaggtctggctccagatcttggtcctggtcttaatcctgggtcccgatccgcttcttctttcggtttcagtttcaagtaatgaggtacgggttcgtatcgagtttgggtccgagtgtgggttcaagtcctaatttgggtccggggtgaggttcaggtcttggttttggtctcggttacggtctgaggttgggtctagttctgggtttgggttcagttctgagtcccagtcccattccaagatccctgtccggttctagttcatgtttcaatttttgtttgagtgggggtctgggtctggctatgtgttcggatcgtagtttgagttcgagtttttggttcgggttctcgtctaagtccataatccagacaccgactacgggtcgagtgcaagcatcaagtcccggatcccgggtctcgaggtgggtcctagctccatgtttaggtgtagggtcgggtcctgaatctcgatccaagtttcgaagccgaagtttttgtcccaatttgggggcccaattccttgttctaggtcccccatgtatgttcagatcgtaggtcacagtctaggtccaagttcgggtttgggccttgagtcccgatctgagtctaggtccctctttaggttcgggtctgagttcgggtcccagtcccagtgtgggtacgagttttgggtcaccagtctaactctagttcttaggtcctgggtctagccccaatttttggatttgggtcagggtcatggtccaggtcccggtcttggtttaggtcccaagtaataggtccttgttcgtgtccaagtcccaatatgggttttgggtcctgtaactgtcgaaagtgtatgttctagtcccagaccttgtctgatttcgattccgggtctaggtacggatccaggtcctagtcttaaattcaaacactcactacgggtcaagtcaaagcctttgatccagattcagatcttggtcttggatctcagtcttgtttcagttcaggtcccacgtcttgggtcgggtcctagtttgggtttgggttagggttcaggtttgtgtcccggtagtcaggtcttgggttgcgggtccagggttgggtcccatgtctcgagtctagggtcgtgttttgggttcggtcccagttttgggtccaagtcccccatctacgttcggatttttagtccaagttccactttggggcccaagtcccccatctaggtctggatcctaggtcccggtctaggtccaagttaaggttcgggtttggatcccaagtttgggtatgagtttaggtcctagtacgggttcaagttttattcagggttcgggtcccgggctgagtctaggtccctgttcgggtccgggtcgtggtcccgatccgggtcctagtcaaggtctagttctcggaccaggagctagtgtgggtttgggttcgggttaaggtcatgagtcttggtctatgttctggtctggatttgggttcgggtctgggtcttgggttccgatctcggtatgggtatgggtctaggcccatgtatgggttagggtttagggtttattgttttgggtttaatgtttatggattttagggtttagggcatagtgtttaggggtaagtgtaaagagtttaggacttagggtttaaggtttagggtttagggtttaagggtctgcttcaagtttcggttccaatttcgtgtcatagggtacgatttaaggttcaggtgtgggtctgggtccgaatatggtcttggtctgggtccgtgtttgggttcaggtctgagtctttctcccaaatccatacaccaaccacatgtcgagtctagtttgagttctagtaggggttcaggttttggttcgggtctgggtccgtgtacaagtccaattcccaaatttagacaccaactatgggtcgagtccaagccttgggtcttaggtcctgagtcccgagtccaaatccagatcctggtccaattctagcaaatgtcttgggtccttgttcgggtctcaggtctaggtttgggtcttgagtcctgagttatgggtccgactccccgatttaggtcaaggtcctaggtcccggtgtgggttagggtcccagtttgagtgcaggtctcggtcagtgttcggtacttgtccttatcttgggtcttggcctggtctgggtctgggtcacggttctgttctcaggtcttaggtccaagtaccgagtcccgggtcctagtcccaatccaggttctagtcctaatccaggtttaggtgttagtcctagtcctggtctgggtcttagtattgatctcagtctgggtccgagtcccgggttcgagttcgagttctagtatgagctcgggtctcggtccgggtctgggtctaggtcttggtcgaggttcaggtctcagtctgtgtctgggtctaggtctgggtcttggtcttgttctatgtcagggtctaggtctgggttttgatacgggtctggttctggtctagttcctgagtcatgggtatttggtttcgagttctgggttgcaggtcctggcacaagtctcggttcgggttcgggtcggggttcgggtatcgatcccggcatgggtccaggttcgtgttcagttctgcgtgtagatccagttttgggtcgaggtccaattcctattctaaggtcctaatttcagttcttgttctaattttgggttgtgggcctaagtctggtttcggtcccagtttggaaattgttccaggttggggtcttggtacaattccaagatctagacactgactacaggttaggtccaagccccgggtcatgggtcaacatccagatccatatcttgggtctcaatctcgttttgatttggatcttgggtcccagtccatgtacgtgttcggatctgggtctaagaccgagactgggctcgggtctttggtcccagtcctagtcatgggtcccaattatggttgtaatatgagtttgggtccccaatctatgtctgggtcctgggtccaggtcttagtctccaatctcggtctaggtcaaagtccgtgtttgggttcaaatttgtgtcctgagtcccgatctgacttttgattcgggtccgcgtcccggtccgggtgtgggtctaggccctagtcagattctagttcctagacttaaacgtaaactcagactcggaccccggtctaggtatgggtctgggtctaggttatggtttgggtccgagtccgagtctgggtttgagtttgggtatgggtgccagatccaaacactgactacgggttaggtccaagccctagctccaaatcttgatcacggtctcaggtcccaatctggttccacttcggttccctggtcccagtccgggtcctagatcagggtctgggtttggggtcgggtcctgggtctcagtcctagttctgatgcctgtgtcccgggtctaggtcccctatcaaagtccaagtcctaggtcccattcctagtccaggacccggtcagagttcaggtactggtctgagtctgggtttgggttccgatctcggtctgggcccagatctgtttctgaggctaggtgcaggttctggtccgagtcccgagttccaatggtctgggttctaaggcctaggtctaggtcccacatccaggtctgggtcctagatctcggtctgtgtccatgttcgggtttgggtcatagtcctagtttcaaattcgattcagtgaatgggttcgggtttgggttcaggtctaggttgggatctgaatcctggttcgagtttgcgtacttatatgggtccaagtacgaatcccaatctaggtctgtgttcgggtccaggtccgagttcgggtccctggtgcgggtccaagtctgggtctgggtcagggtctcggtccggatctaggtcccatgtttcgatcccaatctttgtctaggtctgggttcgagtccaggttcgtatccggatccctttctaggttcgactctgggttttggatcgggtcccaagtctaggtccgggtcggggtccgggtctcgatctcggtttgggtacacgaccttgtctgagctagagttccactcttgatttggatggtgctaggtccgagtttggttttaggcttttgtctgagtcctggtcacggtcgtagtcttgttcgaaggtcctggtctagcaattccttttcaggttccaggtctgggttagggtccaggtttgggtcttggtccgggtacaagtcctggtctgagtccaagatttggatccctgtcacgggtcctggtctggttcttgttcaggtcccgggtcccaaattcgagtttggtttcgggac

SEQ ID NO: 220366 - DNA, 2067 bp, Cannabis indica
agatcctggtaaaataaattccaacaaccacaactggccaggtcccaccaccattccagttggtcataatggccaacttttcccacccaaagaggaccctccactagtgcctgacacaaaaggaatggccaacatagagtaacccatgagtgccacgactagatttggtccccaatattattgtggagagatagggccaagaattggcgagccagccattggggaacctaatatacacttgggataagatctcgagtcagctagacatagagaagccatatgtcaagtcggccaaacttaagaaacacacgttgttggctctgatgctttcacataatagagacataaattttcgagatgaatggatgaacaagagtacatcttttgatctcatcaggaggaattagactaccgtaacagaaaagctagtgatctaataaggcagttcaatgaaagaactataggaagaggtcaggatctcatcagagatcctctccaagggagactaatcaacagattagggagggcttacagataaactatccaactaagtgcctctggaactagcataaaccttccctaacccgaaggaggaaaagcgttaccacgaagatctagtggtgagaacatccagacactgggaaccattggtctaggggccggctagggatctcttgcacaataacacccttgattggccaacctttggccagccagcaccttagtggtgcacctttggtcggccaataaggtcaactcctatcccagagcatccgagagcgagtaacccaaaggccaatctaaccgactaggcccacaaacgggtggaaacaaccaagatgagaaaaacttgagaagtgagaccgattacttcagatacttggatccacctaactgcagcaattggtgtgatctaccccatgtcaatgcataggctcaaccggtcagtcaaggaagaatgggtggccaggtccttcccagtacagggctgaccggtcatgaacaactacaaggctcaaggctggctggccttgtacataccctctcccagagtatggtcagccaggctctggccaatctagggctacaactcaatcaagaagatccaatcaaataggtccctgcagtagcagatccttctatgcaagaacagttggatcaaatatgagacatgctcaagggcttggctagcccaaaaccatcagaccttgagctagataggtcaagggattcgcgtttcttagcatacatcaatgccttgcatgtgcccaaattcaagatgataacttggaagatgtacacgggaaaagaagataccctagtacacctaaaaaactttgacatcaaaatagatctccaacaagtatttggacatgtgcgatgcgaatatttccagtaactctagctaaaatacccgaacaatggtatttgaagttggccccagtaagatttaattcttgggaagaattctccccaaagttctacattcaattctcttcctcaagacaaaataccttcacgattggaggatcttgtcaaaataaagtagagacaagatgaacctttcaaagattacattcaaaggttcatggttgaggccaccaaggtcaaaagcttggccgaagaatgccgatatacgaccatactcgaaggcatcctaccgttaagtgaattctagaaagatatcagaaggatctcaacgagtaacatgaaggagttccttgagcaagttgatggcttcataaagttagaagaagttgttcggaaaaactagacaagagggtaggtcaaagttgaacagacacagggcatcatactacctcaagtgttctctgacgtgataaatagtacaaattacctctaccgattctctaatgaaaaactgagtttttgcaaatgccaataattattacagaaatatacgaaatataaaactgtatacgtctgtagaagcagaatgtaattctgttactgctgaatccagctttgcagctgcaaaacagaacagaaaaaatataaaaataattgcagaaaattaaatcacttgacacaagagatttgtacgtg

SEQ ID NO: 220367 - DNA, 5100 bp, Cannabis indica
ctattttcatagagttatcagcccaaaaacagtcaaccgaatgactgagtttgtggtagtaaacctacagtctgcctacaatgtcattttggggagaccgacattgtacacactgggggcagttacataatcaagcatttggccttaaaatttccaactgctaccgggaatgaaatagtaaaggagatcaactagctgcacgtgagtgttacaatgtggctatgagggggcaaccccaaccaggggcccaaattttggtcgcaaacaatgataataaattggaaagcataaaagcaagagaaatactttaagttgaagggatagaccctcgtgtgggcgatgactgtgttgacatggatcccattaaggaacttgaagaaattgctctcgacctaaacgaaccaaccaaaattgtgaaagttgggaagcacctaaataaggagattaagaaggctattatcaattcctccgtgacaaccaagaagtatttacttgggcacattccgatatggtaggtataagtccaaatgtaatgacccacatgttgaacctaactaaggacgtgcccgccaaacggcaaaagaggaggttacgtgatgaagttatatttgtagccttgagagaagaagtcagtaagcttttggctagcaacttcattcgtttagtacaaatcaattagtacttagccactttattttattttgattttataatatttaagaaactattagtatttttattttcaaagtttgagtaaaaacatttatttattcaaaaaatagttacatttatattgccaaactcaaaaacaagtaaccaaggataatagttaaacttcagttacttgggaggcataagggtatagatataactagggtaaatagcggcataagtacctaaagttttgagtttgtaagcggcataaacccaatgattttttttagtggcataagtagccaatgtttgtaaaactgtaattttactctattttcttcaatacagactccgttttaaatttattttaaaaatatttaaaagtaactgatactacatatttttcgtccagaccaaataatctaaaacttgggtcttatatgtgttctgtttaagacaataactgaatctgtgctgatgaaacgggaagaaaattacagttttataaacattgggtacttatgccactaaaaaaaatcattggtttatgtcgcttacaaacctaaaattttgggtacttatgccactatttacccatataactatacttgaattaaaaaatcctataactaccattaataacgatttttggaaaagtgggtgaattttttaaatacacaaacacttaaactaaaaattagaatagataaagaatggatttaattatagtcacatgataagcactcaatctggaaaatgagtattaactctaaaaaataactagtgagtgaaacatgttactcaagggagctcaaagagaaaactcaccatatcagctatttaactaaagaaacttagaaaaatagtgtgtataaagtatttgggataatataaccaagaaaattaaaacacaacctcgagcaagagacaaaactccgcttgcacattaataagagtaagggatataactctattagcgcataaaaaaagagtaagaaatataactttgctcatacatcaaaatggagcaagaggttttaaatctactcaagtatcaaacttgagtaagagattctaactctagtcaggtgccaagtttgagtaagagaagcaacacaactcgatatctgatgggatgaaatatgtaactcagcctatataacaaggaaagtcacgagtctcaactctatgttttaactccatactgaaggtacatagttcaagatgaaaggaagttgtgcccaagcatgatgcttaaacaattttgacccgcacgaccaaatatattactcaaagccaacaccaaggccaaacgagagttagaggatcgtcgtcaatgcggttgtcacatccccagtggtcacgagcatacatctacaaatacaaggaggggaagtgagtataccgacatggaatgaggtaacccaaaaataaataaaaaaataataaattaaactcacttgataaagtatttaggctatttaattaaaataaattggataaaaactaatttaattgcaaaaaaaatagatacaaactaaatttgattaaatcaaattgaaaaaatctaattttgttaaattaaattggagcaaatctaatttaaataaactaagctaaataaatattattaagagaaatattttattttttagtaaatattttggatatatcaaagttttcctttgaaaaattaaaagcaatagttttattggtgttcttgatatataaaaatgtgtgtgctcaaacttttcaaaggacttctttggtacacaaaaaaataagggagccgattggctccaacaaatgagttgaatgcttctattcctcaccaaaggagctgaatggcactaaggggagccgaatggcaccaaaggagtcgaatggctccattagctcctcaaatgaaagcaaaagaggtgtttggtcaaaaaggacccaattagcatgattagttttccaaaaaaacaacgaacctgatgtaatcaggtgtatatttatataaacatatgtactaaagggtttgttttacttttatatttattttattccctaaatcctaaatagccacaaacatttttcaagatgcttggaaatattggtagtcttctacatatttattctcggtagtactaatatttgcagctatggagtccaaaagtgcgagaattattttttctacaagtccatcataatactataaaattatgataaacttggggggcaaatgttatccctcaaaaaaccaagataattgtgcacgaatttttgttctagatatggaagtccaaccaaaatgagcattttggcccattgcactcctaccaatggagcactttggcacaaaaggagcactttggcacatttcacctcctaccaatggagcactttgggcgtactaagctcctggctccgtcagttactaaggcacaaagagctcctcagctaccaaattacctcaaggacctaattggcacgaactgacccaattggctcccctcgtgtgcctatgaccatccgggtctgctaaatgcaaaagacacgtgctcttaaagctattatgaaaatatagtcaaaaaatgataagtgaatagatatttatttttttgaatgattattttattattattttttatcttgaacctaacccaactatagttacgggaaggtgcacctatgaataagggattttaaatcctagatgaaaatcaatagaaggggagtgaaatcacttgtaaagggatcctgaacttgatactcacgaaatcatactcttgagctcccactctcaaattctaaactcacttgaggagtgaactcttggagaacataactttggagaactctcctcaagcattgagatcaataacactccaagtggactagcctattactgctgaaagggggtgaaccactataaaattcttgtgttcgtctttggtgaatttacttttacaaaccagtttactttgattaactattgcttgtgttcatcttgctcgttttacgatcttcttagatccgttgacaaaaaaccgcgtcaacacttactattgaagaaatgctaataaagagttttccctttcgatgagtaccaaatcaataaaaagagtgaagaatttactctccatatatatgcaaaaccaaataatatgagcttaatttcatacctgatcatatcagagccagtactttcttcccttttctatcttttatgcaaaattcaaactcaatatcttactaaaatcaaagatagaccgcgattgaggtttcggatagagaaatcgaagaatccaaagaaagataatcaattgttgccactacaaagtagaagatctaccttagaaatcttgttgaggcatggtgtccaatggaggagaagaagatgatcgacgaggaaactccactcttaatgcttcaagagaaataaaatgaattcggggatttaggtttctcaataatgagagttcgaaacagaattttcaaagtcctcatatgaatcgattatagacaaaatgaattccaatgaatgtgtcaaggagaacagattatttatctatatgtaattaaaaaaattaaaaaaaaaaaaaaaaaaaagaatctaggtaactgccacaatttcattgcgtccatattatcattaaaaaacttagaaattaggccattgttagaaatctaagagaagattgttgttacaatgtatcaaataacaatggtgttaggaaatcacgcttgaccaaagtcgttcaacccagccgcacaccacggctgcttcagatcgaattggaaggaaaccaaaaacaaataatatattatttatatatatatatttataaaaaattaatcctattaacaacatctgttatatttaacggaatattcttaaaatattttattaaactaataaaacagttaaatagccacttttaatatataaaaatactatgatatttttatagggagtttcgtagtaattcaagtggtatcaattttttagaatctaattgtttcactttggtctttgcattctttaggatcatagttttatgacgaattataatccttgttagaggacaatgttagttcactttctaattttgcatagatgcccttaatttattttcaacattatttttcttatttaatcgatttttttacaaaaatttaactacttaaattgcgtttctcttatcttcttcggtatgcattgctagttcataattttgagtttatgaaaactaaaatctgattgcattcgaaaataatttaagatattaattagttactttctgacttaaattttattcataaaatactaatttttataaattttttatttttctacgtttaaagttttatttttagatttttatagtattctataaaatacaagaaaacaacaaaaaaaaattacatgaaagtaacaagaaaataatatcaaaacaa

SEQ ID NO: 220368 - DNA, 1843 bp, Cannabis indica
caactagaattaaatataaatattcatataaaatgatctcaattctctatagctagctcctcatatgggttctttctgtaacaaaagaaaatattatataatgtgtctttatttcttctttattaatctctaattgtggtatatgcatgcatgtaattaatacaaataaattattacaatcaataatcatatgtttaattttctttaattattttttgttatggtgaccaaaaaataataaaacatcctaatttttttaaatggatcagtatggtcactcagggactgaatctcaacaaaataattgagaaatatataaatatatatacatatttaaaaaataataaattgcagtatataaattataaagagtaatttgaggcataaatacttaagtttaatatttttctattgtagataaatactaaagtttaattttttacggtaataatacttaagttatatttctgtaacttctgtagatacttgattttttaagtattaagtcatcattcacgtgttactttcttattagtatatttaaattaatttttaaataaaaaataaatttagtgacctagatcaatcagggactgtcacgtagttattgactttaacacttatatgaaagttctaaaaatataacttgtatattattaccgtacaaaaataaacttaaatatttatctgtacccgaaaataaacttaaatatttacaccgtaaattatttaattataaattgattaatatgtttgtataaataagattatacttgaccaaagtgtccacactgtttcattggtttttttctctgttttttttaatgtggtgtttgtcttactatattttttaatccatttttttattctatttcattcaatagttaattctcccatttaaaaattgagtcagataattgtcaccaaaatgaaagcaattccaaacttttgtgtaatagaaaataggagacatgaacagctagtatggtaagaagtaatactttttttaaaagcaaatataatacaattaattagggaaaaataataaagtgtaagtattattttagatattatgttttgtaaaaattatcaattgaacccttaattttattaaatgataaatcaaatcctgtattttttaaataaaacttaattataacctggtatagaggtgtctaaccaatttgataataatttttttgcatctattcatgctataaatgggtttcaaggttgtttatgttaaaaaatattaattgagatttttatcccttgaactttaatatgtcaaaattgaattattggggtgagggggagatttggtacatatcaaagtttgaggaacatgatttaatacatggacaatcgtcacattagtaaaattaaatggaattggacagtttagaagaatttttagcaacctgaaaagtttagaagactaatacaatttggtacatgtcaaggtttgagagaaaaaaatcctaattaactttaacaaaaaatgaatgaaaactaaactcaagatactattttgtatcattttagaaaagaaatgctaaaagacaccactgatatctagcaccctccatagtgtcatatcgctattagtataattaagtatcagtcatcagatctcatataacttaaaaaaaatagtttttaaagaatatcactaaccaattatggggtgctacatataaaaagtgttgaacaccactagtgcctaataacaatgctcttccaaaaaaatataaagggtgaatagcggcataagtacccaaagttttaagtttgtaagcggcataaatccaatatttatttttagtcagcataagtacccaat

SEQ ID NO: 220369 - DNA, 1358 bp, Cannabis indica
cccaacaaggagagctatggaaagacataaagagactgactgtgggatccatggaagaattctcagactgagaagatggatttataaagctcaaagaagaaatatggcgtgtggatacaattggaaaagaaaactcaacaacacaccactgcagccaatacatccatctagctagacaagaattcacaaaactacaatagttcaaaccaaggtggaaagaggtcaaacaatggcaagagataggggaagaaaggtaggttcactggcaactctaacatcctcgaaagaatgcctcaaagtttagtgtattcacaatcctacaagaagacataaaaataatctatgcgaccacccagtctatagtgcatataaaaaaccctctcccatgaagaagggcatgagcaaataggacaccaccaagttctgtcatttttatgcagactatggtcacgacacaaatgggtttaataacttaaagtgggaaatagaattcctcattaggaaaaataaactacacttagaaaaatatgtcaagaccgatcaaggataaagggtcacccaaacagataacaactagaaccaattaatgcctccaccacgggacagacatcttgaagtgatcattggaggcgcccaccttgatggagactcaagcaaagctagagaaaagcatgcccaagccatacaatatgaacaaactaatgcagttctgaccgttgaagaaagaaagcctaaatagccacgagttggataaccgattatgactttcagcaaagcagactccaactacgttatctatctacacaacgaccctttggtcattaagtgaaaattgcaaataaaatagtggctcatataatggttgataatggagcttcctcaaatattttgttcaaaataacatataaaaaattgggcttcaacttaaagacttggttccttgcactcagttagtctacgaattcttcggcaaaagtgtggcaccactcgaacagattggcttaccactcacagtaggataagcttcgataagaacaacagtaatggcatagttcttagtgattgatgttcctttaacttttaatgtcatcttaggcatgttaggattttatgccctaaataaaatacatttcaatataatcttatttactatcaatggaagattacaaatcatttaggattacatgtagttttcatgattatggatttaacatacaattttcattaaacttagaatatatagttactcacaataacagtgatgtcattacggtgaaaagtaattggaattatatgcttcaaactatttagtcccatgatttatcagtagactatatttacactgacgtgataattag

SEQ ID NO: 220370 - DNA, 1736 bp, Cannabis indica
ttttataatttataatttatgtttacaattttagtatttataattttttttttttgaattttaagttgtgttttgcataatagttagtttattataatgtatattattttaatttttatgtagtttagtatttttatatatttaaatttttattctaaacatatttctattaggggattcctgttccgtctctgctctcattaggggatttcttacttcattctcgaaggagaataagcagggaaagggataaaaattcttaaagggaatggaaatgggaatgggagtgcactccctaccaatttcccatcctatgtgcatcactacaaaagttagaccaacataataatcactgcttttttttggtaattaaaaattgcttttttttggtaactaaaaattacatttggttaataaaaacaactgtccttatagtagtaattattttgtgagtatctgtatatatgtgtgcattaattatatacaatttatattgatatctttttgttggcatttggttgtatgcatgacattacatataaacttgtatttgttcctaaattaattttggaagaagacaaaaagttatataccaacttattatacacaaatatatatgagttaagtacatatatgatctacaaccttcatgtaccattttctttttactttagtaatttcactactaacctcaaagctctaattaacctcacaacacttaatttgaaaagaaagtgtgttaaaagagcatcagagaaatgataaaaggtacatacagatatcaaacataacaagaagtaataaattattttagataattttaacgttaagtttcacatattttgatttaataaataatataagaaattattaattaattataaaaggttacattagtgtgtgtaaagaaggaggtatggtgtggtgtgggtgaaattaagtattgtatgggtgtataatgagtagatgttgtaagaagaaattaaatattgtagggatgtataatgaatacacgtctgacacatatttttggatcttgtataaacaaattaagtattgtatggtgtatattaatgaatacacctctcacacataatatttttggatcttgaaagaagaagataagtatattgtatggcgtataaagaatacacgtctcacacatacatatttgtggctttttttaaatatgagttgtttcgtgccaaattataaaaaaatatagatcgtgttgtattatgtgatgtgccgacaattttacaaggtagcctgatacggcccgtaaacctaatagttcgtgcttaattaaggttgacacgtttttcttaaatagatcaatccacttttttatacgggattaaattcgtgcttcgtattttagttttttttttattacagttaatgagctaattactaaaatatatgtgtattttatagttttaattacttttacataatttttcaacaataattatacacaatcataagaaaataatgagaattattagaaattaaataatacacacaatcgtgggattcatctaaaggcttgggacaaactttgtctccctaaatccctgggtgggcttgggttccggaaaaccaaggagatgaatcaggcctttctggctaaatggggatggaatattctcaatggcagtcaatctctgtgctgtaaagttctaattgctaaatacctcaaaggaaaagatctccttagttgcaggtacaaagat

SEQ ID NO: 220371 - DNA, 2590 bp, Cannabis indica
ctcttcttagtgttgtttgagttagtttctagcatggattaattttttttttttaatgattattctaattgcattgatttttttaggcatgtatggattttttagatttgatagattgaaagtttgtaagagatgaacaacttgtttggttggatgatttttcatgtattaattcaatgatatgtttcgttttgattacatttcaaactcttcttagtgttgtttgagtttctaacatgaatgaatttgtttttgtgttcttgcagtttttttttctgtagacctaacagagactacaaatggctttttcgggtaaacttggtggccttcttaggcagaccatttctcagaatatacagtcaccaatggcatctatgcttaattctgttcgttgcatgtcatcaaagctttttgtaggaggtattttagttaaaaacattgttatatatgtatgtcattccaaagtgggtttattctattttgtttggatacttattcttttgaacttggtatttttaggtctttcatatggaactgatgaccaatctctaagagatgcattttctggctttggtgatgttactgaaggtgtgttcaatcatatcttttatggttttcagttcttctcttgagctatgaaactggtttaattaaaaccttgcttggttgtggttatttaactaatttgtgtctttagcttagagttcttattcacaagttcatatttgcatctgttgtaaacagttactgttcttatatgtgcttatgttgaactttataatgagttgtaggagcttcatatactaaaatgattttaagttgttaagtcaattcatacttgtgctatactcccacaaggtttgaggttcaaatccctcctggaaacctacgtagcaattgttatagtttcttagttcccaaatattgtagggttaggcaggatcctattctaaaaaaaacacttccttgtgctatagttcatagtactcatattttgatttcaatttgtgctgcttgtcctttgtgatctacagctagagttatatgcgaccgagaatccggtaggtcaaggggatttggtttcgttagcttctccagcgacgattcagcaagctcagcattgtcttccatggacggtcaggtaaaaacactgttaaatgcaacaagattatgcacacatctaaattgctctctataatagagtagtgattgtatacttaacaaatttcaggctttacaaggaagaaacatccgtgtaacgtatgcaaccgaacgatccggccctcgtactggcggtggcggtggatacggtggtggtggcggcggtggtggttaccgtggtggaaattctagggaagacgacttttaaaaagctctgcttcgggtgtggtcgtgtcgactagttaccggctttaatagtttattaggtttgaaaggtttgatgattaattagctgaactgtggaatgtttatgtttactttatactaagtttttgcctgtgacttgttatatattgtgccatttagcatatattgtgccattacagccaagtcaatgaggattcatttgtttttgttaactcttttcttcaaaaccaaaccatttgaggtctggaattttgtccaaattttccaataaaaagtagtaaaaaatgaaacatggtaataatgcaaacgaattgatgagaaatttgttatgtttcattaatggtgatatttatcttaaaagttttagaagttgcttatttgaacatcgttttgatatattcaagagcttacttttgcagatttcagtcaattttattaataaatttgggccatgaggcccgttgaagtagaatccatacttttcatttggtctataacgtagtgggcctaagcttacaaccaaattgggcttaagcccattcatatctctatttccctctccacacacacgtcattaatttaagggatttttttaagaatatactatattaggtaagtttttacaaaaataacgttaataatgtatcacacacaaaatgacgtgacacgtcatcatctcctccacgattacccataaacacaactgttaatcctaaaaatagaaaattaccaaaaaaacggcaattatatatacaaaaatttaacataataaaaacaacgttatttttgaaaataattaccaaaaggtggcgcatgaaaatttcccttgccaaggttagtataataaaatataaacacaagtcatcgataattgtgtttgaattcacaataatatttaggtaaataaatataaaaagttaaatattattaacaagacgttttttcatctaatagactatcttaattaaatagcaaagtgagaaactttattattataatttcttttaaataatattagtgatgatatatgtacttaaaatatacaccaaaacaactttaattttatttattttcataacatgattaatgatatatgcactaaaacattacatacaccaatgcaataattcatttcaaccaattacatttattttaaattcaacatattaaaagtttttttttttattttacactttaaaataatttttttaatatttttatg

SEQ ID NO: 220372 - DNA, 2001 bp, Cannabis indica
gaattgtccttaaccaacataaagcagcaaccaggcgagtcacttaaggcttacttaagtcgctttagcacagccgctgcaaaggtcagaaacctcaatgaaaatattcaactcactacactttaggcggggatctcaactgacctatccatggctggaggcgaattgtgggatgacctgcagggtcgccgagtgaggaacattaatgaatttaatgaaagagcataagtatttgtgtacaaagaagaagcaagaaacgagatgaagctgttgaaaactggctcgagaagtaaacccagcacgagtatagcaacaacaagcacggtctcaacttaggtggaaaatcctagtggttcaaacacgaaaagaaaggatagatcgaaagaatcatctaagaataaaaagaaataaaaaaagcacgacaagtatgtttcgatatattcagtatacactaagttgaatgaaactcatgaaaatatatttctcgcaaatgaaaataggattgcatttctcaaacctaagcccatgaggcatgtgagacataagcgtgatttcacaaaatattgtcgatttcacaaagacatagggcatactactgaagaatgtcgacaactgaaggaagaaatagaaagtctgatcttgtgaggatatttcagacagtatgtaagacattagggaaacgatccaaaccagccaaacaatcctaataacccaaataactagagaatgcaacctccccctgttgagggcgagtatatcctgatcatttcaggaggaccacacctcgctggaaatagcaataatgcccataagaggtatatcaatgaaataaaaaatggacaatcgacgtttgctccaaaaccactaaaaagggcaatgtcaaatgaacctccgattatcttcttgaaggaagacacaaaacacgtatacccacatgttgatcccctcgtagtaacagtcaaactcgccgataagagggtgaaaatggtattggtggacaacaggagtttagtcaacatcctttacaaggatacattgaaaaaatggggttaaaggatgtgaagttaaaaccttgcatggtgagcctatgtggattcatatgttatagcattgctagcctaggcatcatcaaactcccattgattgtaggagatccaccgttatcaacgacgctgatgtaagaatttctagttgttgatcttccattagtatacaatgtattgatcagtcgcccatcattaattgaactaggggcagtaagttcgatcaagcacttatccctaaagtttccaacacaagcaggagtaggagtattctgaggtgactaattattggcacgagagtgttatcaaattgaacttcagaataggagacctaatcatcaattgatggtaatcataatagaagaaggcaataaggaagaggagggtctagatcccaggatccaagaagaaaataactagcttaaacctattgaagagctagaagagattattttagatcctaattatcccacacaatgtgtatacattgggaagaatttggaagaaaaactaaaatagtaattaatcaattttttaaaggaaacccaggatcaatttgcatggagccactcaaatatgatagggataaacactaatatcatttgtcagatttcaaacatcgacctcagttatccagcaaaaaggcaaaaatgatggccattagactttgaaagataagggacacttaaagaagaagatgacaagctattaactaacgacttcatactcgaggccttctatccctcgtggatttcaaacctagttcttgttccaaagccaaatggtacttggaggacttgtatagattttacagacttgaataaagcatgtcctaaagattgtttaccactacccatgatcgaccagttagttgatgcaacagcatgaaatgagctgatgacttttatggatgcatattctagatataaccagatcaaaatgcatgtccctgatcaag

SEQ ID NO: 220373 - DNA, 2774 bp, Cannabis indica
caactcctcgacccggttggtggtagcaaaaagacttcttcttcacctctcccagctcagctcttacctccccgacctgctttttggctgaatccacctccttctgcaaatttttggtggtggtgatattcttcatggtcgtagatttggctcaagagtaggcataatctatcttcagattgacttgcacgagaaagagttaaagcctgcattggtaaaaaagataggataaaaataaagaagaaaatacttacacgagttgcttccttcaggaccccgcccatcactaagctccaaagacaactcattgtttgccccggacagctgatcgctcacctcggggagtgaccgatcaagatagtacttgagtatctccttgcctttcttggctttagagcttagcaccacgactatagaagaggccttgatcggaccagatccattcgagctccccctttagcacttttagattcagataccttctgggttggagggtccatagtaggcaccatctcttcagagaggtcgataactgtttcagccagacccttctccttagatggaacctcttcgccccgggtcctttgggcgaaggggtctggccagagttgtcgctagatcttttcttcaaggccgggagcaccttttcagacatgagtgcatataaacaaaaccttaaaaattaaatatgcaaacatataaaaggaaggaaatgaagaacttactcactgattcgaagctttggatttgctcggacgaagctggtcgatgtttttcgaagattcttcgaagaaattgaaagaaagaaggttttttgctctgattcttcgagaatgaaaatagataaaagtggttgattatgatttttaaccatatttataagcagatcaaaggagagtaataatttcaaaatttcaaatacctcgaattccccccaaaaagtgtacgttatgcactcaattatctgaagaacaaccgtcatcacgtgctaattctaaggcctgaatcgaggtatatgtcagttagcaattgagccgaaattgaaaagaccattggttagagtcacatcgagtcatcaatcgacacctcgaacgtgtgccacccgttcaaacaaaaatctagaccgagtgaagtccacgtgcgactaagaaggtcccgcgcagacttgtgggacaaatgttatcttattttctgcacaatgatgtggcaaaatacttaaataacacgtatcctgcatttcctgtatctaggcggaagtgaatgttccgaacaggtatgccagcatgtataactcttgattatccaggcaggatgaaagacaaattatccgggcatgtataaatgtggctttttgaactacttatcacgacttaactacttcaaatgatcttgtgaagtccagacacgaaggcaattcttacaatcgtgcgattgaattagagaaatatgacaacttgttctaatcttctatctcgtgtctcataattatgtaataaatgtaatttcttattttatacattgtaagcaaaatggaaaccttctctcatgcattaaggccctacaagtagtgacttagccttactgtgaaagagatcgaaagaattgcttcagagagaaatctaagagaattactcagagattcattgtaagagcttttagagagaaaaatactttgttctttctctaaagttaatacaacttaaggggagtaggctattaccacactcacggggccaaatctttttaaatatggtgttctttattacttatttgtttttgctctattttaattatattcttaatcgcttattaattgactcagtgtcgttggctaaaagcgatgtcaacacttgtgttattttagaattaagttataatttattctatggaattataaattttttaatagaaaaataaagttgagcaaaaagttaaattatttagtttataagattcattttaatattgaggtccgaataaataggatgaagaaccaataaccaatttcaatagtgtcaattcaaaaaacaatgctaaattgaattagtaaaaaaagttctcaattcaaccaaaccaagatactcctaaccaaaaaaaaaataatttaaaataaattatggctaattaggattgttgtcccctaaattttgacatatactaaattacgtttcctgaactttttttagcgttaaaaaattctcctgaattaatgagattatcgaatttaaggacttttgtctaatttcattcaattttactaatttagtgattgtttatgtattaaatcatgctcctcagactttaatatctactaaatcacgcccctcgtactttgacatgtgtcaaattatgcccctgaactttcatcaatattaaactttccttactaaaattggacaaaagtccttaagttcaacaatctcaataattcataaaaaaattttaatgaccaaaaaaatttaatttaatacagacaaacatcttaattagcgatcaattattatattgatttacacattccaattaattattcccttcaaccaattgtgtagtcgtggaaaccggggcggcaaagagtcaaagagtatatggtggggtgatgagatgacattaattggttgagtttatatattaccaaaacgtgccatcaattactttttttgctctaccaaaattcattaagcttttatatatatattcctaaccattttatattgtgttgttgttacgtgtatgataatatttaaatatccccatgtatttataatatttag

SEQ ID NO: 220374 - DNA, 1825 bp, Cannabis indica
aaaatttagatacttatgaactatgacactatttatcctatcttatattatttatatttttcataaagaggataaataataaaaagtattgaaaatatgtattaagatattataaaaaaaaaatattatacataagtaagtacttctgctatattaaataataattaagtcgagagtctatttattttaatttaataattattataaaaattacttactatttgtaagatattgacatattgaaatagtgtcctagatttcactgttaatagcaacgaaatcttgtcgtgttgcgaatgattattgatatactttatgaaaattattcaactgaaatataccagagtcgatatctatactaataatattataacaaagagtattattattgaatactagtagtgtttgatatttttttataaatgatactttacgattagttagtgatattttttaaaaattagttttttaaattatatggcataatactttattacactaataataatatgacacaaaaaaaaatattaagcactaattgaatattttaacaattctctataagaaaggcagtatcgatggagaaagatatcaaacttgattttaaaatcattatattataactatgaccgtatactttttttattattgtttatttttatgaagatgggtttctttacttatttctattattaattaaggttgttgttgttgttgctgatttgattaattttaatttgtgggtcaaataatttagctggttttggaaattgtagatccaagtgttgagagctgatcacatgggggatgatgagatggttattaattattttcattgcttaattaaatgcatgctcatcaatctatctataataatattgagttgggtggtagtagtcatgtaatattgcttacaatagggttaggtgtcacgtgccttaatcgtgaaaggtggggttgtatcatgcataatgagttcgtaattcctttgtattggttaaagatggtccaattttttcatgataaaataaagttctatactataaagtttattaaattaattatacaaaagaaagttaaaaaactatacataaattattgtaaagactgtcacagtgagttacatatggggatcaaaatatgtaatgacacacagtactgctgtaattagtgagagcagtgtttgctgacacatatcacagttgtccaaagcaaaatgtatcattatatcctctttttacaatttattttatttataataataataataataataataataataaataataattttatatatttatatattgtgatttaattaaagtatatatggggaccgctacctttatgcaccagctagcagttgtgcttattaccctctaaatgctttggtttatgattattgaagaccctctcatattaacattattatatatataggtgcttctgtggtgcaatctaaaaagaagaaaaataagggtactgttgcattttattgtatttataaatcatcataattttgttttgaaaattatcttatatattatttttttaattattttttttttaaatttacagtttttaagtttctaaagtggttgcaacgctagttgcaataagagtttttatacgattttttttttcttttaatttagtttgcagcgctagttgtaataggagtttctatgtagaatttcgtaaaaatataaaaaaaaaaactgttttgaaatgtaaaaataaaaaaactccttttttttataggatgatatattatttatgacatattgtaaaataaattcaaaataatttaccatataaaaat

SEQ ID NO: 220375 - DNA, 1773 bp, Cannabis indica
ttagatctagagagacattgggggaggcccaagtacttacagaatggctgatcttctaggttaaaagtttcaaaaaaacaaattacaaacctcctgcaaagtgctgggagaaaatagaattgaggatttaaaaaaattaatagcctaacccgaagccctagcatagacattaaagacctcttgaagagctaagcaagagcttctatcagcagaacaaaaaagaaggctatcatcagcaaaaaagagatgagcgataggggagcatgcctagagatagcaattcctttaagaataccagcttcttgcctaaccctaaggagagaagacaaaccttcagcacagagaataaaaaggaaaggggataaaggatctccttgccgaagacccctagaaggtttaagggaacccttaacaacaccattaataagaaaggaaatatgagtagtggaacataatgctttccaaaaattgccattcaactcgatcaaaagccttagccatatcaagttttagagcagcccaaccccttttaccattcttccgagagttaatggcatgaacaatttcttgagcaataagaatattatcaaaaataattctcccgttaacaaaagtactttgaaaaggagagataattttatcaagtatcaccttaagacgattagctaacaccttagaaataactttatacatagtagtacaaagactaataggactaaaatccttcatagaattcgcatgttgttttttagggatgagggcaataagagtagtattgaaatctgagaaatcaacattattattcaaacagtctaaaacagcatgaacaaaatcacgaccaaagagtggcctaatttttctggtagaaaaaaaagcattaaggccatcaagactaggagctttatccccagagagattaaaaatagcttttttcacttcctaagctgtgaaaggctgagcaagaaaatcaatctcaggttttcctaaggagggtcctaaacagtctaaaattcgactggtagcctcacagaacgaaagaaagtagagaaaaatgaaaaaataatatcaaacatagcctcaggatcattagtgttattgccaaaatcatccttcaagtatataatagtattattatttttcctatgagaagcaaactgatgaaaaaatttagtatttttatcgccagctttaagccaatgaaccctagcccattgcctccaatagatttcttccttataaagaagagcgtcaagatgggagtgaaggtatttaagacgaaggccagtctctctactatcagaagtagagatctgaaggctagcaatctccttttgagtatcctggatttgagtttggaaaatttgcttagcagatttattccaggatttcaaagagagacataagattttggtaagaagaaaacggctaagagtgcccccattaagggtgaggctggacgaattaagccaagaatcttgaacagtggtataaaaattaggattctctagcccaatattttcaaactgaaatcttttttaacaaaaggatagctacttgaaatgctagtatgaaggaaaaccttaatagctcgatggtccgaaccataaaaaggcaaatgatgtaaagccgcattgggaaaaagagtcctccaagactcagaaccgattgcccagtcaagacgctcacacactgagctattatgccaagtgtacttatctccctcaagattgaggggggaaagacaaaatttatctaagaactgggcaaattgat

SEQ ID NO: 220376 - DNA, 1609 bp, Cannabis indica
tataaaaactacaaaatagatagaatttctaaaaaaaaaaaaaaaactcaaaatagatatgtatttaaatgaaattcctagctagttaattaactagaaaaagaaaatggaaagaaaaaacactaacacaaaagtcatccctagaaaaattcacacgacacactcatatcattataagaaattaacatgtttaataataagatataattattaagagaagtggtagtaataataataaaattattatatattgcttatttaattagttaattaattaataaataattaccgcgatagagccagtgtcatcaagaatgccagaaccaccagaagcaaaactaacaccatgaacaattctccttcctttagtggagggatcggcgaaagccgggatgaaaggaaggcgaagcttttctccgatgagatcgatgacatttttgccgttggtgaatcttccggaaggcccaagaggaaaatctaagccgtaaggcaagtaatttgctttggccaaagagttgtttatgaagttattgttgccattatccactaaagaacttccaaacacaaacatgcctttcataatcaacattttatttttatttttatcatcaaaattattattattgttacatttggaagaataagggaataaggagattgtgatgaggaataatattagtattgatgatgatgataatgaaagagccattattttttagtggaataatatgatgatgatgatcataataattttttagagggaaaaagtctttatgtatttatagaattttttaaaaaaacaaaaggttacctaactcatttaacactattaattagataggtctgattttctctgcatttttcttttattattattatttgtacctatgactagtatatgcatttatgtaattagggttagtggactggagtgcatgcagtgaaggttttcaatattttttaggtatacattgtttttattattattattattgtttaatttgataagtaatttttttatttgggagagattagaaagttttcttcatcgttaaagaatttatgaagtttacaccagtcatcgaattaaaatagctcattatttaactaatagatatgctttgccaaattataaactgtaaaagttagaaaactatataaaaattactctaaaaaatttaaacaataaagttataacgttatcaaacaacactagaagagctagagttataaattgtaacacttaaaaattatttgaaacatcagaacataaacactaaaaaaaaaattgtattagaatgaaaatctacaaacaaaacaataaaatactaaattcacatttgagctttattgttaaacaataatgtgtcacattgctattacaataaaataaattatattagattatattagaatgataatctataaataaaatgaaaaacttaaaaataaatatcaaatcaaatgtaatacattttggctagtattgttagacacatgcaagtatttaatttatacttaaatatttaaattgagcattattaggcactagtaatgctaagtatattttagaagtattgtcgtaggattggttagtgatattctttaa

SEQ ID NO: 220377 - DNA, 1929 bp, Cannabis indica
ttgtggctattcctagttatcgcattaataagaagtaataaaaaaatgtgaggcttttttattacccttttgaagtaaaataaagaacatgtgtagacttttggtgatgctaatgcttttatttcaataaaactaatctttgaagatattagatgatgtcatttatgttacaaatttgttcaagtagctatgtttattattattaacataataattcctttgaaataatatgcctatattaattggtatcatataagaaacacctctatttaattaatacaatgttaattcagaagctttctcagctccaaaataagtcttatcaaaagttttgaagttaaatatatttacaatatcaattatatttttttttccattttattataattattaatttttgttagattacatgggtatttattgatctcaacaactaaaatatggtctctaatgtcccatgttgtgaataaatcaattcctttagttctaaacacccaaatgaaaatgactaattggctatggaaagtactaactttagggtactctttttagttggttatgttctatggaagaaaaccaaggaagaagaaaaatagaagtatccattacttggaaggcaaacaccctcatcgcgattcgcaaaaattgacataggtagagacttcgagttcattccattttgggatgagaccttaagtttgggatgagttagaaaagtttttcggaagtgacataggtagagacttcgagttcattccattttgggtgtgttagaagagggtgcacgagaacgcaacttggtcagattgtggtgaggctaacggttgcttggcttgttcactgctttgattgagaacactacttgatggtatgatggcttcggagttggatataagtgaagagtttatcattttttatacctttttcttttatatttttttttctccaccaaaatccaactttcaaacataatagaattttgaatatcaaaaatacaaaaagagtgtatcggtacatctatttatagagagtgcaccgtagaattacctatatgtatgtttcttttttttaatttttaattttgttaatctgaaaaatatcaaataatctgtcacttcaaaaagaaatatatctaatgaaaagaaaaaatagactctaaaatgtcttattattgtcattacaacaaaaaagtatgataaaagtcttacataggcaattattgatcccaagtcccaacaaaacaatgggactaaatactaatgtctcaagttttgaaaagtatctcagcatccttgaatgaatcaattcccacaattctcaaacacctccaaaataagtgactatgtacgttactatctttagtattctttgaatttaactattgaagagaatcagaagaagaatttccatcttggtccaaaagggtatcctttacttggaagtttgaatattttaggcgaacattgtcatcgtgatatgcaaaagttgtcacaaaaaatattgtccaatcatgcaatatgcggctcggcctaattcccgctattgttgtgtcctctcccatgaggctgctgagctgtttctcaagactcgtgatcttgtcttcgccactagaccaccttgatagggctgcaacatacatcttgggagcaaaggaacttgtcatttgctctatacagtcttgttggcacgacatgacataataaactcaaagacacaacttatgagcacgaacagacttgtctaaaagtacaacacattcaaaacttggctattagataatagcaattaataattgatatttatttatcaattatatataaattaaattggtaacaaacacaaagtattaacactaaaactaagtattaatttagttcaaaaaaattgagttgaaaatttaagtactatgtgtaaagtattattaaaaaa

SEQ ID NO: 220378 - DNA, 1481 bp, Cannabis indica
caatataaacgtgacacatgtacatgtgtgagtgtacacataagcaatctatgataacggttaatcagataataccttaaatttgtttgaaagaacaaaatttgagttagatacaagtaaaataataattgagagaatttagtgaccaaaaaacttaaaaaaataaaaataataagatcatgtattttagattaaaaaaaaaaattagcatagaaactccatatattatagagaaatttgtggccaaacccctttaagtttcaattagtatacacttaaccccttattctttatttttagtggcaaaacccccttaacttagcttctgtttgcaaattcaatgtattagttaaatttcaatgttaaatgccaattaggacgccaacttgtattgtcactatgtacataaatacagatggcatgtttttattggtacaaacaattttaattattttaataactttattattttagtaatttttaaattattttaaaattacaaaagtaatattataaattggaaaaaaatcaatatcagattttttgtttccttcgaattgacattaatgatagacacaccatcatcattaacgacaccaccatccccattacagcccaccaccaaccattaacggtgccaccatcgaccgccataacaaccaccgcaatatatttcgaacaatctcaaactcatactcaaacacaaactaaaaaaataaattgaaaaacactatcagatacaaaagaaaaaaagaaaagccccaattccaatctcaaacaagagcaagaaatgaagaaaaatagaaagagaagaaaaaaatacactaaacctagatctgaaccgctctacactctttcccctccaccaacctgtacgatagcctccatctcaaatctccattgatgtcggcgagaaaacggaggccacaaatggccaagaacccgactcacacgattctttgtcaagatgatcggagtaccatcgactccacgaagatccataaatctcgatcttgtctctttccttgatctgtcgtcctccgcctccgccgtcttgcacctttgacttgtgctgtcacctgcgcgagaagaggcagagaagaagaaagactgttaataagtttttttagtttatttttttaactttttattcaattttataatatatatttttttattttatcactcaaaaaaactatataattttttaattttatttattttttataattgtaaataatttgtaaagattaaaataattaaaattagattgactaataaaaacatgccatgtgtcattgcaatccaagttggtatttctttttttttttgtaaaacatccaagttaacatcttagttggcatttaacactaaaatttaactattacattggatttgcaaacagaagctaagttaaaggggttttgccaccaaaaataaagaacaaggggttaagtgtatactaattgaaacttaaaggg

SEQ ID NO: 220379 - DNA, 2828 bp, Cannabis indica
aaaaaaaaaaaacagtatgaattcagatatatcttggaataaaaactatcttttactttggttatgaaacttacagcagctaaacggcattcaacaaccctgttattgtaatttgtagcagcagtaactgctttctgagattccgccaaagaatgggcgataacaaaggttccaccagctggcaattgcacatccgtagcacgaataggattgaaatcaataagctctgcaaacccacttttggccatgacagatatcgcctgtcaaatgacagatacagtcttaggtattgcatctaataatctcctaatacatggtctacaatctatcgtggctacagatataagtagcactaaggcaagaagctgagaatagatgcatcaaagaatcaaagcctcaaatggaaatattagttcacaatcatctcaaattcactatattttttcatttgataatagggtggcatgctttggcgcaatttaacatccaagtttcaacattttattttaatttcaggctaacatttgaattgaaatattgaatacaaattagacggttcaaaaaaataaactgaattgatacacagctattacacaataacttagcattcaataccaaatttccttttcatttcattattctatagtctagaccaaaccaccaaagtaaagtgatcactaaaactcaacaagaataggaagtaattacaacaattttatttcaacatactcgaccaaattttagggctaatgcaatccaattcattgtgcatatctgtggctatatatataaactacctgatccatcccaccagactgtgttccaatgtgtcgttcacattcacaagtaagttgtgcaatttctttctgtttaccaatgaaattatgttagcaatagaaccagtcatgaaaagactcaagtaaatgtgattcagcttaaaagacttctgtaagaagaatgagaaatcagtatctacccatagaaaaattagtggaaagaccatacctttggaaagttcacatcaaaagcagccataatagcaatagtggaagagcaaacaaatgctgcagagcttgataacccagatcctatatgaaacataaactcataatattaagaatttgtttttatcccctacacaaaaaccaactacaggacataaaattcattttgaaagcacctgtgggaacagttccgtcgaccagaatatcaagcccgactggctcatcaacttttataccttttgatttggcatattcatagtatcctttgtacctgaagaacaagaagataagtttatatagcagtcaaatgttaattggcacttatatattaagtatgaaattaattcaaaaggcttacccgcaaatgaaatagtggccccatctatgattttttaagtcaatttcctgcacaacaaacaattaataaaagctgataattctatagatatatctacatacagatgtaaaattacctggttcggatcagcaggataggtgcaaagttggtacttatcattaacattggcgattcttaaaatcttctcagtgtcgccagcatcacgccttcgaattgcaataatagtgtcttgccttatagccataggcaacacagagtacccttcgtaatctatatgctctcccataaaaaacacactccccccacaacaaaaaaaaaaaaaataaaaaaaaatcaattattgattgtccgatgatggcttgtaccatcaccaaacactagttttactaatttatatacatataatatatatggagacctggagaacgagcgaagatatgtggaggatgaacaaatatctcaagaaacttagccttgaactggtcaaaacgaagctgagcttcttcaagttgagatccatcgccataaacaggctccaaagatgagtaaactgggattggaagctcttcgtgttttgccattaattcaattccaagttgtctccttttctaatatccaaagaaaagaaagaagccgaagttaaagccaaaacaatataaaaaacaactttgtttgtatatctaaaatatatattgaactcattcactcacactgtctcaatattttttaaaatgtgtaaacaaatatgcgtgcactaattaataaatattatcttatcaaaagaaaactaataaatattattccgtcattaataaatataaagaacaattccacactgtcagggaaaaattggaggacatcaatgccaatgatagcgttaataaaagcatggctcattaatagagcaaattagcgacagcttgtcaaaaagtaattgtaatttagactacatttaaattatattttggactagaacatgaagcaaatttcagatgatcaaacataaaaatattcaaaatagcttcaaattatataatgacttacatatgtttaagatttagatcagaattggagaagaagggtgatatcgagaaatacctagagtaattgaaagagagagcttggcgacgcggttagagagagagagtcagcttctccttctcctttttattcttcttggttcttcgtaggtagtggtggtggtgagtttgatgctgtagaatcggtaagaagagcaaaggtttggaaagggtcctactttatttgtacttgtgttttataaaggaatcataagactttcaagtgagagtgaaaagttatctgatttgattgggaatcggatacgttatattaatatatcattttttatcttttccagaatcaatttaaattaagctaataccaaaatcttattattattaaaaaataattttaaaatagttacgatttattattattattattat

SEQ ID NO: 220380 - DNA, 4589 bp, Cannabis indica
tgttattttttggaaaaccgtaaaaatgtaaaaaaaaaaaaacattctttgaacgtaaaaatgtaaatattttacaaaaaatggtgccttatgttttattccatgttataattacacttgttatacttgatttttcaaaaagttaaaaaagtcagtcccacaactttaacaaagacttacaaatatcaaataagttaaagcatcttatttgagagtcccataacacttttagaaaagtcatgaaaacacatctaactagccatttggtgtcaggaccaacatccaagtgtgcccaacttagagtttatgagctcgcacaagagttttcgttctagagacctcaattcgacaatgaaattaacaaggacttgacttatttaggcataaaatgactagaacttgaacataaagtcaagaatgcacaatgaggccattccatgatgcatggtcgatctaagcaatcttttggcataaaaagatagcacaggtctccactctcaaaacaccagagaaaacttgtccaaaagtggtccctcaacaccaaggagtacaaaaaaagtaaaagaaactatttttcacccaagaatcatgctagacgacttgtgccatctttgtgcacaaataagtggcataggtcgaccacacaaaatggcaaggagatattttttgcccaaagtactttttcatcatcaacatatatcaaaagcaagtgaggaaagtcactaagtggtgcagaaaccacttacttgacttgtgccatcgtgcacaaggagatgtcacatgcttattggaacccctagccgacatgtgctatctttttggcgccaaatgatagtacaagtttcatgttagggtttcagacgtcgagatgaggttttagggtcccaaaacctgcaaaatatggttcaccatcaaaaacacaagtcaaaacataccccagagatatccaataacatgtacggtcgacctgcgccataatgaggtgtcacgaatcatgatgacatggcacaggtaagatttggagttaaaatgtacttacttctctttagtaaaacagacataactctctaaatttttatccaaatgacttggttcaacttgcattagaaagtgttgacccctaaaaattactaagtgtaatatttggagtcattactcttatgcttgaaagttttccaaggggagctccacacaccaaggggagctcccagcacccgcccacgtgcccaccttctccctacgcccactagctctccacgcccctagtctcctacactccttttgacctctttttccctcctcacacacatggtttgagcgcttaactcgatatttccaccttcaacgggcatataacctcacaaatatagaagtgagtagaagagatcgagattagggtcatctaagcaagaaaattgtagtcgagatagcaatagtacaatgagtatggataatgaagataaagttcatttaatctgaggtataaataaaagaggaattttagtgtaacttaggatgtcaaccacatcagaccacctgagatacaatgttatttaggtgtgaaaatgacttaacattctatggttttaagatctagtgaagttgtaaagtatcaagggctcactataaatagggcccttgaactcattgtaaaggggactcttttttggttgaataatacaataatatttctagagatcaaaggttgtgcaatttttctatcaagatctttaaatactattttaagtccttgttatttcgttgacgagttcttaccgccaacaatttggcatcgtttgtgggaacgacaagctctagctacgttagttcctaaatcattcacaatcactttcaagatgtcaagacattctcatcgtctccgtaaaaatgggggtcactcagatgaaaaccagccgttcaccatatttagaggacaccaacctcccgtctctggacaaggccgaacgaagaataagtaaagtgtggacttccaagcaaacacttgaagagagcccccaacattacatgactcgataacgacactgatggctaacctcatcaatagaagcattcaactactgagaaagtcatctctggtgcggagcattctatcatctacatcatcaaaccccgactcatcaaggcatggacatagaaaggaaaagcaagtgtacttgttgggttcaagctccggactcaaaactatgaagctaaagtaagtgacctccaccaaaagaacaaaatgctagaaactactatgactggtatacaaaaagtgttgaatggcatactcaaaggcaaaactcaagcctcacatttctgtcacaaaagccaccaaagatttcaactgcatgagctaacaaaggtgatcctttatcactaatagcaccccaagagatgagcacggaaggaacttgtcacaagacaagagcccaatgggccggttgagacaactcgagcctacccactataaggagattacattgagggaaaaaccccatagcctaagaaaaagacttcacccaagacgtctaatagtaggggacacctcgcatgtgactcccccaaagagcaaggcccgatgcaaaccacagacaagacccaagttcctctcaataaccctcgagagaggatgagtgaaagaatgaaggagttggagacagaagcataagacctacgccagaagatggccatagccacgcgaagagacttgaatgataatgaggagtttgatgaagaatcccctctctcgagggaggttcaaatggagccattgccactgaacttcaaggagccacatatgacaccatatgatggtaccactgacccaaagtaccctcttggcgcatttaatgagctaataaaaatgaagaaggtgtcatgtaaggaaaggtgtcaatattttgtgatcacattgaaaggagccgtgtataaatagttcaaacaattagatctagtggacgatcatgtcttggaaataactttcaaacgaattcctccagcaacatcagaccgcatgtgataatagtatgcctgtcacaagtatcaccaatgtgaagcaaggaagagaagaaagtttgcgaagctacatccagcgcttcagcaccgaggttaccaaagtaaggaaaatttccaaggatgagctcaaatttttcatagccgcaggggtacaccctgggggcgggttgtggagaaatatgcttaaaagagaattggatggcttagacgacttctatgaatgagcgaagaaatacatctgtatggaggaaggaaacatagtcttaagaggaggtactagtgaatgttcatcgggagctcatctgatccctatagggtctattagatgatattcccaacacttgcaagctggcacattcaagtaaaacctcctatctaccaccaataaaaatcaaacatctaagatactcctcaaagtgaagttccactatgtgagaaagcgctcatagaagtggcaagtatacctatggtacatttcactaaattataggaggcacttaagttgatctctgaacataacatgtgtattcaggtgatcgtatatttgccttatcaatgaaatattttcactttacatatggcattcatcactctccacatattttcctaacttgctcattatacttgtcaattgaaattgcctaagcaaaaaaagagaaaaaaaaactcttttaactatagggatcgactacccctaacggtccaggaagagagtgaaagcctgaaggtagttctacaagaaagagcactcataatgatgaggaggatgctctttgaagttagtcataaagcatgtacagtgttaaaatatcaaaaacaaaaggtcgtatcggtttacaaaatcatcatctcccttaaaagatcaaaaacaaaatgtcgagtcagttaacgaaaccatcatctcccttaaaattatcgaaagcaaaaggtcaaatccatcatctcccttaaaatattaaaaggaaaagaggaatcgaatatgaatctgagagggacgcctctctaaaaggagtattgattttgtagcacctaaaatgcactcgaagtaccacagatacaatgtaagaagttgagagctgcctataaggccacaagttctcccgatatggtcttaaatttataaaaaggtcgagcgcggcctatggagaagagaagaaaaattaacttgtaaagatgaagctcgccaaacttagtctacaagaatacttaaaaaaactcttatagactaggggcaagtgttgaccccaaaaaattactaagtgtaatatttagagtcattagtgttatgctcaaaagtttaccaagaggagctccaaacaccaaggggagctccatacactaaggggagctccacgcgcctgcttgctcctcgcgcgctcggtatcctacactaccttcgacctccttttccctcctcacacacatggtatgagcgcttaaactcgatattaccacctttagcgtgcacataacctcacaaatataaaagtgagtagaagagatcgagattagggtcatctgagcaaggaaattgcaggtgagatagcgatagtacaatgagtatggataat

SEQ ID NO: 220381 - DNA, 3235 bp, Cannabis indica
ttatttccaggctttgactccacatatgcaatctccaatcgaggatttttccaataataagacagctggaagattgttaggaccagccttgggtgatcaaaagcaagggagcttttccatcaatttatggagaaatgctttccaggatgcagctcaaagactatgtccagttagagctggcgggcacgaatgtggttgtttgcctgtactgacgagaatggtgtgtaattcttcatagttgctaaaaacttgttttcagttctcttgtcacttgcattttctgccatcaaaatgtctcatcttcatgccttcttcagctagacttttatcagcttggataacttcgtttgcttttattaattattttccccctcatgtaggttatggaacaatgtattgccagactagatgtggccatgttcaatgccatcttgcgtgagtcagctcatgaaattccaactgatccagtttcagatccaattgttgattccaaggtcttacctattccagctggagatttaagctttggatctggtgctcaacttaaaaattcggtacatatctattctctttcttctggagtgaaatatacatgttagcatagctttaataattgttaagaattctttcaaattagttgaatgcttccatttgggggatggtcctctgacttgtcagcaaggtttaagcatggtggagataaattcagctagatataagaggttttgtttctctagaggaaagtacttggaaaaactgtaagacattgacaacattgtaatgaggattgtgacctcgataaaattcgtgtctaatgatgtcaaaatatgatatagataagtagcaagtacagtaacctcctagaatgttgacatttcacttatcatttttatctgtactttgggggttatgatctgtgtggaaagataataattgcaaggatttttttactaaagaagggtgcttgtgatgcagattggcaattggtctagatggcttactgatatgtttggcatggatgctgatgatgcgccacaagaagatgagaattgcagtgaggatgatgacaaacagcgtggagatggtgaatctaaatctttccttcttctcaatgccttgagtgatcttttaatgcttccaaaagacatgcttatggaccgatcaatcagaaaagaggttgatatataatcaacttatcttcataccctttgcattgagattacacaaaactcatgtttactttcattttgccacaactactaacttttctcttctgatgtcttataggtgtgtccctcaattagtcttcctttgattacgcggatactttgtaacttcactccagacgagttctgtccagatcccgtcccaggaaccgtattggaggccctaaatgctgaggtacgattgtctgcattgtagaattgaataattagaaccccattcttggcattggcaaaaagtagacaaataatagatctctactgaactttcttttgtagaccattgtcgagcggagactatcaggagacaatacgaaaagcttcccttatacagtagcgcctgttgtgtacaccactccatcccctgctgatgttgcagaaaagtgcgacgttgcagatgcaggaggaagatctgaaatggcaaggaatgtatctgttatacatagaaaaggatatactagtgatgaggagctggaggagctggagtcacctcttacatcgatcatcgacaagttgcccgcgtccccaagtgtaacttcaaatggaaatggtaatggaagacacacggagagcacaggctttgcttccacaaatgaaagatatgagctcctcagtgaggtttggtctgtgtgaatgttggaagagttatttattttacacataaatatatgctgatttctatatcagtttcagcaatgaactgttgagagaatacatagattaattaaagttgtttatattggaaaatgaatagtaccaaatcatgatcatttattacaaagtctttagaagacttaactaaaatgtggtcaggtcacagctttcttgtacatgatatgaatttttgttatcatataaacatttaataagatattacattccactaagtaaatttttacttattgttgtatcatattaagtccaatatttgttgttaagaatgtcacaaccagaaagggcttcaaattttcagatcattgctgataaatgtattctctagtacttgattttgtaaagaagctaatttcttttagggctcgtttggaacgccgtattaggtcgtattgtattgtattgtattatattgaattgtattttatgcaatattttttatgtaaaactatatgtggtattaacttttatggacacctaaatatataatattttagtataaattaaaatttaacatagtattatataaaaatattgtatataatccaattcaatataatacaatacaatacgacctaatacggcgttccaaaccaacctttaatcattgcatttcaaccaaaacaaatagttataataataaatatatcatttgttaattccttagctatgcttttcacatgacagtttaatttatcacaatttaatattggaacagttctcttagaatttgctcaaatttattccaaagcactctcggtctcttagttttattttttgatgcacaagaaaaagagaatgataactaatatgttgtgaaaggatgcacactcatgtagaagatcaaaataataatgcaacaataattggattaaaatggaagaaaaaaaagaaaatgaaattactggtttgagaattgaattatgatggttgaatctttattgatgatgattgtgaatttgagtacagcacatgagcacagctctaaacaactatcaaaatacaagttaagcctcatagtgagactcaaaatcagatacacttgagctcaatgtacaaccctctaaaactaaaattttcaatctcacattagagtagtgaaagaatgggatatttataccctttacattttcaaaagaagttaaggaaacataacagaaaactaactagaggctgagcttgttagaaaattaaatatatcaggatacaaaatttgtaaacacactactacaaaaatgaatttttccgacgtttttaaatattcgtttaaagtattcctgtcggttttaaaccgtcacctatggtatacgacatggtttaaataggcgacagttttaaac

SEQ ID NO: 220382 - DNA, 3540 bp, Cannabis indica
caaagaagattggtgagttagctgaaacagatggaagtagtaaagcggaagtggtgcgtagaggatacttgaggatgtgggttgatgtttgggttgcccatccgattccggcgggattcttcttgaagtctgacggaaaacccgagtcgtgggttcagttcaagtatgaaaaactccccatgttatgttttaactgtggtaagttggctcactgggataagatttgtcatgctcccatgacgatgatcacgccgagatcagggaaggctgttcctctctatggattatggattaaaagcgatacgggcaacagtaactgttttaactcgaaggggaagggagtcctcaaatgggagctagaagagataccggagtgggaattacaagggaggagccggcggggtgtttggaatagaaaaagtgtaaaggcctcaccgggaggggaggtgccgtcagagaaagggaagcagagcggtggtgatacggcggaacccttacgtcagtcgaaaaccatgaaggagaagggacagtcgtacattgctggtacgagtagtgggagtgtggcgcctgcatccagtacgatgattggtacgaggaatctacacgtggctatggagggggaccatgaagtatataatgtcccgggtaatattttgaatttgcctaaccctgattttgctaataatcagcacagagatgatctaatccctgacttgggccctactctagcccaatgcattgatattccccatgaatgggtttgcttgtcccaaaacccacattcctttccagaggcgtgtccaatatcttggcccaatcatgattcagaggcccaaaaggtatttatgcaactatataaacctgactttctaaatttatacaaagcccaacagtctctcctctctattcccccaaacttatctgagatgatcaatcatctaatgggtaataatagaaaaaggaaggcccacactctattacaacccattcctgctatatctactttctcttcctctgagaacctgtcacagcagaaactaacggaaaaaacggaagcaattccccaagaggcgttctgtattggagtgggagatgaagcctcgagctcgagacccaatggccgtggtaggaaatcaaagggtagttctgtgttttcgactcgtagatcttcgggagtcaaaactaggagtgggagaaagaagtgcccggtggatgataatggagcggctccaaccagaagtctggaggaaattttaaacaattgtattgaagttgcgattacttttgaaagggattttggaagaggcgaggaggcggccgaacgcatgcccccaccgtcccaatgaggtgtttatcatggaattgccgcgaacttcgtagacccgcggcggaaagaacccttcggggtttggtgagggagagtaatgcggatttaatctttttatcagaaactaaggtggatgagatttctatgatacaggtagtggttagattgggttttgagaatcattcttgtatcccggcgaaaggtttagcgggaggattttgtgttgcttggaaatcgggaagaggttgttcgatatcgcagatctttgaggcagggttctgtattagaatcatgtctttgggttgctctgaaccatggtttttgttctgtatgtatggcactccatacccggccttaaaaaatgagtactgggattggctgactaatacggttaagggatgcaatgcaaactgggcagtaatgggtgatcttaatgtgattatgaacgctgaggaaaaggagggaggtaaacaatttcatgataaggaaggagagcttcttcgagatttcttatttgatactggaggaattgatttgggatgtgaaggtgggtgtacaacttggcaaaattcaagaaatgctaggggtcgaattcgaaagaggctggacagggtggttgcaaaagcggaatggtgtattgattttcaaaatgcaaaagtagtcaaattccctattctaggttctgatcatgcccctatttgtttgcaaaccttgggagacaaccttaaattgagatatccttttcgattcctggaagtctggacttcgcaccctgattgtgagagagttgtcaaaggggcgtggaatcagagcgagagtctgttggttcgaaaacttgcacgtaccaaatgggagttgaagaaatggaaccaggaggtgttcggattttgtgacaggaaattggtaagcttaagacaccaattgggggaaattcaaagagatattatcactcaggaaaatgtccaaagggaagcggaagtccaattggaaatattggaaatggagggtagaatggataggatttggagacaaaagtctcgggaaaattggattcgatttggcgatgcaaactcaaaatttttccactcttctactatcatcaaccgcagacggaattctatcaacagtgttgaagtttcccctggcgtttggtcgaatgaaagggatgttatcggaggatattttaatgatcatttcctaagtctttttgagtcctcgggtagtaccattggtgtggagtttgagcctttgtttgtggaaaaggttactgaagaggataatgattttatggggcgattgccggaggtcgaagaaataagggaagtggtgttcaagttacatccgttgaaggcgcctggtccagacggcttccctggtatattttatagaaaatactggcatacggtcgggcctcaactctgcactatggttcgagaattctttacgtctggagtcctcgacaaaaagatcaaccatgcttttatttgtctcattcctaagaaagtgcaggcttctgaattcgatcattttcgccccattagtctgtgtaacttcagctataaggttatctctcggattctcacggatcggataaaagtggtaattgatcgattgatttctccttgtcagtccgcttttatgccgggaagatggattgcggaggcttctattatggctcaggaagtgctgcattcgattaaaaataagaaagggaaagttggggctatggcaatcaagaccgacatgagcaaggcgtatgatcggcttgagtgggatttcattagccatgtcctcgaggcaaacggtttcagctctaaggtgtgcaatttgataatgcaatgtattaccacagtcagattttcgattcttctcaatggggcgccattagctcccttcaatcctaaaaggggtattcgtcaaggcgatccgctttcgccatttatttttattctgtgtagtgaggtcttatccaagcttattttgaaggaggaaaggttgggtcagctttcgggggttcgtatagctagaaattctactcccatttcgcatctgttctatgctgatgactcaatatttttttgcaatgctacggttgcaaactcggagaaccttttgaattgtattcgtacctatgaagaatggtctggtcagagagttaacaaacagaaaagcggcctcgtattttctcctaatactccgagaagctgtcgaga

SEQ ID NO: 220383 - DNA, 4460 bp, Cannabis indica
gttaaaaagtattattggtgtttagcatttttttcaatgtaatactattattggtgtaattaagtaaccgatctcatataacttaagaaaataattttttagagaatatcgctaaacaatcgtaaagtgtcatctatcttcaatgtaatattattattagtataattaagtatgtagttaaaaaataatttttagagaatattagtaatcaattgtaaggcatcacttatagatagtgttgggtactattagtgactaatagcaatgttatagattttattacaatagaaaataaattaagatgtatacaattcaattgcaaaaataataaaattccaataaaagtaattgattaagtatatgtcataatacacatatatacacactatatacatgtaatataatatatgtatatatataacaagagaaaaatatatatgtatacacttactgaaaaattttgagtgtagattagtgaggattaccatgaattgaacaaggttttacaccttcgtccaaaagcttatctttcctcatctctaagcacaggaactcttatgaaaatagctttgggaattatcaagtcttttagggttgctagcaaagtattttgttgatagaaacttctcatctcaatgagcacactagattcttttatatagtgtttaggtgatcactcttaaataccacctcatttctcttccataaatgagtattaattcattttgtaacaactatattatcataattttaaattccttaaaccaaattatgtaacaactattttattacattaataaaatgtgtgatcaatacaatagttacaaatgacataaattgtaactcctctccaagttacaacatgtaggttataaaattatatataggttacatattcatttctcatacacttaatatatattattcacataataatatatttatcacattttaatctattataaaataatataacaagcaatgctctttttaaatagatctctttaagggtttttttgtcaattagatttttttaagttagaaattttttttttttgatactttcatgcatgcacccttaaaaatgttgtttcgatgcacttattttagcatttaggatcattttttagtccatttttttttatagtgatgtatgatataattattaatatatcttagaaaaatttaagaaatttaaaataattaataatataaaaagtattgttcaaaaaatatatttcacacgcatataaaatagaagagtcatactacaatagactattttttacatgttaaatttttttgagtttctcaaaaaatttcaacttgtcttaaataattacaacgtacacattaggaagtgcattgtagaattttctttttctttttcatttgtataagtttttgggtgcttctacaatgcacccctttaaaaaaggtacaatgttgcagccctatcagtttcgagattgaggataattttttagtctatttttttatagtcatgtacgttgtaattatttaagctaatctataaaattttaagaaattcgaaataatttgtactatagaaaatattgttcaaatagtatatttcatatacacatataaaataaaagagtcacacgagcaacacattgttgaatcatattttcgacgtgtaaaattttcctgaatgtctcaaaatttacagaatgtcttatataattacaacgtacacgactgtgaaaaaaaatagactaaatacataagtttaattatcagttgtacataaatacttaagtttaattttttacggtaataatacttaaattaaatttttagaacttttgtaagtacctggtcgttaataatctggaccaataagagactatcacgtgatcattgacttgacacttaacggtcggatacctacgaaagtttcataaatataactcagaaattattactgttaaaaattaaacttaggtatttatctgcaactgagaattaaacttaagtatttatgccgcaaattacttttttacattttttttttttgtgggtatttttttaaaaatatctacaatttccttggtacaaaccaagtcgggttgatgtaaagcccaacaagatagccatattgggcctcatacttagcccaattcaagaagaagaaagcctgtacaaattaattaattatttataaaaaatgaattcaaatttcaaattcgcgctccaacggtcatattttctggctagggtttctgaaacgtttctcctcttcatccctaacctcacctcactcaacacacccatatatatatatacccaataccttacattttctactcaatcacactttcccaatacatttctttctgcaaatcattctcagatcacacaatttatcaaaacagcttgttttgaatttaatcgccatggattttcacaccctcaacaggagagagcttcaagctctgtgcaagaagaacaaaatccccgctaatcaaaccaacattgccatggctgatgctctccaagctcttcttccaatggtaatttatctcaatttctccaatcaagtttctttctttttagggtttgggatttttcctctttttttctgatttgttgaaaatgaatattttttttaggttgaaggattagaggagttcttgagtcaacccagatctgatgatgcccaggttgatgaagatttggttcttttgtcaccagatcccaaaacttcttgcagaacctctacaagaacccgaaaaccagtattgccagaacccgaaaccttgcagccagggactcgaactcgacggggaactgttgctactcctgcagctaggagtactcgtggaaaggttccatcttccactgttaaggatcagatttcggtgcagaaaaccgcagcttatagcactaggcgctcggttagaacacttgagaaaaccatggagaatttgactcttgcttctagccgaaagtccaaggatttctctgaagagatggctgatgctgcagagaaaatggatgctgagattgaaaagggtatgtctaaatctaagtttcttgtctaaatatatgttgtgattcagtgggttctataatgatgtttgtctcttacatatttgttaataatctttatcagaagtttcagaaaaaacccaagatttgaatgtgtcaaatgaggtaaaggaagtagctaatgataaggatagtttgtttgagatagaagtgaaggctttggttgaacaatctgatgagactatggatgttgaagttgaggctattgatgaaaagggtaataagattaagcaattaagattagttctgataatcatgtttatgtgtttgtttttggattggagttttgacactaattgtttttcaacagaagtaattgatgccccacttgccaaggaagattcaattgaagctcaagagtcttcatttgatgagtcaaatgatgccaatcgagatttggaatctgagtctgtagttgctgaaattgctgaagtgaagccccacagtatgacactcagtggacctgaaatgcatgtatcagaagaagatttcgatggaaagttcgattttgaatctgtatcagaatctaaagaactatcttctgatgttgaacccgaagaagaggaagaagacgagttgagcgatgaagacagcacagaagaagaagaagaatctgaggaggatgatgaaataactgaaggtgaatcatcagaagaagaagaagcagattccaaagtttctttgtcaacaccatcatcaatggtctcagctgccaaactttctgggcaatttcctcgtccaaccatttcaacaacaccccgaaaatcatcaagcaagaaacaagctgtcattcaaatgattatggaagatgacagtagcagggtatgtgagaatgagattctcaagacaaatgagaatacaactgaagaacagaaaattatcttttatgaagaaaagagtctaaggcaactacagaaaattctcaaagaaaaactaaacaaccaaaagaataaggtatgatgatgatgatgaattgtggctttgttgaattgtacccttatggaatattactattggtgttatttacactagttttcttatgtgtgtttgtagcaagaactagagaagaccacaagagtgccattgcagacaatgacagagaacaacaacatggctgtgggtgaagctcaaaatggattttaaggaatcaaaagattagatctttggggtaatttggattggttaaaccatggttttgcctccttttgcagggtttttgtttctgtattttcttcttgagggatattatcttcaatgtcaacctctctttactatataatattgtgataaagtgatgagcttttcaaatgtgtttgcttgtcaaggatattattataaattcatttttgacatttcaatttggaatgatattacctatattacat

SEQ ID NO: 220384 - DNA, 1128 bp, Cannabis indica
tcgataatgaagacaaaatatatctacgacacttacgtcttggtcatataggctatgatagacttcacaggttaaccaaaggtagtccattaaaaaatgtcactttaggtgaattaccagtttgccagtcttgcctagaaataaaaatgacaaaatattctttctctacaaagggagagtgtgccaaagaaccactaggaatagtgcattcagatctttgtaaatgtcgtatttgccctaggtagagtttaactaattcacaaatgtatccacgactgaaatcatcggcacgtgtcaacggtcagtattgggaaagatagcaagctcctgcgatttaaagagtctcaaaagcttaagggtaaatgttatccaagttttcatgcataagacatgtggcacgattggagggaaaaatatagcagcggcaaagattagtcaaaattacctatgagtcaaggaatgtctctcagacctggaagcaggcccggccctaggcataggcgggctaggcctgtgcctagggcccacccaacccaggggcccaaagtttttttttctcttttaaaattatacagtttttttaccgattttgaaaaataccacattttttctaacataagggcccaaatttttttttccctatggcccactttgtttcagggttcggccctccctggaaggtagttgggacagatgactctcgagcggaacttccattagtgataaagttggagcgcgatagcagtcttgtagatgatggacatgttagcgttatacaagagttgctcaatagacagttacacctttatttgacacaggatcagatcttgtccctcgtgtcaggccatggtagtgcgcgtacgcacctttggacatgcttttttcccgcccaacagcctggttggagagtattttacaaaagagagacctttgcatgacacgtgtcctggttttgtacgaaaaccctcattgcaagttgtacgccacacgatggagaaggttcttataagccaatggtcaggtcatcttttagcagtaccggccttagcagcatgtggggtatgaaaccctaggtaggtaaagggtatgtgccctttaccgcatgtgtgcctataaatactcctattt

SEQ ID NO: 220385 - DNA, 1478 bp, Cannabis indica
aattcccgtaaaaatacaaaaaagaaaaactacttaaagcgtaaaatgattttttttttaagttcatggcgtcttctaagtactgtctagttaagaaaacacattatgtatccaaattgagggttcttcattgcaagtcgtatttatgcacagaatctcagtgactaccttccctatagactttcatggttttggcaagtacagttccatccatgcatttccatttctactaatcttttaaaatttagattgacttttaaccaaaatttgacattcatagaacataagatacaattaacaacactcagagaactactactcacttacatttcaaagagaagccaaatcaccatggtcaaatgctctaagacctgctacttccccgtcttccacggctagaaattgctggtcttgcttctttctgcaacattcaaaaacacttaatgaggatcttcaataggcaaaatgatgacaacgaataaataaactcgataggaattctgagaacaagaggtttggcctcttggtttttgattacctgaaatgggggtctagtagctcttctaagtttcctcctcatgaaaatcttcatattctccttctttttctcctctgctttcatctttgtgaggctaggtttgtaaagaataactgttctaccaatattactaataactaccgaaccagttagctcctccaattgcttcactgcatcatctagctccccgggacatgtcctgtgtattttaatctgttgacaacattttcattgcagctttaagttagctggacaagcaaatcaaagtcttcacttaaaaatttaaactaacaattcgagaatctaataatttggtctatttaaacttcaaggaatgaaagttctaactaatacaatacaggttgcatttttccaattacagcagtaaaagaactaccaacataagccatacaagcttatcttatattttaagttgaagaagatgttaattagaactaataacataatttcatattcacaactattagtcaaagtatctattaattgttaataacaactaattacattaactataggatgacccattaaatcatagtctaacattactaatgtgatgagaccaatataaccttcaggctaaagggcgtgtcatcgtacatatagtgtggatgtaggaattgggtgttctgtgggattgtgaaatatgttctctcttgcatctttgtatttgatatcttgtgtgttcttgttgtttcggattgcacatcgtttggagaaggtcaagtgtgatgattctaagactgtgtatgtaggtatgggactacacacttgaagagggtttaaatgaattgattagtactacttatatcaacaaggtgcattttgtttttcggtagtccatcacgaaagaactctacgattaagcatgcttagccttggcctgggataattttagaatggatgacctcctggaaagttt

SEQ ID NO: 220386 - DNA, 3219 bp, Cannabis indica
agagattcgactctttcgatatcgaatctcgtacctatttaggtcacggaagccatggcggctccaaggtacatgataattattttctcttcttctttttatttcgatattttactattaaatattaaaaataataatttatttttgttcgatgaatatgattatgaattaggttatgaaatggtcaacgatattacacttagcatttcaaagcattggaattgtttatggtgatattggaacatcaccattgtatgtgtatgcaagtacatttccaaatgggatcaaacatgaagatgatattttgggtgctttttcaattatcttttatacaatcacattaagcactttggttaagtatgtcttcatcgttttaagggcaactgacaatggtgatggtatgtatatatattatttatatttaaatttatatgtatatattctccattttattcattaattttctctaaccctaattaactacattgtataaaatattaccttattaatttctatattatatgtttagatatatttggattacatatcaatgtgtacgaatcagaaattaattagtttaatatgattgatgcgtatgcatatatgtataattatggtatatatgtttagtttggaagaatgaaaacccaataataatgagaactataaaaacacgaataaaaatagaatagaaaatatttaaattgtataataattaataaaaaaattgaacggtcttccttttattttcaacatggaatagttattgtattaaaataatggaaaaagggttaccgagaatattaaaagagcattgttattgggtgccagtactttttataagtgatgcatttagttataccagtattgtattttagcatttttcatattaaaatgacattctaatattttaaaattaatacaactttagtgtttccattgttttaagtgttaaaagtaaattaattaggttttcaatattggtatatttaacttctaatttggagattaattctttttctgttactattttaaatagacatttgggttttatcttatgtatgattaattgttgtaatgtatgtaggagggacatttgcattgtattctctaatatgtcgatatgctaaggttggattgaccccaagtgagcaagctgaggacaccaacatctcaaattttaagcttgagttgcccactaaacgcatgaaactagcaacatgggttaaatctcgtctagagaaaagcgacatctccaaatacttcctattaattgtcacctttcttggaacttccatgttgattggcgacggtatcttcactccatgcatttcaggtaccgagatataaatacaacagcttaatttgactcattccattcagtactcaaccaaattccatggtggggaagggacaaagtaccttgcccaaaaccttacaaataagcagggccaacagtgtgtattttatctaaagtaaaatgtgagtattattgagtttctttttacaaaaatgtaaaaaagtatactatataaaaattttgggccctgagtttgagtgggttctaggcacaggaatagcccgccttagcccaggatcgggcctggaaataagttagatttgacttgcctgcactttacctttgttaacccttaaaaataatctttttgtgactaaatttgacttttagtcacaacaaaaaatcacttgtgattagttaaaacatagtatttagatataagttgtcacggatttaattttagtcacaacaaattgtaattttactacaacataagaatgatgatttataattagtcacaattttttcacttttagtcacaaattttatcgtgactaaaagtaaaattttttataatgcctttagaaataaggcgggtttgacttgcttgcattttacccttgttaaccgaggcaaggttacttagttgagagacgaccttgactcccaatattttttttcctttttaagtatataaaaattcaaaaataataattatccaaatatagatgaaaattaattaattggtataatacaacacactaatcaagattaaattcaccttttgttaatggcagttttatcagctgttggaggtattaaggaagctgcacctagtatgacacaaggtaattaagtaaatataatatcattataatctcaattaatcatatatagtaggattaattgattcaatcattttttttgtttcttaacagataaaattgtttggttctcagtagcaatcttaattatgctatttatggttcaaagatttggaactgacaaagtgggttacacattttctccattactcttactatggtttgcacttattagtagcattggactctataatttcatcaagtttgattggacagtcatcagagccattaatccagcttacatagtagcttatttcatcagaaacaaaaaagatgcttggctatctctttgtggcacagtactatccattacaggtacatatattcaaaattataataattattaaaaaacttataaaaataaaatagattatattatattataatttcttagtcaaattttgttaccctacccagacttagactggaacctggcccaaatcggacgcgaaccaggatgcgaacctcgaagcccgacccagacccagaccctaatccaggacctagctcggttctggggtccgagcctgaggtaaagattcgggtttaggttcgagtacgggtttgggtttgggccaggtctgggttcgggtttgggtccagagttcaataggttaacatcatggtatggtgtacaatattattttttaaaaataatctaaaaatagttttaaaaaactcaacccaaacaccattaaatttttaaaataataaaaaacaattttttattctcacttttaaaaacacaattctgaaaactaaaaactaaaaaacacaaccaaacaacctcttaaaatgtcgaaaacagatttaaacttttttaatatagtgtgataaattaaaatatcaagaactttgttttcattactttaaactatttagaatttttaaaaaatttagaggattgatataaaaaaatacaattgaaaagatatattctaccatgtattttttgacacaaaaattaactaaaaaattgtaataaaacctttaacagttctaacaatagaaccatttaatacaatattttaccat

SEQ ID NO: 220387 - DNA, 2366 bp, Cannabis indica
atctgtacattgattatcaaaaaaactcctttgcacaaaaaacttcttttgcaaattagcccccacgaccaaaaataaactcaaaaaataaaatggcgaaccttggttgcagaagatcagtaaacgtcagattgagtagagatagcgcaaagaaataaacgataccactcagttcgacaccgaaaaacaaagaacgtccctatatatttcatggtcgttgtgcactgaaaaactagactcttttcaatgtaatttaaatatagtagtagtactattttatgttttttaaattagaagaagaaaaataaaagtgaagaaaattaacatcacgggtggtgtggtaatggttggaattcagaattgagattttttatatttgagtaacttttaaatttattttcaaaatttatgagtttgtagtataataaacttccatttttaataaattgtatttaaagaaatatctatcaaacacatttaagttactcacttttttttttttggacgcaaattactcactttttttaaaaatgtgacttatatagacattttgattaactatacatatatatatatatatatataaaagttaccaaaaaatttaaaatcattacaaataatgtatatttttggtaccatttgattataatgtggataagatatcaatcagttatcattatataaaatgatccattttaaataaatatctaatatactaaccttcaaattttagattagttacttttaaaattatatgttcatttttagacttgtttaagacactttttgttttgaccaaataattacgcagtttaattatgtcttccaatgaaaattgtaagagcataaccgaaacaataaccagttacataaaaagattgtgacttcaaactgaaccaaaatctcataaaattgtacttcatttgcaaatggaaacaaaattgaaattcgtaatgagaaatactacaaaactagcttagatgattccaattttgttagctacgtccagagcatcatagtctggggtcaatctaacgtaagccttcttggtgccatcaggcctaatcaatgtattcactttcttagtctgaatgtcatacatcttctttactacatccttggtcttcttattgtcagcacgaatgtaaaaaatgaaaaccaaagtgttgtagtcctcaatctttttcattacagattcagtggtaagaggatgttgagaatctgataatgatcaagcttgttccttgaaggagcactaatacgaggatacttgggattcctttccttcttaaatgttcttgggcgatggaaggtaactgaagttcggatcttcttaactttcttcttaatagtcggccctgatttcactgcttttgcagccttcaaggcttgggcctttggatcagctttcttcgaggagaaatgctaaagggcatcagtggtgcctagcaccctcctatgtgtcaatatcgctattggtccaactaagtattgggtcccatataatttaatataatagcttttaaggagtatagctagctaattgcaacgcgacatgttgcaaaggtgctaggcaccactggtgcctaatagcaatgctcttcttcgagacatcagctttaggagccattaaaagccgaaacctttctgactaataaatatgaaaccctgtggggcaactttttacattactttttttagcaacaacagttatgctacttttgatcttatttaagacactaatttgttataataaagtaaaataaatctcttaacttattaggaaaaattatagacatctaaataattacaacttaattattttaaagttatattatggtatcttaatattatttaagttatattttttgtatcattagtttattgtagaactaattagttatcatatggtaagtggtaacgcaatccaattaatcaaattctaaaataaaattgaatttttattccttataactaaactaaaaacattatacaatggtaactcatcactatatcatttgtaccatgagcaactttatatttttttttttattcctgaaacatcgaaaaatacatatactttccatatcttaaaataatcacattgaaaaataaattataatggtaccatttttaacctcaaccgagttgcagtgttaccgaaaatatttttttgaagtttgagataagaaagaaaaagataaagagagagataaagaaactcaacaagaaaagaaaagaatgagaaaaattaagggaaatgtaggtggctggactcttaatgggtaatacccacgagtaatgttagaaaattttgagtttttatgattaattttctatttaattagaaaattttctcattttta

SEQ ID NO: 220388 - DNA, 3940 bp, Cannabis indica
gaaaaagatttgattttaggctctgttgtgattcttgactctttgagtcacaaagagcacgaagaacatagttgagctcttgaaaaacacacactttgatttgtaacacaccttgaccggtcataggggtcttgttgaagacctggcttgccatggggccttctcatgggagctggttgaccatagggatgtaccttaaagtctggccaacctatgcctgggcttggggtccctggccagcccttggctgggtcatggaaccctggccggcattctctaagcttgggaaccttgggcggtcaaggcctaggttccaagcgagcggccaagtttttgtcctcttttgacctcgacaagggtttttttaagggcttgtaggcatatacaactaaaacgtcataggtgattcccttggaaactctgtataagacttaatggtgagtctattatagtctaatgtacaacttaacactccccatttgcttaagttggtatacttgagacggtacttcactgatacccaaccttgtatgagtaatttttttggcaagtaccgttgggtatggactgaccagagttttgtctataccttatcactttgttaggtttctaacctccccttgtctcttctatgcatgtgatttcgagtatcggtctggggatgtgacaaccgtgtggtcacaggttcagtaagtcttgcctttgtgggctagaatctagttctctagaaattttcgaagtggcctagaccacctgttctggtgacactgcaggaccttctcttcctactcctaagcatgcactagctgggcagcctatgaatgtttaccctctcggccttcgggcaagggcgcctagaggcccagccgaggggcaaatttggccatggggtaaagagccatgaaggcagttcgtgggcgtattgatagagtctgcccccaatcaatgatgagtggagctcggtgatggtgagctagatatgctatcatctagcggtctccaagacttggcctcggtaagttgcacatcaaacttttctcactttttagtatttttaaaagctggctggccataaggagcagttgtgcaaggcatgatggctagtgcagtgttgttaagaggctaaccggccctagtagcaccatagaggggctagccgaccagcgttgtcttctggcattaattttgactttgttttgtttttaagcctttctaaagtttagcctttttaaagtttagtctttcacacaacaatcgtgttgtcaaccagtcgaggggtaaccggtgcgcttgttggtccctcgacgacacctcacactggtcgcctctcaccagtccactttctcttatcttgttaagagtctcgacactgacaacagatggaggaaagacccaacgatctccctacgctcctgattgagaatctagggctcaacaacgtgtattagaacatggtctacaccgatcagcaaaggcttgccaagcctattcaagggctgcctgtcaccatcatatgagcctagagggttgttggagaaaatagaacaggtcttgtactgcctcttcctagtaggaatagcctcctcaaccttggacatgttgtccaggctctaaacaccatggtcgaccacaggcacctctgcttggccaacctctaaatttagaggtaggttagtagcttattctaagcgttaaaatttctatacataagttctctatgctagttcgatgcattttacggtgtgggtgctccccaagtgaacacgcagacttacggcctcttagtcacttgtaattcaccaaggttcatagaccttgctggggaattttcttagggtgctacctattgtacgcatgtggagctagaaaaagaataactttgaaaagttaatcaatagcaagtggttgagacacaataatttgaacataaacattgttatttattcattaatttctctgtgctagttctctctctatatatgttttttgtgctagttcatgcattgtacggtgtgggtgtccccaaagtgaacacgcagacttacgatctcttggtcacttgtaattcaccaggtttcatagaccttgcctgagaattttcttggggtgctacctattgtacgcatgtggaactggaaaaagaataactttgagaagttaatcttattagcaagtgatttagacacaataatttgaacataaacattgttatttttttattaatgggtcttcgttgttgtacaacttacacaaattgaatctaaaagcttacataacaaagttttgcttctagatatcaggtggctacccatggttgagttgcatagtagaggcgaccattgaagaacagtgggagtccacgccaaaaaggtcgtgggtactagctcttttacactctagtgttgagtaggtagaactactactttagagtagcgttttgtaagctggttactgatagtatttttaaaggtgttctccattccagtatcttggtaggagaatgagcttcataattttgttgtaccttcccagcttgtaggctcccttacaagttatttttgtaaattgatagggccattccctgttgggtccgaacactcttgttgctggatctttggtgttgaggaacactcttcagaggactaggtctcctacaaaaaatttcctatccttgacttgcttattgaagtgccttcctacgttttgttggtaggcctataactttatgttggcttgatctcttctttcttctccttcgtcaaaggtttctgccagcaggatgttgtttgtatcttagtaggttgttctcctgtgagacggtgacaccatatctacaggtaaaatcgcttcatagccataagctagagcaaatggagtttgcctagtggttgtcttctcagtagtcttatgcgaccatagggcctctaggagcaattcaggccaattaccttttgcttcctcaaggcacttctttagggtgttcttaagggttttgttgacagcttctacatgcccgtttgcttgaggatgggccacgacagagaagcttttgatgatgtcatgtctgttgcagaaagcagtgaacatgttactgtcaaactgttttccattgtctaacacaatctttttacggaagtctgaatcgacataagatattcttgacaacaaagtcaatgacttatttggaggtgattgttgccaagggttcaattcttcccacttggtgaagtagtctactagaactacattaaactgtacatgtccttttcccttttggagttgaccaattaggtctattccccacactttgaagggccaaggagactacatcatcgtgagctcattacgtggagctcttggaatttttgagaacgtctagcacttgtcatatctttttcacgtattccattgagccctagatcattattggccaaaagtaccctagtcagagtatctttttggataggctttgtcccagcatggttgtcgcagaagccctcatggacttctatcattagccacttggcttcagccttagtcacacaccttaagagcagcatggagaagctctatctatatattactctgtctaagattagatacctatcaacgcttttcttcttatctttttcgcttcattcttgccttctgacaaggctctggtttgggggtaagctgcaataggtgtcatccatgttggagtatcatccaacatgtcaacttcttctaagatggtaatgttgggttcctctagaaactgtattagcaccaggtttgccttgtcattaatggtgctgcttgcaagacaggcaagtgcatatgttgtagcattatgttctctggggatctgcataattgtgtagcctttgagctaacttagtaagtctttaattttgctcaagcaggccaccatattttcacctcaagctgtgtattcacc

SEQ ID NO: 220389 - DNA, 3692 bp, Cannabis indica
atctctataaatctcaacaccaagaaaataatggacaggtcctaagtctttgagagagaaggcagcattgagattggtaataatagagtttatgagggaagagtttggacctgtaatgagaatgtcatctacataaacaagtagatagataagagtatcacgagaaccatgaatgaatagagaagcatcaaacttggatgcataaaaaccccatttataaagagtttgtttcaacttatcattccatgctcctggggcttgcttaaggccgtagattgctttgtgtaagagacacacatggtgaggcttgtctttgtcaatgaaccctggaggttgctgcatgtacacagtctcttgaagagtaccattaagaaatgcattactcacatccaactgttttactaaccatctttgagtgactgcaatgctcaacacaatccgaactgtggctggtttaaccatagtacttaatgtgtcttcatagtctattccaggagtttgaagataccctttagccaccaacctagaattgtacctgtccaaggagccatctctgtttagtttgacccgatgaatccgtttgttgctaagaatattcatgtgaggttcaagaggaacaagggtccaagttccttgtttcttgagagcagtaaactcaacattcatggatgcaaatcagtgagggttgttaagagcagcttttaaagctttaggctcagtgggtaaaagagattctggaagtgggtgtttagtggccatataagctttgggtttgtgtataccattttgagatcgtgtgatcgtaggatgaattcttgtggtagagggagcaggctgttgagtaggaggttgtaatatggggggagatgatactgcttgtggtgttatatgagtgctggtttgctgatataaggtcgtatctggtggtaatgtgggaaggttggttggattaggcaaatggtcatcaggtatagcatgagcagtggtagtagaaggcctttgcatatcgggtaataaagcagctggagtatggctatcatggttctcattattgtgtgacatatcatagtgaggatgtgacatatcatgggtgttgggaacactagtagcagcaggtacagtggcagcaacaggctgtgaagtgtcattttctgtcctttgtgtggcagaccgtggtccaccagtagtatctttagcagcattggtgtgaccattggtaaaactaatgttagtaaatgtattaggctgagtattaaaggatgagaaagtaaacacagagttaggatcagtggacaatgcctgttgctttgttgctgaagtggatacaggggcagtcttgtgagggtaaaagtcctcattgaataccacatttctggcaacatatatccttccttcattatttttcacataggtatcctttgtgatgagaggaatagcccaggaaaatgcattggtgagttctgaaatccaacttgtgcttattatatggtcttaaatgaggaaagcaagcacatccaaatggctttagaatgttgtaatcaggctttgtgtgaaacaaagtttcatagggagtagcaaaatcaagaactcttgtaggaagtctatttattgtaaaaacagctgaactaaaagcatgccaccaataggagagatcaatgccaacattagccaaaagagtaagaccagtttcattaatatgtcaaggttttcgttcagcacgaccattttgctcatgagtgtgtggacatgggttttgaaaatgaattccttggtcaagtaagaatcttttaaatggcctgtattccccaccccattcggcttgaacagccttgattgggagattgaattgcttctcaactaaagccttccacttaataaaaacatcaaatgcttgtcctttgagagtaagtggaaatatccatgtatacctgctgtagtcatccaagaaatggacatagtacttgtatccatctttggaaagaacatgggagggcccccacaagtcaatgtgaatcaaggcaagaggttgagaagctcgggtattggatggaggaaagggaagagagtgactttttgcctgttgacaagcattacaaaaatgcagatcttttatagtgccagtgtgggaaatatggggtaataatttgctcatgacttgatcattgggatgaccaagtttacaatgccaagtattgatatgtttactaactgtagagtgaaaaagagaggagctactagacacataagtggaatcattagcctttttattaatatcatttgaagtacaaggatggattacatcagtgtttgaggaactataagcagaaaacagttcacatagtaaggcttgtcttggttttgaagttgattcatctccaagcatgtaaagtccatctctaactttcccccgaagtagaacctagccagtatccttgtccttgacaaaacaccaatgtttgtgaaattcaagaaaaacattgttgtctacagttagtttagaaacactcacaagatttttagtaatagatgggacttgaataacagagtttaaattcaacggacagctatgagaagatggtaaagaggctgaaccaatatgagaaatcaagagtttcttaccatctccaatggctaaagtatcatggtctgagtaagggattgctgaatccatgttattgagagatgatgtaacatgatctgtagcttcggtatcagcaaaccagacagaatcatcaccaaaatcaggcagaacagtggtggatggctgctgcaattcttgatccgattcatgttcagcaagaaaggctcttggggcagaggtgggattctttggggtaacccaatttttatcaaatctgtaatgacacacaacagccgtgtgcccagatttcaaacatacttgatagatgagacgagaggtaggaaaatacctgccattaccacgaccttgagggcgagtctgagaatcaatattggagttacggccaggaggttgataaggttttgaggagccagattgagagttgttgtatgcaagattggcttgcatcttaagagttagatctgtgatggagttgtggtgttcaagtctgctctcatgagcaagaagcaaagcttgaacttcctcaagacagagttgatcacttcttgaggtgattccagatacaactgaatcgtaatcaggacccaggccattgagaattttcaagataatatcttgttcatcaagagatgaaccagcaactccaaggggatcagtaatggactgcactttgtcaaaatagtcagatattgataaagaaccctttcgaatgttagagaactgacctttgagttgtagcaatcgtgcccttgattgactagagaatcattgttttaatgcacgccaaacggaataggaactggtaaattgagcaatggatccaagaacccctttggtcatggaggcacgaagccaggagaggagaagttgatcacgacgtttccattgctgatgcgctgggtttggggcacccgtaacaagattctatggagggggaacaccggcaaacagaatatcgtctagttcatgaccgattacggtgggcacaacctgagatttccaggcaagaaagttggtacggtcaagcttaagggtgagagaagcagggagggaattggagaaaggattccattgtgatgggtgggtattc

SEQ ID NO: 220390 - DNA, 6702 bp, Cannabis indica
ggaatccttgtcgattcttctcccgttccttttattttgggcatctcatactaagactcaaaactaacccaatctctatatcgtcactgaacacaaaaaaatattagaatttttgaaggcgtcacatcacaagtgagaaatggttcttagccaacggtgactagctcaatgagcacctttgagggatactttctttcgctacggctctggtgggttcctttaactaagccactgcctatgagtcgccggctcattcttcaacaagcacgcggtcagagccctaggctcctcccactgcttgagagcttacggtttcatgttctatttcactctctgatggggttcttttcacggtgggggcttccattcaccagcgtagactaaaaatgctctccaaaccgtgctggatagtcacccatcacacgactctcaaacccaacctatggtgaatcccgggggacaaagtcaaagcgcttgatcgtttgccccatactttgagatgctcctcgtcgatcaagcagcgacgctgctcgtgataggcttagctttaagccgctatcgttcggttcgaataagtaaagtctgtcattgagagcaaatggtttacctgccaatcaatagttacccggccaccacgtaggcaccttctttaggctgtgggctttctgtctctttctcgcctggcgagaattaggcttggcttggttagtagtgcacgcccattctgcctcgctcggcctgtcggcccgctctgaagaattcatgggccaacaggttgggcggacgaggaccgtcgaagaagtgccttgacgcgccgcaaccactacttcttctccttctatgcaattatgaactctggcttctttcgtttggtagggcgaagaaaggctactttaatctaggaaacagtcggaaactcgagagggtcgcctttggaagcatttgccggtaaccaaagcgtcactccttccttttgattatgtcgtgactctgattgaatccaatccataaacccaaaaacaaagttcgtttcctttcgtcaagtaggcatatgaaccacttttgctttgttttagactctactggaacaaagaaagaagggggcagaatggagaaaggaaagggacaagggaagatccatttcttttcttcttcaattgatcatagcccactaggtgtgaacctcacccttgataaacaaaataaagaggtacttgaacagagggctgtggaaggccaggccagcagaactggcatctgtttgctggattgatagcagtgtgagggtggttatagattagagctcagaagagcccggaaagtttctttcgtcaaattcacctctcccatgcccaatctttacattagtggacggacaccgcccaatcctagaatcccgtctcttttttggatttaaaattgcacgggaacttccaactaagacgaaaaaaaatcgaattattcatctaattttctttatagaattgggagaagctcattcgaaactagaaacgctttatttcgttttgttctcgttcttcagttccttcttctcacatccaagaggggaacttctcatatttagaatctttcttcggtgtgttcagttttactattctttcgtactctcttatatttagcacgcgataggtcagcgaagcgtgagcgggcgcggagaaggaaaggccaaacactttggcctaacgggaatgagcaacgacgatggatggtctatggacaattggcccttgaagtaccttgggatgcctctgggtggttcctaaaataagatagagttttggagacctgtcttagacaaatgtgccaagaggctagatggatggaaatgctcttttttgtcgagagggggaagattgactttgatacaataacacaccacaggcactaaccccctgacattagtcagccacataggggtctaacaattctattgaggttatcgtttctattatcttgacttcacttgcaattcagtacccaataccacagcattcccaacagattctgcaaataaaacaacatttactttttcacttaaattatgagtctataattttagctttgtgacatataagagcacttcctattcttaataatatatcttaggaaatagacttgagctaagtgtctttacggtccttcctaacaatggtctatgatcttaaatttctcgtttagtattcacaattacattatttagtcacttttttttttccttgtcatgccaccatctcagattaagtacctctggcttctttttgatctggctgtgggtccagataaccttgttgaaaatgggccatacaagtaagtgttttgaactcttaagcgttatgcttgatggaaagtttaatcaatgaagatgaactgtatttacgatagtttgtttggctgcatgctaaaataatatcttctatacaggtatgtgtttagcactgaaggccacatattgccatcaaccccacaaatatctcttgtgcatgaacattgttcgtattttggtgcgtattgtagaagtggcaacgtcaatcaggaagatcataaatcagatattgctagcaatcttcaagaaactaatgacagtaggtcatttggtagctggtctgattatggatttccatcagaaagcacttctgattcatctcctttatctggatttgtcaaggttagtatttaatttctatcttttaggaaatttttaacttctttccttaatgcgagttttttatgaatatgaaaatatacttttaccaaatttatttattatcagaattacttacatgtgaggctctacatttaaactagtttaatttttaaagattgtatttaatgattgaatgctctgatttattacaagggggaaaaagtgtccccaaaatccatgtgcagcattaaattattggttttttttttcctaatggaaaatatcttctccacatggcagggaatttgccctggactaactcatgggcagaaatttggaatatcatatgtcatgtcagcagatatacaacatactaagcctacaaataatagagatagagaaccaacggtttctcaaagtcattcagttaatattcctggcgaaaattctaattatttacagtcagtaaacaagcaaaatcatgaaaatgttgagacattggatgaggggggaagttctaagaattattcccccgaagaatgacaaaggtgtctatgtccatagaaccttctcaaattttggtgaatggttggaaggaagcttggacgaattcgggtttcggcccatttatgaattcttccttcacaaagatcattggtaattgcagaagtgtaagacatttataccggcagaagcctgaataaccgtccgatgttctctgcatgtaacttttggtcataggttataatgattgatttaagataaggtaaggtggtggatctagagtttatacatatggaaagggaagaaaaggggcctgcctggcaaatcttctatagctggatttactgccccacttaactggaacactgctcttgtaacttgcaactatagctcagcaacattgaatctacatttattttccccttttcagagatggaatgtggggtcatcatatcagattttttgaacaattacaagaaatcatgaagaacagtcaaatgtttgcttaatcagggattttgtttttgtttgtttgtttcatttcttggccctagtgaaaacttgtacaggtgcctgaaatatattatgttactaaccaaagaaataaaaaaaaaaacaaagaaaagaactgctccctctctctataattatttttattgtttatttacttgtattcataaacatcaaatttgattgaagatgtattgatgtttgcctaaattttttgaaagaaaattgttatgtggcatctcttttttcattgaatttctgtgactagttcctcactttgatggccctaatcacatccaattacctttgaacaatgtttaagaactaagaattcatgcagaaattattttatagaatgtgaaatgaattataacatttactaatatataggaacaagaaagagaagagaataaaattataagcacatacaattgcttgttctttaatcgtagaatagatgcatggtatctcttaggagtcgtaataattttattcagttatattagttgtcattatatacctaatgacacaatattgtacaagtcttgatctatcaaagagagcttagacttaattatacatctttaatatatttccatgggttaattaatggttcaatcatatcttgacttctttaacgaaatcccaagttagtggaatcaaacatattgtcaagcctttctcacatttgtacaaattatattcatactacatagatcttatggttaatattcacatggttttacacataattctctattccaagttttctaagtacatttgtttgttacactaattaaatcaatagacttggagattcgcatgcaattaaataagtggtttcatatgaaacaaagaccttgtaactacttttctggtagttaataagataatacatagatatattcgtaaggaccaccacaacatgtggtgtgtcctcctcgggaaacaattttaaatctaaagttgtggtatgcctcgatgccaagttgctatatcaatctagcttgtaaatttatttatttatttattattattattattattattattattattattattattattattaagtgattggtagagttcaatcatcaacttcctacaacattaaaaatgagtagtacttcctatctccaattattttgaaaatataatagggtaagtagggtttattcctttaaaatataaccatgttaaatttcgccccaacttataataaccattgtgaatgtactttgtcttttgcattccatttatttttgttctaacatttttctttttgtttttctttttttgtaaaaaaataccctaggaaatatcaccaaagagcatagagcttaaagaaactgctagctaagagatatcatttgataacatgagcgatgataatgtttttaatacaagaaggatatctgttatggggcaccaaactattttaattattgttgaaaaagtaaacttagcaaaagtatcaacaacaacgtttataattatggggtaaaaattaaaatttcacacattgaaagaattacaagaagctttaatatcagagatgaataatcccaaagacgagtctaacatctacaaattattatcttctctcaatcaagcttttgcagtcggattcaaattgaacattgtgaaatccaaaaagagtgtactaaataatggcatggcgtaaaacaagagcttcagccgtttcgggatgaaaagtaccttccatcttccaaacacccgaagctataactacaccatggaagtcccaagccaccatacccaatccacgagagccatgcatgagatcgatagccgcatcaacagtgttcactttaatcaccccctcgggaaaggcatggactatatgggtttcaacaaaggaacacaacacttgataggactccaaaaagccagatgcgcacaacccaattagctccagcggaatggtggattttttgttaatcttcttgttccgtctaaaccaaatgcgccaccatgtagtgagaatgagttcaacactttatttatccaatccaacattaaaagaggggatacaatttcatgatcgatatattttcaacttaaatacactagaattaatgatattatatttttagttctacaatactatcagtaaaagcaaatctagataattaagatgagagagacataattgtgcaattaaaatttcataacatttttattataaagatgttataaatgttttgtataaaaaaatataaatgtagctatttgactaacaaataaatagtctctaagaatgttttattatatattaatagcattttacatactttatgtaatattttttaaataattatcatgtagactcaagcctgtctaagctaattgagagtcttatgcaaaaaacttttataattgagttttttatatgaaagtttttatgtttttttatatatagtggtaaaaatttaaaatataatattttaaaaatgtaattaagtattttttcttaataagatattaaatatatgatcgtcaccgtaatatatcttaataccaaaaatagtgagcgtttgcccttttttttggtgttttgtgacagttatgtttctttttggagttttaactgtattatcaagttattaagtagtttcccataacagttcttcaagccttcttcttcttcttccccttaacttctgcacttagctgctccctccaatccataacccagttctgccgtgcttgctcttcctcaccataccatggaccctttcaacaataaaatgaaggataagatcacacttacagatgaggaacaaatcgtttttgaatttgattttggagattcaattgacactaaattggtgattgatcgcgttgtgtatgcacgtattttaactactaaaaaagtatggctttcaacactgcatcgataaatgactgaacattgaaatggtagattttcaatgacaatttctgtggatgaagatatgttcatgctcacttttagggtgaaggagacaagtaaagag

SEQ ID NO: 220391 - DNA, 10191 bp, Cannabis indica
agaaagtagaaaacttgtatgaaaataacattaggtggaaagccatccatgtgaggtgcaatgaagtaaaatgatcatgataatgttggattggactggtcaatccatgtttattattgatcaactaacccctctttatttttatattttaaggtacgtaattaattgctaaacttaaaaataaatgcagctagctacaccctacaaaaaccgatgaaatattaattcaaatttgaaagcaaaagtacttatatttatatttataggatcattaaattcatcattgcttgccttgtcatgtatttaatttaccaaagttgtatcgatcattatatattatatgcatctcttctattaatttactccctaataatgacagcatatatcttggtgaagaagttaattaaactatatatagtcattaacactcactgacttttttttgtgtgtaatttgtttttaatttattattaggttataattctgttgcagtagaaatttccaaccttacatatggtgtttattagttttctaggctcttctctttgggtatataaaaaagaaaagaaaagaaaaagaaataaagaggttgtgtgtgtcccagtcacaatactattatatactaaaaaacaaaacataatctgattctgatatatgaaacgctactcaacattatcatcttaattactcacacacacacacacactgccccatttttatttttatttatttgtaaatattatagagatatatatggctgtttggtaattaagactctacaatatatacagatctgtagtctgtactactactactactccatatcactattctttttcttttggcatttccatagaaaaaggttgtatagtctgttctctctctttctctcaaaaatatgaaattaattaaattgaaacacttcacttacaaacaatcaagtgatcctagcttcagctcagggggtttattgataaacatctaactatgtacagcattgttattagaaattagtagtaattaatatttttaaacataattattttacaattagctaataatattttttaaaatttattatattaaattatataaatttgatagtaatacaaagaaaagtggtaaacaccggtccctattaacatttctggtttatatattatatgagagtaagagcagtagtacgttttagtacttttggctttaaacaataaacatcactttcacttgcctactaatattgtatggtatggtatagtattgtatattagtatagtatgtttccttatttccatatcatgtgtcatcattctttcttttaacttttcttctttccatttttttttaagaaaataaaataataataataataataataataataattaagtagacgcggtgacctgtcatgtaatgtttcatcattagttttagaccacctcaagggggctcctactattaatttcacagcaataatggtgtatgccattttgtagatctctatttcaaataaaatctcaaaaaactttaaacataattacaataataataataataataatgttgtaattttggccacatgttaacaaaatgtcaatcctaagatttattactcgagctaaaccaaaggttatttagagtatttttaatagtggtattttttaaaagtgttaaattttttttacattatttaaaaatataatatttcattgtatgtctcttttatattgtttttaatatttttatttctaaaaatactctaaatatatataataatataataccctttaaaaatactataattatgatctcataccttattatttaatatattattcgttttaattataaatattattacactatttatttacctttaattttttattttttaaaaaagagatagcatcaataacatatagtgacatcaaacacaatttttttatgatagtaccaattaatatctaatggtataatattcttatgttttgccaaatacacattccacataaataagcatctttcaaaatttaacccttggagatactcttatagccaagttttaaagtcatttgtaacacaattctaaaatttatcgagacaaacagagagagttattcagagagagagatgaggaggcatgttaattaatgacatagtgtgtgtctaatcaccattgtcacaagtgagtttatattgaaatcaacaaattgtgtacattatgtatattgtgttctctccaattcttcgagcttaaataaaaatctcgagccttagtggttgtttttggccggggagtaggcaagagtgatttattatcacttttgttcgaaccttataattattgtgtttgttcttcttttactttatccttttgattgctcacttggatttctaaacttgtttattttttcctgttttgatttctcagtcaaaccattgtattggactcctactacactatagagaatcgtcgaataccatacctaaaaatactctgagaaaactcgttagccctatcgcattatatagagaacacaaaaaataaatcaggaagaaagtcattttttttttctaaattgtgtaagagttggattgtgcgctaaaaaagctaagtagaaaacgtcttagtttaccaattaattaaacaagtttaaaaattgttctaaatattatttaataaataattttttcccaaaaaataaggtgcacactcgaaccagctagctcaactcgactcgaattggataaatcggacagcggcgaggcacatatgtggtgttcaagtaagcctttgtgtgactcctcccctcttccacaaaattgggtacctcttggtcccaaacccaattgctcaaacctccaatatatatacccttacaaataagtgttccaaagtaatgcaagagtaactattcataaaatgttccaacagtcccttgtggccagttgaatttttcaaaaaacattttcatcaaagcagtaacctaaacacaattaacattcatttggtgcaaaaactaaattgtgtatattaatttgtgaaattaaaactctaatggatattattctaatgaatggtgaaaaattatcaaagaaatctacattctctctttgcctaaaacccttgacttaccaaacagacatgtatttgtcaacagttctatcgagtttcttttttttctctttaaaattcacttacaacctatgagcttgcaaccaagtggtaagtctactaagtgtcatgttttgcaagaagcaagagagtcaatttcatcatttatggaatattaacaaaggtctgcatttgggatcggccctgagtaataatgggcccaaaaaattttaaatgtgtattatatctgaagtaaattatgagtattattaggcatcttttcacaaaattttaagaaaatactatttttttcaatacaaaaaaaatatactatataaaaattttaggctctaggtttgggtgggctctaggcatgagcctaacccacctttacccaaagtcgagcctgtctacatctaatgaagatagcttcttggaggttagcaaaatccttctctaaaatgtaagcacagaaattagaaccatagacttgagctactctatctctcttaccctccaaggattagtttctatatcctgcatgttcatcactcctaatgacgagaataattgttagatgatgcgttcccactattccttagaaatctatgttcaaaaatcaacatcgtttgacttcacaataatattcacatttagatcatagaacatataagttactattaaccatataggctataaatattctatttttcaatatctcatatgaagaaattttactttttaattttagaaccatattaagcacataagaaacaaataataaatttctctctaccaataagaaacagtaccagaattaaataaaatttctaaatcattttagaagaatatcaaagtaacgttacccgattcttgtcaatgtacaatctaattcacaaatatcaaaatgaattaaatttaaagacacattttctctagcagtctagctacatatttatgtgatgattttgtgatcttaactggtacagtagtcacatttttcaaagtagtaatttacgaattacacttatactactcatgttcttattaattatgcgcttgttaacattacaaaatcttgcatgtcaggtattaaatgtacacaacatgtaaattaaaaacttgactttattaattttaatatttaatttaaacatctcttcagttgcatatcatttccccacaaacatcccacttttagttaaagtaacaaatttccttatgtagtctgtgtgaattccgctctgttaagtagatagctcgatactagattctttcttgtcttcagtaccaacaacaattgtagtgtgagttaactaacaacactgtcttgaacgtaacacgatcaaacatgcgataagtgttagtgtccacccaacacccaatctttagattcattattttttatgttttttttttcattaaacccattgtgataaataatggatcacttttgtaaatttgaaaccttttttcagtgaggggtgtaagtgcaaggcctgctcttccttccatatccatgatccataccaaagagaagggagaaattactaactagagaaacaaaaatgagtgtgtcatcttagaattgtagagcaaatataatgagtgaagagaagtaattaggtgaagatgagcaaagatttggaaaaagttgagagagtgatgtttcacattcacattgaattcattcattcacgtacaatgtaatgtggtttttgagttttgatttggaaatactaaacaccacactactgttttgtttaacactatcaatcaaattaaaatccagaaaatgagtgcatagacaaggcaattaaatgtgatgtgggagtgtgtagggtacctaattaaagatttcttcgagttaattgtgccacaaattgatcaacagctaccatagcacgagatgcggatgccatagaaccatcatacctgtgattgattgagagagagtgagtcattcagaaactcaagtgatgataaattgataatgcaatgcaatgcaatgaagtatacatatatatatttactcacaggccaaccaagataaaggctgctgtttgcataacaatggcaccttcaccagcaggctttgatgtgttgaggcaccttccacagaaccacctctcatggattgatgtaacaacatctgcaatccaacatcttaatttcatatacttaacttactcatcaaatcaaacatgttatttacatacatacatacattgattatgggcaatagtgaaggtttgggtggtgagtttgtcacgtttgatgaaatccaacaagtggttcatctgaatggggtttgctttaataccttcttgttctgcactgaaccaagaaaatgaaattagtttagtttagttgaaatcaaaatcaaaatcaaaatcaaaatgaattgagaaattacatgatggacaacaagcgagatggccctgttggatcatagttaatcaaaatagcacctttcaatgctgcctcacctgcaaattccattcttttgtttttatcattaaaaattcagagttaattctcaaaaattgaattgggggtttgatttgattagttacctaaagaagaagaggaagatgcaacattgaaggaagcccacttttcccaagctttaccaacgaaaccccaatccattccttccctttcctttcctttccttgttccgatatctcttctctaccataaccagatcattagagagacaacagacacagagacaaatgggccgaatacgaacccatatcacctaactcagcccaatgcttttaatttaatttttcacttataccaccaaatgtaaaatgttctcagtttatttattaattgatcaatgacacacttttttttttctctctaatatatggtctaaaatgttgtagtgataccaactaaatagttagccccagagcaagtttaggttggtgtatttaggtttgatgttcaaaaataccatttttcaatttcacagtagacttgattttaaaattctttaagttgaaagattttaaagtttatggtctaattgtagttaattctttttgattgatgtataaatattgaaaattccattatattatgttgtatgattcagctactccgacagattggtccagacatgtctaggcagttagtaagtgcatatgtgagagaatgagaaggatgttgaagagtgcattacgtacgtgtttgatcaatacctctcaagtgaggtaaattgtaattgtgcaaggctaagctcttttgtctcggattgtaaaactctttcgagattcaataaagaatttagctttattgttttcttattctcttgattgctttgattggaatctgttgaaaaacattaatttatcaaacaagtgctatgttggttgttctttggctaatgagatacgaagagattaattaagatacctaattgttccataaaagaaatattacagtaaacagagaatcattcttctctgaatatgaattattacaataacaccataataaataaacattatttcaccagttccactcttttttcatgtatatatttgttaaaagagtgaaaactagtttatgatacacaatatattagtgattgaatatatatatataacatgatatatgtaacaccatttgagtattacacaatcaaatttatgagtcacaattaatatataattaattgaataagatagtgtgtagtgtttttggttcactcgaaaatgcggttgtgacaagtgggattgcaagggtaaggacaatcaatcttcttgaatggacttcgatcaaaataccagtctccaactgccttggctattgtctgttttatcaaaatcaaatcatttacattaacatatttaattgatagaatcaagtaagatgatgagttaagttacttacagtcttttcaagaagaggagagtctgctctcatccatgtttcttgcatttcggtttggcaatgagcatagcatgaatctatgaacattcctttcgaaacagagtccacacgaccattgattgcacttaagaactgtactctaaaatctaaaacaatagggtagaattagtattgaattgagtattatattaatgtgtttagttagtagttagttaccttgcatggttttgagttgaagtgatgaacacttttttatatcgagtttacagtcgtgccatgttccatgaggatcagcaacaccaggtgccaaaatgttctttatctgaacaccaaaatccatgaatcatgtattctattctattctaattctattcatatatatgatgaagagttatatattataagttacctgccatgaatcataggctgcatttacaaaaaatatgggtgtttggatttgtgctaccacattttgtgggaagaagcactgcaaaaccaaaccatacatttaaacacaaaattaatgttgaaaacaaacaaacaaacaaacaaagagatagacaactaagtagttaccaggcctgggttcagccttgaagtgcatgattggggcaaattcttggcagattgatgtgttgcaaccacttgactatagaaggtttcaatgtgttgtgttccagccaaatccttgctgttagtttgatagtcattattcaatgattagtagtgaagtgagtaattgaattttagattagtagtaatagtaattaataacgtacgcattgatgaaataaccagcatcggaaagacatttgactttggtggtgggagggaggagagctctgaacttatcacagtgaagaatagagctcaatccaccagcagagcaacctgacaggattgcattttgagcatttttcattccttttgctaatagatcctccatgatggcaagccacaccctttgacctctaaagtgaagattagtagcctgatcaacatgattaactaagctagtaagtattgagtcaaattaacatttattatattatgtatcagtaaagtgttaacactacttaactggattcactgcttcaacatcgccagtaaatgatgacccatcacagtacctcaccttgatcttattccaattgtagaaatctgccaattcaattcaattaaaacagagttaagtcttagatagagttagagcttaaatctaataaacgttatttaggatttttgtcttccaaattttgaagcgtactaaatcatgtttcttaaactatcaagattgtcgaattgaagaacttttgcccaattttagtaagaaaagtctagcatgataaaattttaagggaatatgatttagtagatattaaagtctggggggaataagatttggtaaatattaaagtctggagagtataatttagtacataaacaatcacggaattagtacatgtaaagattatttaagaaggaaaaattctaattaaccaataataaatgtatattgaggataagataagataagagtaaggtatgatgtgatgtgatgtgatgcctggattaaatttctgtttgttgctgagaattccagagaatgaaagagtcttgaccatctgcttagatgagcccaaacgagtgttcttacggtcaaggcaagtagttacattgttacaccaacctcctccctaataataaaatcaccaacattcattcaatttgttaatttgttaccttttttaataaaataataaagagtaaataaatgaatacctccattgtgatataccagttgttgatgccagcaccaaatcctggagcatggtgataagctggggggcttccatccaagcaaactgccacaccattattcaatctcatttcatttcatttcttttttgatttgatacaataaataaaaatgaataaattgttagcatatataccagctcctttggctactgcactctgtaccagagtaatttctactggaaaggcatctgttgttgttggtttgaatattgatgatattaatatgagtaccactaagcctaataaccttattgctttcaccatctctttctcttaattattactctctccctctgcatacataaaacaaaaaacaacctataagggtttggttagaatagaagagagctatatatatatgtatgcttatataaatatatatatatggattgcaaatgaaaaagtactaacatcatacatgcagcttgattagttaataataaacttaaaaaggcagaacagacaccacaccaaaattaatattgtattttatgtacctgagattgagaaagagagaatctgaagaagaaaaaggtagtggaagtttagtgcattaagaaacttgaaaaggaagagttgagtttgaaagaaagaaagaaagaaaaagaagaaacaagtggttttatattcacaagactttggtttcagtacagttataggtattagttaaaaagaaagaaagagagagcagccgacacatattgatgagatgatagatagtaagtaaataaggaatacagctgcaatgcaatgcaaaagagcaatgttccaagaatcttaattaatgtcttatcttaccaacatacatacatacattttcattcattcatttattaacaattaatataccctacacttactggcccatttgccattgtccccaatacatccatccacacatattcaaccaataaaaatatatagagaaatactaaagggtactagtggtgcctagcactctcttatgtgtcaatatcgctattagtttaattaagtatcgggtcccatacaatttaatatagtaacttttagagagtattgctagccaatcgcaacacgacatgtctagaaagtgttaggggtgcctaatagcaatactattttataatactactttacaaccccaatcctatgttctaaattatttactattatttctatcactttttcataattttttcttccttttcacaaattataatgttatattttaatcaccgacttcccttagtcaatgacattcgtatgcctcctataatcaaattaatgtaaaaaattgaatagagttggaataatatcattgttaagatatttggattgagcagcagactgcttttttttttttt

SEQ ID NO: 220392 - DNA, 2398 bp, Cannabis indica
aaggcaaagctgttgttgaacgatagtgagttttgagctggatgaagattgcatatatcgagacagttcgacttggagtgttggatttttgggacaactagggctcacaattttgtagttactgtgcgacatcttttgattatgtaaagttgaaaaatgtagataggggatcctagattttataaatgtaatacaatatatgtttatttattaaagtttatatttgatcacttttgataaaccctttgattagcaaaggttgcacagtaattttgaaaagcactgtatcacgcctaaactagtagggtgttaaattcatggtacgaaatactgaaagatagtgggttaaattcaagttattgatgtccaaacttctatcttagagatctcggagtcaacctgggcgtagggctaaggtcccctcccatgtcgactactatgagttgacttgatgacgtgaactgtgcttatttttcttgaaactaccaggtgggcataaattttgatattcttaagtacttgtatctcttcttgaagcattcctaattgaattaggactttgaacactttttcttagtccttaggaattttgaaaatcaataaccaaagaaaaagaggaaaaatcttatgtttttttttttcacttatcttttatctctttctttgaaaatttgaaattttcttatttttgtcatggaattaggattaattggattagagtcctaatcctatttgaagatgctattaaaaattaaagagatcagaagaagagaaaaggcctctggccttttgcttatcatttatttattttttttcctttaattatctaattttccttaatcacaatagcaatagaaattattgttaccttttaaagccttttacttatcatttatctctttctttgaaagcctttaaatttaaaagacttccattagctttaggactaggatattaaactcaactataaataagtgagttgagatctaattttttcacacttcttcattattccacatgcctataacactttgagagaaccttcgggatttcatcttcatatagccctcctcacttcaaggtaaaaacaatctttttttttttattattatttttcttcttctcctcctttgttgatcttattccaaggactcttaaacttctaaaagtccttgaaacaattttttccaaaacctccaaaattccaaaacactcttcttttgccttcaaaaaaattccaaaagctactttgaatttttcaacttaattttgacttttcttgagttgtaagcaacttgagttgttgagtttgagatggctaggatgaagagaagcagaagattacctgatgagtatgatccccatgttgctcagttcattatagcaaaggtgattgtgcctaagtctaagaacttagataaggtgcgtggtggaaaagtgatggcaaccgagcttctcaaagctgccattaaaagtgacgatctgagagatcgtgcctttaagcttagacctcttgtgtctaataccctcactgagctttaagctcaaaaaatttagggctgaagatgtgcaacacacccaatgatcttttatacaaaaaaagcaatgcccatgcatctcccaagctctaagaagctttaggggttgcatgcatgcaccctaggatctcctaggcagtctgtttcctccgatgaagtgtagggcctctaatggcttctgggacaaaaatttagactaccagtaggataagcagtggactggtaagagcttcctaacttgtttataatgtttcgagttactttctccgatgtaacttcaggattggaatcatattaggagacagaaaccccttgagtgaactgtgccaaaaatttcccgcctcaatcaatagtaccataaccaggcctgactggcagcccaacacacagtgacaatactgggggtctcctctcagccccaccattacagaatcaatttccaaataacttcaccacctagtgtaaaggcaaaggaagtagttgttaaaaaatagatccaaccctcgcgtcagcaccggcattggtgcctcaagctggattgagtcattgcatctgatgacccctcttgagttattcgtcataaccacatcgcattgtagcctctttgcctagacccaatacctcttgcaccttgccgtatttgcgtggttagaccttcgtgaacggcaaaaagtgtgggtctggatataccaatggccggtcattcttatagggagttggctggccagatctgaggttttaagggcaaatattggtgcaggaagcgttttaagaccgcatgtgtttgtcctttgtatttttatcttgaggatctagccatcgggttctactctgggaaacgcctccgatctgcacatttt

SEQ ID NO: 220393 - DNA, 2507 bp, Cannabis indica
cgtccccatcttcattatagtggagaaagtcccacatagaatagtagagtattgagtaatacgtaagaacataagctactctatttatcactaattagtttgaggaaattacattgtatactcactttactttatttatttttatttttaccttcatttctatattctttaaaagaggctaattttgattaatagatacgaaaaagaggaattcatttaacttatcctaattaattttaagatggaatccggttacaaatttttaatataaaaagcacaacttaaaaaaattatataaatgatatttctatacttaaaataccatccgttcctttccttagttgggttatgttcctctcaaaaagctcatccctcccaactatatcatatcggccttggggtggcccaaaatacattcgaaactacccatccgatggctttgatcgccacttgaaaccttttccaccatccacaataagcatgtgatttgggaaagaagaggtgttgcatttgtctcatttttaaaattcattataaagatccggtagttttgtaattaaagttgattttacaacgtgagatttaaccattctttgagcttgtcaataggggtaagttgaaaaataccacttttattaatcaaatttaccactaattttatatttaattgaaacatacttctttttatgtgtattgtacccaaaataccttgacataagagagtcacatggagagtatcttaaagtgacagaggtaaaattggtacaatatctaaaaaaaagtaaaagtgataaactttaaaaaataggataaaaataaaagaaaaaaaatatagagtgtaatttaatcttgtctacctcttgtcaatataacccaattgggtccagctcaaatttggtcaattaaactggacaactaatttatgggccagtacattataggcccattaaaaagtgaagcccacgacacaagacgacagaacagtcatttgcaatttgcatcaccacgtgcgaagagagactgaacctgtcgagtcacgcaggcagagctgggccctcttttgtattttccattcaataattaattaattaaataaataaataagaaaaccgaggcaaaaattatgaaattctgtaaagtatttattttaaagtttcgcggttatgccctcagtttctcattcatcatcatcatcttcttcctcttcctgcgatcccatcatcatcaccactacttgcttcgctctcgatcgcccaacgcctctgaatgtgaaaacgattcgattggtgagccactgcttttctcttcggctgcaattttcttttgtttttcgtggtttggaattttcgaattgtttaattgcaagtttttctcgatttctagggttttcttgtgtctttttggctgtcgagtgaatttagaacaggagaagaatgtggatttttgacgatcttgtccttcgtcttttttaaagttcaatctttgagtaggtagttgtgtttcggttcaaattactggtttttgggactttgttttggagttgtatgtttagttattgcgaattttattactgtaattgtagaaattgcgagtggattttttttcttctggtttcctttttccgagcgggcaaacatttatgcttaggtgtctgtttgtttgtaatgctgagcttcgatgggttagagaaaataacgttttttatttggtttattataagttgataatggggagcgaaagaaaaagattatcgtgtttagtttactagacatttgacttaatagaagagttttctatgtccatttatgttaactaaaaaaaaaatctgatctttccttgtatatttgttgtgtttcagaaagctaagaaagttctccatggccccttcaagaaaatctagaaacggaaataagcagctttctaacgttattgaagtttctcctaacaaacatggagaacctataaacagaagtaggctgaaagtatgagctcattttcctcattggatcacagtgtcctttaactcagaaattttattcttattttgcaagcttgattatttatgtataatatgtgttcctttactggtgggagctttgagctttttgtgttgaagcttgtttaccttgctctttctttttgtagaaaaggtactgtatattttattttgtttcttcttttcttttcctaagttgtaattgtggataagaattaggaactttcggatactcaatttagctagattatagttttaccacaaacatgtaaacatttcttttttcagcaaatgtttcaggagaaagttacttggatggtctctaaaattggtaccaaaacttgctaaagtattttacatgttgcctctgataatttgtttaagtaataatttcctgaaatgtaggacatactgttgatcttccaacattttgattcctctgatacattatgcagggtcctcgtgattatttctagcttataaagttactctttttactttcatttttgtt

SEQ ID NO: 220394 - DNA, 1810 bp, Cannabis indica
aaggctttgaagaaccagggaaagaacactgtgtgtgcaagttaaataagtgattgtatggcttaaaacaagcaccaagagcctggtttgacaagctaaaatccactttggttagttggaacttcaagaactcaaaatcagacacatccttgttcttctataaacatggtgttgatgtaatctttgtgttaatatatgttgatgacattgttgtgacaagcaataacaacaacaagttgaaaagtttcatttcagaactctatagaagattcactctcaaagacctcggctcactacactactttctgggaatcgaagtctacagggatgtgacaggcttatatttaacacaaacgagatatatataagacttgattcgaagacacaaccttaccaacctaaagccttgtccaacatctgctactgcaagaaggtcaatgtccataacagaaggtgaattgctctctaatcctacaatttatagaagtgtaattggtgggctgcaatatttatctcacaccaggccagatatctcttatgtggtcaataaacttacccaatttctaaaggcaccaacaacagttcactgtaatggagctaaaagagtcctaagatatttaaagggaaccatgcacaagggccttcatatcagctgtgatgaaccgctgaatataactggatattaagaccctaattgggcttgttgccccgatgacagacggtctatatagcaagttattgtgtcttctttggtaacacctttgtgtcatggtcttccaagaagcaaccggttgttgcaagatcaagtacggagtccgagtatcgtgccttagctcacgtggcagcagaaatttcatggattgaatcactactcaaagaactcagctttaaaacaccaactgccattacttggtgtgacaatatgggagctaatgctttggcctccaaccctgttttcatgcaaggacaaagcacatcgaagttgatgttcacttcattcgggataaagtcttaagcaaagagttggacatcagatatgttccatcatctcatcaagttgcagatttcttgacaaaggggttgtctagctcaaggttcaatttcttaatcgacaaacttggagtaatcaatccacccctgcatttgataggtgatgtgaataaatgaacctatttctctcttgctggatttttcctctctgctggttgttgtggtccaggtttaggacaggtgtccatctttctgtcaattggagatccctaggtagatatagtcgttattcttgtaatgatgaggcaatgattgcttttgtacgatttattctctatttgttacaattgcctacatctataattgagccattggctttcctctgtattggtctctttcgatcctacctataaatataattcactcagtctcttgcaaatagagctgacatttcataaaacctttcctgcattaattttcactaaataaagaaccgcaacaccttctggataagtgttgctagatgtataatcctaattaagatttttttattcaaaaatataattctaatattagagtcacgtatataaagttagtggattgtaacttctctaattaacttcttctatccaatcgtgtaagacaaaaaaatgttaatcttgagaataccactatacatatcaagctgtcttctactaaaccaaaactgtatttattatatgaccattaattttaagaattcacatcaatatatatcggtactggttcgtaccttctatgcactaagggctcgtttggaacgccgtattaggtcgtattg

SEQ ID NO: 220395 - DNA, 1184 bp, Cannabis indica
cgaagttcgcaaaactaacactgaaagggcttaaaaaccgcctctaaagggagtttttgtaatagtgtggtgaaaacaatattcaaatagtaaactaattgcatgcaggattcttttatttttgacgtgtgtgaattaaactatttaaatactatattttgtattgtaaattattttaaatttctcaaaattttacgagatatcttacataactataatatacaccttatattaaatcgaatgacaatcgagcgccaaatattgaatatctaattgtaattagattgaatttgatgctatttttagatatctaattagattgaatcgaatgttgtaacttggatgggacgtcaaaaaattcaaatatatatatatttaaattaacattaaaattttattttttttttgattaaatgatctaatctaatccaataaatattggatttaaaatattgaatgatttgatccgatctaaaaaaattaagattaaaatattagattaactcaaattaaatcaatatacattaaatagatagaattgatttaatacaatatttaatgaatgttgaatcgcttagatgattaaaatttaaaattaattagatcagatcgaatgataaaatttaaaatccaatatatataattagattagatttagatagatttaaaaatattgaatattattcaataaacactatgttatatgtagagtgtataatttagtggggtttaattaaaattttatttctttatttatttaaatataaatatgggaggtggtgattgcccatgttgggttagttatttttatatatttatttatttttatttatatatatatattaatttttggtaaatgtaaatgtaaggttggtttgaggtccacgatataaaaaaagtccaaaatcggtgactaatgtcgtttagtgagatgacacgtggcgtaaatgtaaggatagataaggataatgagtgtgcgtgatgtgttgacacgtcaaagggtcccacctactacgtatgattgtggttttaaacaacaattgaatctggttgtattttgatacagttatgtgggacccacatctcaatcaactaacatttggatttgcttacgtggccttatgttctccaatataaaatttacacaataataataataataagaaaaaaagcctttaaaaatt

SEQ ID NO: 220396 - DNA, 2497 bp, Cannabis indica
aattattgggtgattttttttttaaaaaaatttatattaaaaaataacagttttttttcaaattatatacattgaatttttatttttggaacttaaaaattaaaacgattgagattttattcccaaaaaaaatgattaacatttcttttggttatatatataagggattgagatgagatttctctattaaatcgttctaggattttcttgatagaagatccgataaaggaggtggaaaacctgagaatcacaggatttcgaggggaacatgtgaatcacatttatatgatgttgggcttcagctctcaagatctctcgtcgtcgtcgatgaacgacgggcatcaaggttttttttttttttatatagtttctaaattattttgattgttctttaactgattcattaaattaaatggtttgaatttcctaaatatttttttgtacattaaaaaagtaatttttggggagttaaatttggttttgatcagttgttgaaatttgagatttttttcttgataggtctagcttcttcttgaaatttacattatttttttttgtgtgtgtgtatgattttagcttttattattttttttttatgtaaaaagacatttctgaaaaaagagacattttttaggtgctaagttagtaaatttgaaatttttgttcgatgagttggttctatagattgttgattgaaattattgtgaagattctaccatgtttatcacagaaaatccgaaagcttaatttggaggctttcagaggttatatagtgctggattgtataaatatagatatatatgttgtattgatttgttttgatgaagagttttggttctgattacggatgttgaattattagatttgggttcttgattggtggagcttgaggcttttttaggttgtgtttggttaaagctttttcaggttgtagaccgtcgactctagctacttttgtaattgtatatgcactttttgggcctacgtttcctgaaatttatgtcaaaaatctagaagtttaccttctattctatgaaattttgtacatgttattattattaatagctactgataacttgaatgtttatattaaaatttttaggtagacaatgttcgtgtgccattagcaacatttgagattgctttgaggttactggctttcctctagagatattgttgtagcttcaaataattggggttgagtttgaagattagaataaaattctacaatattttgtttaagttcatttatcatgttttgaaatttttttcgcattaaaaataaatgctaaacgaatacatatattgagatcaatgtactatttattattaataacaagatgtgtatcatttatttataagataattgtgttttacttaccaaacacactgactcaccatttgacttaatgagttcaatcgttcatataattatattattttacatttttttttcatttacaattacattctaatactatgctaaaaaagaactaaaaagaataacctaacattttgatattaaatttatttacaattttcataaatacactatcattgtttttaatatatttaactaaaattttgaatatgaatattattccttcaaacaaaacactatacattacttaaaatatatatatataaatatatatatatataaaatctaaattaaagctaatcatacgtggctcgacacgtaacatttctctaaataacttgtgttttcccacttgtgtccaaatatactgccactttttatttgcactgaaatttctctgtataatctcaaatttatcaacgtaatttctattccgtttagctaattattttgtttctatttattgcctattttacctttttagattgattgtttaggagagtaaaaattaaaaatttctgtgtgttggttttaggattttttcgttgccaatggaatatagatcagaagaaggattaattgttttggttttgttttttgagttttatctgatttggagttttgagtgatgtgaataagaagaatttgttccacttgtttgccatggccattcacattctgtggtcgatttattttatagtcccatcacgcccaatgagttcttcctcattggtgccagcaaaggtgcgtttgatttataatcttaatgttgtttcgaatgaattaatttattggagtgaataattatttgatgtataggatgattgaattcatctaatgaaaaatctttatgcgtggtcgtgcaatttagacattaactatccttctccaccattttcactcgattattttgaaatggtcagttagaatcttactttcactcttaagtgattgatatacccctagctttcaccacacccgagctacaaaatttcaatcagagaaattcaaagggcttaactatgagagcacatcttttttttaatttggattattatgaaattattatgacatttttttacttgtagtttgcaatgataactatatatgattatc

SEQ ID NO: 220397 - DNA, 3122 bp, Cannabis indica
atatatatatatatcatatattaagtacatatctttacatgtccatagattagttaaatttgaaaatgtcgatgtgtttaatctagcttatcccttaacatgtcattaaaggaatctaagatatttagggctagtttgatacaccgtattgtattaagttatgctagattgtattgtattagtattaagattatttaatacaatactatattttgtattaacttgtattaaaaagttgtgcaaagttattatattttcaataaactcgacctcaacgcaaatttcgagtcgggtctgggtccacaatctaggtcacggttcgggtctgggtctggggcttggggttcgggattcggttcggaattgggtccgggcacgggtcccgggtctgggtctgaatacgagtcgcgggtttggggtacggggtccgagtctgggtctcgggtacacgtctctggtccgagtcagggtccgagtccctaattgaggtcatatactgtgtaatatataccctatattataataataataataataataataataataatatgatcaatctcttacaaaaaaaaattcatttatacttttataattaatttttatttatttttaaaaataaaaacagtataacttcaaaataaaaacaatataacatcgaaatgaaaataatttttataaaataaaaataatataatctcaaaataaaaacagcataactttaaaataaaagcagcttgaataaaaaatgaaaaaatcactacaagaaatgttacttttaccagcaaagttcgttactgcgctggtaaaagtaacttttaccagcgcatttcgcaaactgcgctgacaaagagatcaaagttttactagtgtatatttacagtggctaaaatctaacttttaccagcacatttacgcgctgagaaaaatcttttttgccagtagttttcattttatgctggcaaaagttctaataccaacattgatttgccaacacatcataagtaaattctattttaccagcacaatacggccaacttttaccagcacaaaaatgtgctggcaaaagtaacatttcttgtagtgaatataaaaaaaaaaactgtaaaaaaaaaaatatactatatacataacaatttcattaaaaaaagatttatatatggatataaagattcttgttgttgtgtaattgataaaagtattaagctaaattaaatgtgcacttttccgattccaattttccttttttttttttttatttctctactctttgtgatcacatgctgtctacttttttattctttttggttaatgggtgattgagaaacttaaagtagttgacaaaataaaataaaataaaataaataaagagaataataaaatgcagaactctattgagacacttaaagtatatatatataaatatatatttctatatataacaaattatattgtgatcatataattttggaaaaagtttttaataatttgttccacactcacatgtctagtttatgttgaatgacaaaatttatggggttctattttaaaaatgtaatgactaaaattagtaataagtaaagttgtttatattgttatatatggctaaatattttttcatttaatcgtgtggaacaatatttttcaatatgtggaaagcaattattattttgaacttaaatttgaaaagtagatttctttaaattttatagaaaataatttactatgattataataaacatattgttatctttttaaaaagaacattaataaataataataatagattttgttataaaaataaattgagaaaaagaatatcagaattactttcattaaggtggtacctcattgggagcactatcgaaattacaagtgtttatattttgaaaatataaatataatatatatgcatatcaactttttaagtttttttttaaaaaaaataaataaataaggaacaattttgaatttctcctggcaaatcaagattccaattacagttataaaaagtaacgaattataaaaattgttagttaattaattatactatgtgtatttatacattgattattaattaattaaatgataagattaattacatggatgcagaatatgaaaataataaagaatttaagccaactaagagtaacattgaatactggttaaaatggttggttaaggactgcaaggcaggagactctttagtgttctacttctcagggcatggtttacgacagcccgatttcaaaggcgacgaactcgatggcttcgatgagaccatttgtcctgttgattttgtggagaatggaatgatctttgataatgatatcaacaccatgattgtaagacctctccccactggtgtcaagcttcatgccattgttgatgcttgtcatagtggaactattcttgatctacaatatgtctatgatatcaaaagtaagttttattgtagacttaatttattatgatatatcttttatatattattacaatttgtagactaattattttttaatttgtaatattatataggaagaattgggaagatcatactcctccatcaaaagcattgaaatgtacaaatggtggatgggctctttgccttagtgcttgtgaagatcatcaattggctgctgacactactgtaagggattctatatatcttattattaatgtattaattataattactaactaattatattcatatcattaatatcaactgtttaattaattaagattttaactaaagatcagaaggagagtatcgggttcctcataaagtttttagtatatgaatatatataataggtttcagaatatataattaaatagatgatgctcttagaatttctttattgtttttttaaattttccttgaattagtactatcaaattaatgcgtctttcagtctaaaaagttagcattattataggcatcttatcacgcgttataaataaatagttagcaatttcttatagttactcaatattaatttacattaataataatttttaatttcgtttagaacgtcgtattagatcgtattatattgtattatattgaattagattatataccatatttttatataatactatgttaaactttaatt

SEQ ID NO: 220398 - DNA, 1711 bp, Cannabis indica
cgattgattcgctattagataaagagatatcctctgagggctcatcctcgatgacattggtagcatcatcactttttttcgtgtcccaaggaaaatcccgaatagcccaaggatgggcccgaagaagcttccatggtcgtgggcaaagcgaggaggaagccccatcaaacttcctctttttgaatggagtagttcttggattaacctcagaagtggtaggaactccaatgtctccaccaatagatttaatctcaaaaagatccaattccaaaattcttaagctcttacaagagagtatcctgagcttgaaagaaattagacaaagctaattcttcatcatggtgaaaattaacctcttgtccacaaatagagctctcattagaaagggtcttggttggaccattacccaaaggccctttagaattgtcacaaggaggtaacccatttttcttgaccatcggcccaagagaaataataggcctcacatcctgcccatttccttgttcacttaagttattcattaaaaaggggccggtcccaccagctgaggaggaattaaaaaccaggttaggcccaaatgacttgcacggcccactacaattagcaagagccttctcttttctcttaaaacttggactcgacccagtggatgaaatggccggcccaatggcaagcttctttgacccatctttatcacataaattaaaagccacattcaaattagggtcaactcttttcaatttatttcgagtaaaagcctgggacacttttcccacttcatcttccccaagttcggccaaattacccgaactagaaatgccaggcacgccaatgacagtcgaccgtttagggatccacgtcgtctgcttggtccgagaaaccagctcagacctccgaacggtctctttcacaggcttcatcgagacccgcaccccttccctttgcaatcaacgcttccatctctgccacccacggccaacgacgccatcgtcttcaacctctgagcatgtctaccagtccggttcgatgctcccattgcaagagagaaagagaaagccccagaaaaaacgtccaggtaagtcgactcagttgaaatccacggcccaaacatcggataaggaactccggtgctattgacaaccgtgaccggtgaagaaagggagcagcccctccgttggtgtccaagctttccacagttatagcaaaaaatgcctatcttctcatacttgacttgaatccaacgattaccgcccgattcaacctcaaaatagcaacccgagaacagaggcaagttgacgtccaactcaacaagaactctcaaaaacttcttccacagggccggttgcccttcctccaaatccacagagataaccttaccagcttttcctcccaaaatagagccattgtcgactgaaaaatagtcccgtgggaggctatgaatttgaatccaaacctgcatagaatctagtttcaccgagagggatttgacaggggaccaagcttggagaattagagagtaaccccggacacaccacggtccattggctagggcccagtcacggttcgcagcacgagcaaacccaaactcaaagcagttcgggttgagagcagattccttcaaagccacaacactcaccttacacttccaagttttgtccacaaagtctaagatagtagcttcattaactgtcatgggggcaataactcttcc

SEQ ID NO: 220399 - DNA, 2940 bp, Cannabis indica
gctacatctaatgcaattattaattgtcgtaatcctgtgttaaaagtatcttttggaaacatgactattgaattgaatgtgtttaatattgccaagtctgttgagtgtgaagaaatacatgaaatgaacatgattgaaaatgtttttgacatagaaggaaatgaatcatttgaaaaatgtgcaaaatattttggtatgaatttgaatattgacgaatttttgatgaggtgaatcttttgttagagtctgcacctttaatgaacattgaacattggaaaaccaaaattgaacctttttcaccattagaacgtgttcaatcaatttctaagccaccaaagttagatcttaagcctttaccaaaatctttgaaatatgcatttttaggagagtccaatacttaccctgtcatcattccatttgatttagataaagagcaataaacgaaattgttagatgcccttagacagaacaaagaagccataggttggaccatgggagatattaaaggaattagcccaaccatatgcatgcatagaaatcatttggaagaaaatgcaaagacctctcgtgaatgccaaagacgattaaatccaaacatgaaagagatagtaagagaagaggtaattaaaatgttagatgtagatattgcataccctatatctgatagttcatgggttagtccaattcatgttgttcctaagaagtcagggattacagttgttgaaaatgaggaaaatgagttgatccctactagaatacaaactgggtggagagtgtgtatagattacagaaagttgaataatgtaacaaggaaagaccacttccccttacccttcattgaccaaatgcttgaacgtctacctggccatgcttattattgctctcttgatgggtattcgggatataacaaaatccccattacccccgaagatcaagaaaagactacctttacttgtccttttggaacctttgcatatcgtcgcatgccttttggtctttgtaatgctcctgcaacctttcaaagttgtatgatggcaatattttttgatatggttgaaagaaatcttgaagtgtttatggatgatttttctgtgtttggatcctcttttgatgaatgtttgcaccatctttcccttgttttaattcgtttcaaagaaaagaatttggtccttaattgggaaaaatatcattttacggttaaaaaggtaactgttttaggtcatataatttcatctgaaggaatagaagttgatagagccaaggtagatcttatttcaaaacttccccctccaaaaacagtaaaagaagttagatcatttttaggtcatgctggttttatagaagatttataaaagacttttgcaaaatttcacgccctttatgtcatttacttggaaaagaaaatgcttttgtctttgataataaatgtcatgctgccttcgataaactaaaaactcttttgaccactgcacccatctttcgacctcgtgattggagtcttccttttgaaattatgtgtgatgcttctgattatgctattggtgatgtcttaggacaaagtcttgaaagaatacctcatgtgatttactatgctagcaaaactttaaatgatgctcaattgattcatttcacaacggaaaaagaattgcttgttgtttttgcattggaaaaatttagatcttatcttctaggatctaaaattattgtctattctgatcatgttgcattgaaatatttcctgtctgaagaagattctaaagctcgcttaattcgttggatccttcttttaaaagaatttgacttagaaatacgtgataaaaaaggatctgaaaatgttgttgctgatcacttgtctagattagttgttgaaactgctaatgagtccactcctatcactgaaacttttcctgatgaacagctcatgcatgtatcctctttgccatggtatgctgatattgtgaattatttggttactggtgaaataccttctcattggtctaaagatgataaatctaaattctattctaagaccaaaaatttcatttgggatgatccttatttgtttaaatactaccccaatcaaatcataagaagatgaattccaaattgtcatcaatctaaaataaaatatttttgccatgatcatgcatgtggaggacattttagcggtaagaaaactgctgcaaaaatattccaatgtggtttctattggcctacaatctttcatgacacttatgtttattgcaaatcttgtgaacaatgccaaaagttaggaagtttaactaaaagaaacatgatgcctttaaatcctattctgattgtagatatatttgatgtttggggcattgattttatgggaccatttcctagctcttttagatgtatattcttgtttggagttgactgtgtgtctaaatgggttgaagttgttgcatgtcacacaaacaaccataaagttgtgcttaagtacttgaaagaaaatattttttcctgtttcgattcaacacgtgctatcattagtggtaatggtacacacttttgtaataagcattttgagcatttaatgaaacaatatggtattacacacaaagttgctacaccttatcacccacaaactagtggtcaagtcgaaatatcaaatagggagattaagcacatcttagagaaaacagtcaatccaactaggaaagattggtctttaagactcattaatgcattaagggcatatcgggctacatataaaacacccattgggatgtcgccctattgacttgtgtatggaaaagcatgccacttacctgttgagttagaacatagagcttatttggtcatcaagcagtttaatttttttattagacaaagtaggtgagaagaggaagcttctgttggaaatattttaccaggatctagatttactaccaagtatgtttcattaacatc

SEQ ID NO: 220400 - DNA, 2111 bp, Cannabis indica
aaatcaattcagggtcctatttgtactattttaaaaatatatggtctattttgtcatttaacagaacaaaaagtccaattaataacttttacaaaacacaaagtctaaaataatatttacacactaaaatcattggaaatatataccattttagtagtaattgatcatatatacttttttattcttctcattatcaattgattagttttgttgttaagttgtcaagcataatattatgaaatctactaataaataggttaatatttttttttttaaaaaaaataatagtaacggaacagttaacaaaagattattatgaaattatgagcatttttaataaaactataaatataaatatgatttgtgagctaatgcaaattatatgttgtttttttccaatgcttaaactatgtttttgataaataaaacataatccttgctatacataaaattaggacacgttaaaataattttaaattaatctattaatattcaagcacatattaaaaagaatgagtgaattaagaaaagaattttaaattaatctaattaatatttatacatctattaaaaaattaataaaaagagagaattaagaagaagataaaaaaataattttataataattttaaagcatcatatcaccgatttatatctcttatatatataaatatatattaatttttaataaaactataaatataaatatggtttgtgagctaatgaaattatatactgtttttttaatgcttaaacaatgtttttgataaataaaaaataatccttgctatatataaaatgaggagatgttaaaataattttaaattaatttattaatattcggcacgtataaaaaaaaaaaaataaataaataaatgaattaaggaaataattttaaattaatttaattaatattatgcttctaattaaaaaattaataaaaagagataattaaagaaaagagagaaaaatagctttatagtaatatgagagggtcatatctcacttttatatgtatactaggttgatgttacgtgcaatgcatgtataattagttttctttttaattaggttcaattagatgatgttaagtgcaatgcaggtatgtttatttattttttaattaagtagtgtagtttttttttttatttttaaaatagagtttgagattttgatctttaagaaatatttttagctattgctacattggtgtgttatttgaatatgattaaatatatacgcattttttaaatttttaatttttttaattaggtaacgtatcaattaatgcatatatatatattataatttactatattcttaaatattataatattttaaatttaaatttctttatataaaatatctacataatttttattttaaaatatatataataatattataaaattaataaagaattttcatattaagtaataggacatatattctgttaaagttaatgtaaaaattcaaaaattatcgttaaaccaagaattaattctgttatataaacatattttatataaaatagatatattaattattattaaatttgtatcaaacaattaaataagattataaaaaagagtttatttagcacttgtcatcaataattaattttgaggtaaaaaacaaaagtaaacattaaaatggataaagttggaaagatgtacgtttctaaagtctcttataatttcttaaacttctccatgtgggttatttaatagtttatcccccatatcttcagttggatcatttgaaatgctttgcttccaaacttcatcacccattatgtcatgaaaatcattctactagctaactaatgatccgcctagagttcatttgcatacgaaaacaatacctactaactttgaaaaaaaaaaacacaaaggacttgtttggaacgtcgtactagatcgtactgtattgtattgtaatatattgaattggattatatatcatatttttatgtaatactatgttaaactttaatttatactaaaatattatatatatatatatataggtgtccaataaaagttaatactacatatagttttacaataaaatattgacataaaatataattcaatataatataatacaat

SEQ ID NO: 220401 - DNA, 2407 bp, Cannabis indica
ataataataataatattagtgttaatagtaataagcagaaggagaggtgtttggggtcgtcaattaattctgtcgttgaggaagaaaacgacagtagccctaacagccaaacgacagcttcagcatcgtcgtttgagcgaaaggtctcgagatccagatctgttggctgcggaagccggagtttctccggcgatttcttcgagagaatctcaaccgggttcggtgactgcactctacgacgagtcgaatcccaaagagaaggcaaatccaaagtctcagccgccactcaacgcggcggttccggcaccggagaccaccaatgcatgaaggaacgcgtaaggtgcggtggcattttttggtgggttcatattgacttcttcgtcttcttcgtcgtcgtcttcttcgtattgggtttcgtcttctgctgaagatatgaacggaaaatcagtaacttctgccggtggtggtggtggtgggcctggcccacttgtgaatggccgcagtaggagctggggttgggcctttgcgagcccaatgagagctttcagcaagcccaccagctctaatggcaagagggatcatcatcataatataacgagacaaggttcagataagaacagtactactgcagctactcccaacttggcagccattccttccttgctcacagtgagaagctaataataataatattaaataataataataatattactgttataattactataatacaccattttaattcatagtttttatattaatgttcatctgtgtattactactactactattatctcttgtttatttaaaatttagctcttttttgtgtattaatgggtgtgaaatctctagtccattacatattagtggtgtaacaacattttcatgttaaaaaaatttgtctctaaattatagttttgtttggatcataaaaggaagtttagctgtaactctagctctgtgaagaagcaaaagataatttgtgacttgggttttgttttctgagttgttgtagtttgtattattaaattagttaatattattgtaattttctacactgggatcatattatattacaagcaaagtaataaatttatttatttatttttgtggtgtttctgaactgatctgttaacttaatttggggcacatgcacacacatgtttggctggtactagacaaaattgggtatcaatatcatctatgtgttacaacacttgtgcaaaaatcactgctagaaaaacccctacctttattttttttttttaatttatataaatatgggataatccaattcattttagttatggtgatcatgtgattatatgagcaagtgaggagtcactatgagccagagaggcagagccaggcaggacttgggtgaaattttcttgatttgtaataatttgttgctcttgtttgtaacgtttttctttctataatactctgctatacttgtttgaaatatggtatagagaaaccactgcaaaatgcaggagagattattagagagagaattggcttgtagtgtataattgtactgtggttgggaatggtagctaaaaaaagagatgatatggggttgggagatggagaagaagtgagtgagtaatggaaagaaaaaaagaaaaaaaaaaattaatgtgttatgatggggacacaacgcagaaggcagaagctgggtttggagtgaagtacaaataggtaaaagacacagaaaaagcctgttgcattgcataggaataggatgccaggatgggatactgttactactactatctactactgtgcttcacgattcagaatcagaagaagattaaatgtgtgcttccccaccacaccagtaccaccattcattcacttactcttatcttatttaatttaatcaatttttcatttttacattattttacagtgaatattaataataataataagtcaagagaagggtagttttttcttttggtctccaataggataggattagtcactcgtgtacatatgttataatatagtacactatggagtttacataagccacaaaatagttgtgaagttttgatgaattattattaattttggggaatgagttaaagtttgactgagaagctcaatgaattgccacttggtccatgcagcaatcaaattggccccatcatttacgaccccaccatatccaatacaagagtttctttctttttttttttgaattggaagacttaattcatacatattttgatgtatattgtatagaatggaaaagggttgctttaatttcaaaagtagctttatgaagatcttttcaaatctctctcgtctgcactctgcatggggtgactgagtgagtgatagcgatactgatacccataccaccatacccgtgagagtagtttttttttttttt

SEQ ID NO: 220402 - DNA, 1606 bp, Cannabis indica
gtgtttggccgatatcaaacaataaataggcaaatatgttgactaggactactcaactgattaaaaagatgaaaaacgcataaagattaagtcatcacccaagagtttgaaatttttgggttaaaggctaaattttacgaagctttgaatgagcaagatgagaatcgaacattgcgagattaaagtcaagatgtcataaatcacgaagccgtacgaagtattgtagagaaaactacaaagtttcaagcctagattttctacgcatcttctacaacaagtcaagaacaactatattttgtataatggaagcccagaagattgaagatacaaagttaaagaaggaaaagatcgaaaaattactcactgtttgaagcctaggcgttgtccagatgaagctgctcggatacttctgatagaaatcccacgatagacttgaaaaaaaagtcctttcttgctctgagattgtttcgtggaaaaaatggtgaaagtgatttctgaaagaagtgcagcagtatttatatgcaaacttatgaaaaggggtaattaattcaaaatccccagacgcttcgattttcccccaaaagtaaatattgggaaattaaaagcaatcaagtgcctcaagagaataactgtcaaaagcgtgctaagggaaacgtgtctcgaggcatttattggtcagagcattaactagaaaaaaatcaaagggacgcttggtcagagtcacatcgaatcatgaatagatgcagtcgacacgtgtcacccattcaaatgttaagtcagctcggatgaagtctctacgcaacttcggaagtcctacatagacttggggggcaaatgttatcccaatttttgcactctgacgtggcatcacatgctggtgacacgtggatccaattcttcataactgcccaaaagagatgttccgaacagaacaccgcatatacctgcacggacgaagtcttcgtagccgggtagtggacaatccgagaagcatatcaacacttagcaattacagaatttgcatcgtgaagcacaatagcaatccttataaatcagggattgtatcacacagatatggcaagctgtccaaatcccacaatctgtgtatcctaaatatgtaatgtatatattcttaccaaatatagacattgtaagcaaaagggaaaccttccctcaagcatgtagccctataaatagtgatccattctcactggtagggggtcgaaagaattacttgagaaagatctaagagagcatactcagagatttcattgtaagagctttaagagagggaacgttgtgttctttgttcttaaatcaatacaaatcaaggggagtaggctattaccgaactgttcggagccgaacctctttaaaaccatgtgttttttatttttttttttgtattgtacctgaattatatcacttatagcttacaattaagactcattgtcttggttaaaagcgagatcaataagagccttacattttttcaagaaaaaacttattctgctatttttgtaatttaaaactctaattaaatttatttttgtcaaaacattttcaacatgacaaaactaacttttagaattatgaaagtattaat

SEQ ID NO: 220403 - DNA, 5892 bp, Cannabis indica
attaagctcagggtcctatttttaccattttagaaaatacagggtcccttttattatttaacaaaacagagggtccaatctgtaacttttgcaaaacatagggtttaaaatggtatttaccctttaaaaaaatatattgaaagaacatgaaaacaccatgtgaggggggaggtctttttttttttttttttttttttttaaaaaaataaatataaaagagaaggctagtgtagctaaaattttaaaaatgaaggttacttagtttatataaaaaaaactttttaaagtcatttaactaattatccccatcgtttttgttctaaaggtccttgatttcatctgggtttttcataaataaggtttcggtctctttcttcttcttatttgaaatgaaaattttctggatttgctttcaacgtttttaattgtttcctaatagaagaatactttcatattattactttattagtgtttcagcatgaaattattaatttcaaaagaacatctatgtttgttttgttgctattagattattcatatataaatatatataactatttgtatagttaaagagatttaattacaaactaactttctcccttatttgctccaattcttctgctgttaaaagaattgaattgttatcgttctttcctagcaagacgactacgactcctccgcctataaataaaaaaaaccttctttttttgctttttagtatttattaagtttatgtcttttaatttttggtttttactggattttaggtttcattttgtaatttagttttgtattgtgttgtttgctcttggtgttgatcgtttggtctcagttctctctatttttcttgttagtgttttagtagttttttgtgttaggtggagtttaaattttctaatggttgtagggttttttgtttgtgttttttagaagttcagtgtgtttctgattggtttttagtacttttttttccatctagttttttgagggagagtttataaagtttactggtttctttttcagttttggtttgtttttgagagattacgtttagatgtgattttatgggttgttaagttttatcttttaaatgtgtatgtttcatcgaattgattatggtgttttgtgtggattttttcttctaactgggcatactttaggggttgtttattaggttctctagttgttaattcatttgttttaagaggtttagtagtgttaagggtgtcaatatggttgaagttggttaaaaccgttagagtgtttgttaggctgttagtgtctgttacaaccaactatttctggtttggttatgttgttctctcttgtatataagctggtgtactctcctttgatcagtaatgaattcactcttactcaaattcatctttctctctgtttctctgtttctctctttcattctctcttttgttttctttcaatggctaagagaattaacatggtatcagagcgggacttccctccattaatggcgaacgtcgtcactggtcacgggaagggtgttacaggcggtgatagttccagtcaagatcaacatgatccttcacaacagactcagagtcttcatcgatcaagaagaagagacactgacgacttagctcccatctacttcaatcacagtctctcgactaaatgaccacaacttcttactttggaagcaacaagtcttggcagccatacgaggcaatcgtctgcaacactacattcaagatcaagatcctccttctaagtatctcagtgaagaagatcgagcaagaaagaaaatcaaccccgagtacctggattgggaagctcaagatcagctattggtgtcttggcttctctcttcaatgactccaagcctattaactcgcatggttgggtgcgaatctgcgagccagatctggtgcacactggaaaagtacttcacattacaagtttcagccaagatccttgaatttcagaccaaattgcagaacctcaagaaaggatccatgtcactgaatgattatcttctcaaagtgaaagaggctgtcgatcttctagcttcagttggagatgttctctcacctagagatcatgttcgtgctattttcaaagggttaccaagtgaatatgacacatttgttatatccacaaatactcgtcttgaacagtacactgttgctgaaatagaagctctcttactagcttctgaatctcgaatagagaagacagatcgagaaattgatctcagtgccaatgttgcagtcctggatcttgatcaaggattagaagctaatctagcaaattttggcaggggaggatacaaaccacagtcattcaatcgactctcaggctatggcaatcagcagattggtagaggtaaccactttggtcagtttaataacaataataattttggctatccaatgttcaatcctcgtggtaattacaactttggtaggggtagtcgatttcctgtaactaacaacaaagttcagtgccaactttgccttaaacttggacatactgtccaaagttgcttctatagatttgataagaattttccagggccttctccatctgggaacaccaatgctgcttcaggtgctgcaacaactcaggcaaatgttgtcacaaactcgactgagtgggacatgaactggtatccagattcaggggcaacaaatcattgcacaccagaccctaccaatcttgctcacagctcagagtaccttggacaggagcaactgtttgttggtgatggatcaggtttgtccattaaacacataggtcaaactttcttgtcttctaatctgtctacacagcctttagttctcaataacctattacatgtgccatccataaccaaaaacttgttaagtgtgtctaagtttgctagagacaatagagtcttctttgagtttcaccctgacacttgctgtgttaaggatcaggacaccaggcagattcttcttcaagggagacacaagaatggcctctatatttttgaagatgttgacatcctcaataaatccaccagaaatgaacctgcagaacctgtccctcctcaaaataataggccatctgtccacacagtctctaatagtccttcctgtgttcattgtaataattgcaagttttcagattttgatgtttggcacaatcgattggggcatgcctcaaaaagtgttgttcaatctgtacttaaaacttgtaatctctctgttgataataaaatgtctcaaaatatttgccctgcatgttgtttgggtaaaattcataaacttccatttcctaaagtctctagcactgagtacacagcccctctgcaacttgtagtgtcagacttatggggcccttcacacactatctctcacagtgggtacaagtactacattcatttcatggatgtatactctaggtttgtttggatatacatgctcaaagacaaatctgaaactctcaaagtgtttcaaatgttcaaagctgaagccgagttacaactaggaacacaaatcaaaatggtgcaaactgattggggtggggagtttagaacatttcctaggtttctgcaacaacttggggtagtacatagacacccatgcccaaccacccatgaacaaaatggcctagctgagagaaagcataggcatatagttgaaaatggcctcactttgcttgctcaatcatccatgccactgaaattttgggatgaggcatttaggacagctgtgtacatacacaatcgattaccaactcctgttctgaatcacaaaacccccctagaaactctatttcacacacaacctgattattccttgtttagaacctttggttgtaagtgtttccctaacataaggccatataataaacataagatgcagttcagatctgaaccttgcactttcctaggctacagcttgaaccataaagggtacaagtgtctagcatcaaatggtagaatgtatatatccagggatgtcatctttgatgaacaccaattcccctttagcaccatcaatactacaccagagaccatttcacctcaagaatggcacattcccattcgaattccctctcgctctacatctaccaccaacaccagtgatctacacactaacaccaattctcagtccacagatagtacaccatctcccattccctccataatccctgtctctgttcacagttcaccatctcaccacccttgtcattctaccacaccctctatacctcctggatttgagcatgttatcccaatcaacaccagtaccacaccagttacccctcctgttccctcacaatccaatgcccctgctgctgttcccacagctcagaataaacacaacatgaaaactaaagccaagtctggcatccacaaacctaaggtgtttagtgtctcatccattccaacaacacttgctcaagctctcaagttaccacaatggaaaaatgcaatggatgatgagattcttgctctcactagaaacaaaacttattctcttgttccattaccacctggcagacaagccataggttgtaaatgggtttacaaggaaaaagaagatactgagggcactgttactagacacaaagcaaggttggttgctaaaggtttccatcaacaaccaggattcgattttactgaaacttttagccctgtggtaaagcctgttaccattcgagttgttctaactttggcattaacccaagggtgggaaattcgacagttagatgtgaacaatgcattcttgaatggtgttcttcaagaagaagtgtatatgacacaacctcctgggtatgagatcaccacatctcccaatctagtctgcaaactccacaaggcactttatggtttgaaacaggctccaagagcctggttcgataagttgcagcagtctctgtccaggtttggttttgcttcatccaaatccgatcactctctgtttgttcaacactcaactcagtccacaacaatcatcctagtctatgtcgatgacataattatcacaggcagcaaccctgagattgtttctcaaattgtcaccaatctgaacaatgagttttctctcaaagatcttggagaactcagttactttttgggcattgaggtgaaacacactacagatggtttgcacttatctcagggaaagtacatcagagatttgttgacaaaaactcagatgcaaggagctaaatctgcttctgcccccatgacaagtggactcaagctatcagcttatggcagtgatccagttgaagatccacaactgtacagatcgatagtaggggcccttcagtatcttaccattaccagacctgaaatctcctttagtgtgagcaaagtctgtcagtttatgcataatcccctccaagttcactggatagcagttaagaggatcttgagatatttgagtggtacaatgaactatggtctgcacctgaccaaagccccacacaaggagattgttgccttctgtgatgcagattgggcagcagatgttgatgatagaagatcaacctctggttatgcaatttactttggctctaatcttgtagcttggtcttctaagaaacagcacactgtctcgatccagcactgaagctgaattcaggtctcttgccaatgtggttgctgaaattacatggcttcattctcttctttctgagttacatgtaactcttccaagggctccagttgtttggtgtgacaacctcagcacagtgcttctcacagccaaccctgtactccatgccagaacaaagcacatcgagctcgatttgtactttgttcgagagaaaattctacaccagcttgtggacatcaggcatgttccagccatcgaccaaattgctgatggacttactaaatccatttccagtagcaggttctgtatgtttcgacac

SEQ ID NO: 220404 - DNA, 1884 bp, Cannabis indica
ttttcaattagggttctttttcggattcatttagagggatcttttgctctcaccacccactcagaaggattgtccagccgccgatctgccaaaccccaaagtccggtcactggattcctcgcgcgtgtcgctcacacgttgctcgtttcttctaccacctaccccacgtgcatgtgcatgtgacggaagtttcaacggcgattcatctatggttcgttttttggctccccttaaccttaagcctacttacatctgtctcaggttgtagtttgatatttctccctacttagtatttaggtgttctttacttatttttcgttatttgattctgccttgtctatttcaatatttgtttatgagattatggcagagacgaaatcagatccaaaaccactagttatttctatgtggttctcgtgatgtctaaaatcacggaccataaattgattggttcgaattatttagaatagaataagacaattcgactttatctaaggagtattgacaaagatgatcttcccaaagaaaaagacaattcaagaaaagtgtggctacgtggggatgctcgcttgtttcttcaaattcaaaattatatcgataatgagataattagtttgattaatcattgtgaattggtttaaagaactaatggattacttggattttttgtattttggcaaagacaacatatctcgcatatatgatgttgacaaagccttttatcgtgtggagaaacaaaatcagtttcatatgagttattttatggcatttaaaaaaatatatgaagagcttaatgtgttattgtcatttagccttgatgtgaaggttcaacagcgtgaacgagagcagatgactattatgagttttcttacatgagttttcttacaagacactcatttgaattaaactctacaaagtcacaagttctctctagttttaatgtctccctttacaagatatttttattcgtatttttcgcacaaaaactacctcttcaactcctcttaatagcgccttggtgagtcgtaacaattctacaccaggaaaaaactctattccaagtagatacaatggaagtatctcacaaggaccgataaatcgaacactagaatctgaaagcaccatgactattgtaagaaaccaagtcacgctaagtttgagtgtaagaagttagagttcaaaaatcaacaaaacattccgctaatattgcaagcactagtgatgcatctaacaaatctatccttatttctgcggatgaatttgccaagttctcgaggtatcaggaatcacttaagtctccatctccttttgtcattgcagtaactgattcaatagctttctttccaaattctcaaaatgggtcattgattctgatgccacagatcaaatgacaggtaattctaatctttttttcacttttcagtctcgtagtcctacttctactgttactatagctgatggaccatcatctactggcattattttgttagtagtgtatgttgatgacatcgttattactggaaataatactaaaggcatctcatcccttaagtcttttattcatacccagtttcacacaaaggatttaggggtgttgaagttactcagagtaaacaaggtatttttatatctcaaagaaagtatgtacttgatttgttaactgagaaagaaaaattgaaagcaaaactttgtaatgctataattaatccaactatgcatcttacaagtgatggggaaccatttgaagatcctgagaaacatcacaaattggttagaaagttgaattatctaactatgactcatctagaaattgcattctcggttagtttcgctagtcagcctatgtcttctccaacaataaatcattggcagcattagagcaaa

SEQ ID NO: 220405 - DNA, 2971 bp, Cannabis indica
aatcacgtaatacgcctatgttagttagggtgttacagcggtactccaaacacttgagaagatgatgagagactttttatgggaaggtggagatatctcaggaggggaacatttggttgcttgggaggaagtgtgtagacaaagagaggaagggggcctgggaattggacgcctagacatgcgaaataagagtctgttgatgaaatggctatggagattccctctggaaacagacacgctttggcatagagttataaaaagtcgatacggaatgtcagacaacttctgggatactaaaacaggggaaagaatgtcctctcgaggaccttggaaaggaattgcaagtctatatggtgaatatttgagtttggtttcatttcaattagggaatggggagaaaatttgattttgggaagatgtgtggattggacagaattctctgttgacctcctacccagatttagccattttggctagatctaagaataagtgcatcaaagacatggcaataattgaggaaggtggtttcagggtgtctacttgggactttaatttcagaaggaatctgttaaaaagggaagtcccaagtttaatggagctggtgcatcgattggaacatgtgaacatagcccattcctcgattgatagtacgggttggaaaccagagtacggaggctctttctcctgcaaatctgcctttctttggttcacctcaagtcacggatcatcggacttcgaatggaccaaaactctatggaaatgtagcgctccggtaaaagtaaaagtttttggatggttagtggctctaaggaaagtaaatgtgcacgaggtaataaaaaagagaaggccttacatggacatatctccgagatggtgtatttgctgcaagtccagtaatgaaacgaccgagcatctgttcctccattgcacatacactcaaaaaatttggtcattactttataaagaacttagtctggactgggttatgccttgtttggtgacacagaccctaataagtaaaccggtgggaagtaaaagaaaagttaagctttggagaactacaacgttagcactgttatgggcggtgtggaatgagagaaatagcagaattttcgaagggcaagagagatcagcaaactttgtctgggagaggataaaattttggacaaccacatggatttttaaaaccaaacattttgaggctttttcttttcttgacttaagccgggtttggagtgttttgttgtaaaacccaggttttctctcttttgttttcattgtgataattcattgtattcttacaattatgtaccatggttttcctccaccacaagtgaggctttaatattatagggggagaccggccatatggcctccttctcttttttcaaaaaaaatatttttacaaaaaaaaaaatactttcgcttaaatgatattttaaagatttaataattacttattaatttttgttactttcttttttaattatatattcaccctatttgaatgagcaattttgtacaaatgaccaaaataactttataatattttgggttgagaaaattattacatgcacaaaataaaagaataaggtgcaaaaatatatatactgatattatctaaaagttgatttcactttttcaatatgaagaaaatttggtgcaccatccttgatttgtaactaatttcacttgattaaatgaaactcccggtatggactattaattcactattttttttttaaaagaaagtgttcattaataaaaattaggattaaacctcatggtcattataaataatatttgtcaggatggctaacacctcaatgataccaataagatttctggtgaaagttcatcaaccaacattataagcagcaaaattacaaagcctaaaaatcttcttatggatgtaattaactcggtttgattaataaaattatctttcttgattaaaaatattaataatattttaaataaaaatattaaagcaaattaattaaaagataattatggtaaaactatgtatgtaaacaaatgcaaatgtacttaagtaagtaattttattatagttaattattaatataaaaaaaattaataacttcgtaagtaaaattatttttttgagataaatatttatagaaaaataatttaaattaattttagaaaaaaaattaataatccaaattaaaaattaataatttttttaattattaatattatttaatttttataaattttatattattaaatattattataatatgtataaagttttaattgtatacaagtagacatatcataaaagtatacaccttacgttataataaccacatgatctaagatcaatggttaaaaaaagtaccctaccggtaggaaacttgaactcgggaccctaccatagtcctgcccatataactaatacatttatatatatatagggcaagattatggtaggacctagcaaaagttccctactggtaggtaaatttttttcgacctttgattttagatcatgtggttattatgatgtaatgtatatactcttacggtaagattgcttgtatacaattaaaattgtatacatattataataatttttaatgatatttattttttaaaaaataaaatgatattaataattaaaaattttattaatttctattttgaattatcatttatctttttattaagtttatttgaattatttttatattggtatttatttttaaaaaataattgcttctcctaaactcatttttttattttggctttttataaaccttaaaagcatatgaaagcaaactataattgtagtatgcttgtagtattaattaattaagtcggttatattttattttttctgccaaaaaaaaaataagtttaagaaaagcaagttggtacggtaccaattaaaaagcatctaaaataatttttataaaacacataattgaaaattttgaaagtaaat

SEQ ID NO: 220406 - DNA, 1866 bp, Cannabis indica
atttgcttacaactactaaacctctatatattgtgcaattttttttcccatttaacaaaatctcaggtcaaaatctctattttgattcatttcgtaaaatatagattctaaatatatatattcaatattaaacccacaaattcatatttttttaagcaaatatttagtttttttttttgttttttttttttttttttttttttgtaatggaaaatagtagttccatatttcagaaaccactatttacaatgaacctaagcaagtgtgtgatttttatgacgtgaggataggcacatatacctacaatggtactttggtttgcacaaataaactaactaaagtttgtgtttagtaattattttttaatcgatttgctttcttatttagaaaataaaaatattttactaaaatatattttataaattatttttatttttaattttttaattgataattaaaattttgaaaacaaaaaaaggtcactttcaatttttttaaataattttttttttaataatattttggactccgacccaatctagaccatgggaccttgacctagacccttaccccgacctagacccaaatccagatccaaaccacgaacccaacctcgacctcgacctggacccaaaactcgaactaataactctgacccaaaccctagccccagactcggaccgagaccccaatcttggacctggccccggccccgaccccgaccctgaattggaacctggacccaaacgccggaccagaaacccaatcccgacccagatcccaaaccctgaacctgatcctcagacccttgactcggcttgtagactcggacctgaattccgacccaaacttggacccgagacccagaacccggaccagcccccgaacttagacccgagcatgacttaataaagttaaaaaatgaaaataaattttataaaatacacttttgttttctatatttaaaatcgaaaataaaagtgattataaaatacattcttatttttaaaaaataagattttaaaaataaatgtaattaaaaattttaaaaataaaattattatcaaactcaacttaaataatgagaagactttagttagaaaagaacacaatgtgatggatgaaaaattatttgggaggggggagacacggggtccctgtggtgacatgcatattttggttgagcgtcttttttaactaaacaataatcacatgatataatttaaacggatcagaaaaataatcacatgacatagattggaccacaaactacttttcaaatcttttgtatgcccgtaactaatttaattaattgtgtattaattattatttttattattattcttactatttttttttaaaaaaaatttatactaactagtaattaaaaaaaaagtgcaacagccaccagccttcaatttttcttttagttgagaatcagccttcatctatttaagccacgataatttaacaagagctgaaatgtaaagttgtcttaaatttaaaaacgaagttagtaaatgtcttatttttaaaaaaattaaaaaaatggtcaaatataataacttagctaataaaaattgtaaaaatatatttattatatattattcttttaaaatatatatatataatattaaattgagttatataattttttttagtattgcacatattattatattgtaacaaaaatgaataaatatattaaattattaaatatatacaataatatttggtgtatcgtatcattgaaaaataatatatcgtaataataaaattataattcatcagaaaaaaaaattaatatgacaagactatgatagggtactttttttaacctatggattttagatcgtgcagttatta

SEQ ID NO: 220407 - DNA, 4238 bp, Cannabis indica
acttattagaagcttgattatatcggccatggtccccacactagatgagataatatatacctcattataactagctgacactcattgcaatactcccactgagcatgcagtaacttgacatcttttacattcaaatgggattttaagatttatcaattttgaggcctagtccaattttccaatgagagatcgatatgacagaacatattatagtctcatctgataactatgtggtagagattttaggattgcttaaagctaaaaaaatatcttagagtagtgccactatgtgaaaaataaagattatgcaatttgctcattttttagcattctcaatgatctatcaacagaaatgatcatgtcatgctagatttgttgaaacaaaacatatgactcttacacaggtaaagacaactacttcaaatgtcataaccaaattcatttaatctactatcgatcgatagggtagaaaagattgtgtggttcatgacatctaatgtgtttctttcaccatctaagcatctacctaacaataaaatcatcaatagaatgattaaattacatgtatagatctcagtaataattgtgattgatacggagaaaagtattgacatgaatcacaatttttgataatggacatgtaagaacttacgacgagtaagcataagacattcaataaagaattttaatctcataattatctaataaggccaattgcgcattttgaatatctagcaaattttattaccaaaggtatcaattagttattgacaaaaaaaattcataataaatgcgcaaatcgtgatcaatgttttattacatattttttgataatatatgccccaaaagaatttcatgataataataacaacgaaattcaaaaaaaaaattcttaaaatcaccaaaggcatatatataacaaaattatggaatgataatcaaagaaaaaggaaattgaatgagattaaattaattaatgataaattcatcacaattttatgattaagaaaattaacatgcttagactcacaaaagatgaatacataagcactcaattacttattcactaacacaattatgatatgaatacaattatattttcattcaataaaaaatataaaaagtaaaattgagagaaaaaatatatattttattcaatttagttatgctatcatgtgtcaattattaatttaaattgtccaaactcaaaatataatcacacatttaaatggaaatattaaaatggagtaaaatggtgaaaagttggtccaatttgggcctcccaagtgccctaacacgtcttaaatgttttttttttttttttttgttctgaccgtaggagatgtcgtttttgaaaaatgacatgtcattcgccgaaaacgatgcacatccgttaacgaaaaacaagacgtcatttgtctgaaggagagccaaaactacatgtcgtttgaggtcatccctgacctttagttgagcacgtgggtcagatcttggccgtgcgatccgacatcgaacctgggtttcagaccgattgaaaacaccacctccggtgctttgtttctgatgccgtttgaggggaaatttactatttttcatacacaatccatttccgatacccatttaagccaagaaactctaaaaactcaaaaaatatgttgcatattttcatccctttatggtgtaaaaaaaacaaaaaatttctcttttgtctttaaataacatattagcccaatatatgtttttaagagggggaggggggagtgaattaaaaatttaagcgaattttagtaaattaaaacttttaacacaaaactatgcaattaaatacttaattaaataaatacaagtaatatgaaaaacaatcatgtataacaaataatcaaacttgtaaagtaaagagtttaagggcaagaaattgcaaactctcaatttttacaaggtgcggtagagctaagccacttacgccctcggtcttcaaagctatggacctagctttgagttccagtatcgagctaagttaacaggcttgactaacccttacaactggaaaatttttaccaaggtgtttccaaacctcatacaatagttttgcactgccaatgactattaacctctttctcagatttttgtagtgacaatttcactataaccaggttgtttacaatactggtgccaacctcacctcaatcacaatatagaaatgtatttgaaattacaagaaattcactctagaagtatgatgatacaataaaaacctagagtgataagcaagcacacttgaaatatataaaatttttttagcttaaagtgtgtggaaagtgtttgttggattttaaacttttgagctcattaatctcacttaaatacgttaggtatatgatataaatgcttagccaacttttatttttgagtgaaaatcgagtttatatagtgttggggtgaaaaatagtcgtttatagccgttagacgcgaaaaatgagacttccactgggcaaatcgattcaccagtttccaaccgctaaaccagtttcaggtgaactggttaacctttttggaactggttaattggattccaggcagtggcaaaaagttcaatttttcgcactacaatgaccataactctctactcgattatccattttcagaaattctaattttgttctcttagttaaatgatatgtgatttaaaaagtcaattttttttcgaaatattgggtgagaaaacttgtcgcataaggtagtgagtatgctaaaatttgaacttataaactctagtgtactatgtaaatcactttaacaagactaaagtaaacttataccatttaattgtatgtagtcttgatgtagatgaagtttttagcttgatttacatattttgatccaaagatgattttcccgagagttgactttgtctttgacttttaggttgacttttgactttgagcttttgaagtcttcttttgaatagggtcttgaattcttgatcccttgatgaatcttttgctcatatcaagtatgaagtagttgatatacttgttgaatccagttccgatcacttttgagaattttggtaaatttacccttggagttaattttgccttaaaaaaatttattttaccttttaattgtgctacaaaatcgaaaactattagtacaaataatagttaaataattgttaatcatcaaaacaagaagacctaaaagtttgagttaacatcacatacccaaaatacttgtaataaaaccaatacaacaattcaagaacatccacagtttaaattttatataaagataaagtccaaaaattttgaatatggtttttcacaaaaccaaccgtgagttttgaaaaatgtataggtaagaaaatataaaagttaaattaataatttgagctttaaaattagataaccaagctttgatactaattgttaaaaaataattgaacatcaaacaaatcaaacattaacaataacattattttatttaaggcatcaaatgcaatatatatatataataaagattttaccttgtaataatcacaatgattatcaaacttctcttgtgctcatcccactcaaaaacaaatgtgcaaggagtttctatgaacacgactcttctacactcttcacctatcttagccacacacattctacacttattatcaccaaataaaagggtacatctattttaatgaggaattatgggtcaatgggccgacatgcccaatgtgaaagtattaattttcttggtccaatgggctgaccaagcacattttagagtgtgttcatgggcccggagcgtgttagtacgttatgttcatctcattatggcccgatgttaataccatgcattaccgattatatagttatcattatactaataccgacgctaagtgagcaacacttaattatgttagtccacattaaatattctaacactaataacttgtatattatgttataaaaaaatatagccattatagttacttagttagatgatgtatttaggctatctccaatgataaaatttaaatttgatgttaaattaataccaaaaaattattatctcaacactattttttttttcaaatctaatcacaacactaaaaattatactaaatgttatattattcattattctattattttattaatataataaaaatattttaatactaaatatatataattatttaattttttttcttaaaagtataatttaatttttaaaaactaaaa

SEQ ID NO: 220408 - DNA, 3615 bp, Cannabis indica
ttccctttatctcacacgtgtcctccagccaaattttgggtataacaggtactgtctttagtaaacttgaggatatgagtgatttaatcatctcttattttggggatcttttccattgcaatggctgtgatactgaggcagtcaatcacattcttgattgtttaggtccccctcttgaggattctgaggttgatttcttaggttagccttttacttttgatgaagtccgccaggctattttctagctctctggtgataaagctccaggtcttgatggccttaatgcttacttctaccaaaagaactgggatactgttggtaccgatcttgttcatgctgtcttagactgtttgaacaatgagactgatttatctgaggtcaattccattttaattgtccttatccttgaaaaataaagggccagcacccttaaagattataggcccataagcctttgtaccaccttttataaggtccttttctaaagtgtaagcaataaggcttaaaatggtgcttgataatctccttttcaaagtgcttttgtggttgggagagtaatatttgataatattttgattgcttaggaggttgttcatgctatcaactctcgaaagcatggtaaatgtggttgggctgccttaaagctcgatatcaaggcttttgatagggtcaattggcagtacttgaagagtgttatgcttcattttaatatccctgtcaattttttttcccttattatgaagtgcgtgaccacttctagcctttcctttttgatcaatggagttgtcaaagggtcgattaaaccttcccggggccttcgacagggggatcctttatcaacctatctcttccttctctgtgctgagggattatcctctctccttcatgctcgtcaaactgagggtctttccaagggtgtagccatatctagaagggctccttctatttctcatctctttttttgcagatgacagtcttattttttgctctactaatagggactcttgtagctctctaagggatatctttcagctctattcctaagcctttagtcaggccattaactttaccaaatcatccattttattttctcctaacaccccttaagatataagaaaccttttcttcaccacttttgaccttgaagattggcctttcattagaaaataggaaaaagtggagagtcaataatagtctaaaacaagccatcacatatgcaggattgacttgaatcactgccttaagaagtgtctttttaccagccttggagggtggtgtctcatgctattccagttgcttcctcccttttttgctagacatattattgactctccactttgtcctatttgtaaaaacaacctagaaacagttcatcatgctttgctagggtgttccagattgagaaaagcttggaaatcttcaaggtttgtggatcattattataaatataaacaccttgatatcagtgattttttattatgctcttttgatgatttggataaggattatgttaacatttgctgttttttttttatggactctttggaatcaaaggaacaatcatcttcatcataacaatgttatcacatcttctgatatttttaattggtgtgttaactactttttagaatacatagatgcacaacacataaatcaacatactagtgcttcagttcatttgcaaaacagtgtctcagatgctttgcaggaggattctttacaggttttacattgatgttgctcttgatcatcatagcaagaagcatagctatggtattgttgttgtggatgatcttgatagagtgaaagttggcatagacaagccttgtgttggaagtgctcctactgtcatagctgaagtcaaggcaattcatcatgctgtacaatggattcaattgcttcatcttccagtggatgttctaaaaatagattgtaaaaccattgttaataaacttaattcttgtaattggaatgctagtccactagatgacatattaattagtattaaacacttgttatccttcagtcctaatcttaaggttgtgcatgtgtatagggattctaatcaattggctcataagattaccaaactaagattaggactagataatgagttggtttggaatggtcctataccttccatgtaacttgtttgctttgtactttcattgcctattctaatgaagcacaagttttctctctcaaaaaaaaaatattagtcacctatagttttaaaaattaaatctattaaaattgtccataaaaaacttctcaatttcaccctttcaatatctacctcaatcaacaatcataacgttaacagtcattactatagtaataattcattgactttaagtttattttctacaattataagaaaataaaattagtcaaattattataaataagtaacataataaaacagagaattatattcaatattcattaagaaaattatactaccaatcaagtaaatcataagcttgaacttcatccaaatatttcctcatttgaatccctcattattctacttcatccaattttgagtgcaatctagtgtctccaccatcttaagactatgttaactcgcttttagccaacgataatgagtcaattaaagcgatcagaagtaattaataataataaataggcaaagaacacaaaaattgttatataagttcgaccatgtgatggtagtaatagcatactcctctttttcttgtattgactagtgagaaaagaaccaaaaaattcttgatcttcctcgaaatctcttacaatggttttaacaacttaaatgctctatgaaatgaatgatttcagatccctaaatagtgaaatgactctactatttacaggaataattacattagtttggtttccaaaaataaataagaaataaataaggaaacttaattactttatcaaatcaagagaaataaaaaggaaaactagataggtttcctcatttcttctgtcgaaacggatttatctcacaaaatcaagatgtgatcgtgatttgcatgctagaatatttagggaaagtatccttagaagatattctagttgcatttactctggtcggtacatgcgagctgactgtgaaatggatgttggtcggacaacgtaacattccttgtccggatattcagcttcttcaaaccaattttttaattataaatcactctagacagtacatcatgaagcgaactacccgtccaggttacgaaatcctatccacgtgtcacccaaatggatgctacgtcactttgtgcaggaatcgggataatatttccccaagtttgccgtggaacttcttgctcgcatgtgaacttattcaaacactaagctcatcggatgggtgacatgtgtttactctttgtaccattcttgatccgatgtgactaatattcaaatgtctcttcagtatatggggcatttaatgttgtcttgagatctggacctcggttgctgcactgacaattattgtatatgcatgttttcgtatgtacttcccaacatatgtgatgattatattttcttgggggaaacccaaaatttgaattttggattactatattacccctctatctgcctatataataggtcaaaaat

SEQ ID NO: 220409 - DNA, 2128 bp, Cannabis indica
tcccaacagtttttttgctacagtgctaaactgatgggaaaaacttccacttacttttcccaacagttcttataattgatcattttctaaaccgttgggaatagccctttttgtagtagtggttaagcaagttttttatagtttatattaatagaacatactcttgagttagatgtagacactcattagatgggagaaaagaaatatttccttgtaaaataatttttttttattaaagtaaattgtaaatgattgttgattataatataaaggaaaactttaaaaaaaaaaaaaaaacaaagaatcatgcataataagacttgtattctctaatcaaaattatatgcagtattggatttcaaacagaaactgatcaattatatatagtggctattacaagaccagtatttatatcatgatgtatgcatgaataattaagaacaaataataatattaatgcatatattatatatatatgacttaatttcattcatccttaaattacaaatacgtagaagttttaaatatttatttataaatggatatatatcaccatctcgagactcgaatgatcatcatgactacagtactggatctctgccttatttagttattgggtttggcttcaacagcttcacctgcatatgagcagcacctggcgcaccctcttccatagtaattgctcctacagcaaccgtagtagcaacgaccaccgccaccgccacgccctctgcggccacgccctccgccattgctgtaagggccaccaccgttatcgtaactcccctgccctccaccgttattataactgccttggccaggatatcctccatatttaccatcctctaccccctttacatttgcatccacaactgcattgcatggagtatacatatactataagtaagacttaattttcatatataaatctagatcacaaactgctataagcacaagcataataataatatgagtggtaaggtacaatttaatatgaaggtgaactacattgttttatgtatttttactacttatacaattattaaaggtaaacaagatataaaatgctagaacaatttaatatgaaggtgaactacattgtttttaaatatatatacgtatcaatattatcattagactccacgatataaaaacagctgactcttgtttgtatatatatataattcataataattataataataaaaaaaaaaaaaaaaagcagacctttgttttgttgagtggaagtttgagcaaggtctgtagctgcaacatctgaagagatgagaagagctacaaatgcaagcaaaagagccagcaataagaaatatctcgaacccattgatttttgttttggctatatagaagagtaatgtgaaaaccaaactctttctgtattcctatttatatagctagcttacaaacaaacaagtgttaatggataagagagcaattaatttgcaggatttggccctacaattgtagttgggagttggtggaataatttatgagaaatgctaaaccctaaaatctgatgtctccaaaatgatgtggtattcttgtcttcaccaattgtttcaagacacattttagatgtattaatttagtttagaatttgttaacgaatttattatataataaatttgtataaatgatgtgtactaaaataattgataagatagaaatagcacaccaatttaaaaatagcagattttatttattttttttcctagcctgtggtgcctaatactgtatcctccaaaatgtatataatatattaggttataatgatttttatagaatattagtaactaatcataaagctctttaagtgcataacaatgtttaattatatttattcacaattatactttattagatatattattgtaataatttttttctctataatatatttaattaaataatctctcaaagtcttagagcatctccaatggtagcattttttgaagatgctctagatttccacatcattcaaaatataatattttattttatttttcttcccacattcatttttggacacctttactttttaaaaaccacttctaatggtataaaaccttttaaaaatactataattatgatatcacatattattatatat

SEQ ID NO: 220410 - DNA, 2426 bp, Cannabis indica
ttagagagaaaaattactaattatgaaaaatgctactttttttttaagggtatctgataaatgttaaaataacaaatgtaactatgttacacaataggtagaggggtttcctttatccaaaagtatttattggctatcctaagaaaacatgctaaaactatttcataggtcacaacattatagttacaacttatataaaaaagagatgcctttgaaaaatctaaattaaaataactataatatcaaaaaagaaaatcctcatttgtgtcttcgaaaaacatctacaaaatatgattaatgtggatgctgctctttttcatcgcgataactcatatggttttgggattgttgcaagatatagtttgggcaaacttattgaagctaagacttgttacaaggcaggctcttactcggctgaagtagtggaagctctgggattcaaggaagctcttaattggattaagagtactaattggcaaaatgtagagcttgagactgatagcctcctcacagttcaagcaattcgaagcaagcagaaaatgtcatctattttcggcttaataatccaagattgctgtcatttattgtctactctacctaatgttaaaataagttttattaaacgatcagctaatcgagttgctcatgctattgcaaggcattctcgattctcctctggttgtagtattttcgaacaaactgtttgggctgatttacaggctcttttgtattcagaatgctattaattcaatgaagttgatatcatatattaaataaatatatgataattttcatatcagaaaaatatatattctaacataattttatgatggaaaagttagaacttacttatgaaatctttattggacttgtttgctgcaaactgatactagtcctaccaaaataaggctaaccatactagtcctactaaaataaaactggctaggctgatcttactaaagtaaaactagtcgtattggtcgtacaaaaagataattaaccatactaaccttacaacaaaaaactaagcattgcttaattggaaggtcacactctacacctattatcattgcttaagattcgaaactctttactattattttgagtttccttttgctctgaattttaaaaatatgtgtctttttttttaaaaaaaaaaataattctatcgtaattgaaaaatatataaacttagaaattcaaatattgtaagaaaaagtaataataaattatttttttaaaatcttacatagtgcagtgatattattatgaagacattttctaaacattttccaaaatgttaaaagaaattatgtacaaatttcagttcatccaaacttgaatcataaataaattctatacttcacatatgtggcgatttttactaatatctttactcattgcttttttttttttttttgaataatctttactcattgctttgaatatataatatattactataattatatgcgtaactaatttgtcaacacattaataaattatctcaagaaaaataaaagcaatgcaaccaaatgtataaatttacaattatttttatagtagagaggatttttttaaaaaaaatataatttaaaaggaaaaatcctacaaatatcatagttcagagaaattaaaatcctatttattctatatatatatataatattatatgacaccttcatattatcacaagttcaccgtttacctgtttataaatatttcgtacttgtatttacattttatgatatgttatttaatcgtatcgtgtcaaaattatgttgacgcgaaacacaatatgaatacagaaattacgagttgtactcaaagtataatttaaaatttaccttatttactgtttaaaagaaaaatatttttttaatggaaatatgtcaaatttattaataactcaaatcaaccattacaatgttcagataaaaaaaatcagtttcattttaatacaattttatatttgatttttattttttattcaataagaaacattaattatgtatgtttaccgagattttaaaaatcaataaaaaaataaattaagcttcaagaagaataaattaaagataatgcaacacgaatttttacgtggttagggtgttaatgagtcttactccacaagtcaattttattaagcttgaaaagctagagagtattcttacaaaagaatgtttttgccaaagttcaagaactttaatctttagcccttgagttgtgaaataattttcaaaccctttccatgaaggggtaatgttctatttataggcttgagtgttgtttatgggtaaacccgaacccgttaaggttgaaatgtgttaactaggcccaatggggtaaaatcagggccggccctagtcataggcgggctaggcccgtgcctagggcccacactttccggggcccaaaataaaaaa

SEQ ID NO: 220411 - DNA, 2988 bp, Cannabis indica
acttggcatacatttacctgtagccctttgctgctgcaatgaacgccaacccaatgccagtgttgccactggtaagctcaacaaggacagtctttaacccacccattgcgcaagcatacccaaccagaaatagatgttagttgagtgttcagaaatttacaaatcaattacataagtggcagtctctcttgcatgaatgagcaaagaaatatacatatgacaaggaatgaacttcacttgaacttgtaagaagatttcatcaacatgacaaaccgtgaaaatgagctctggtcatatcatcctatatgagtggccaactattatcatatctcaagacataaagaatcttcatggctaaccttccctggcgtgattagacccttctcctcagcatcttgaatcatactgtgtgctatcctgaatatcagaacagtgagacaaaatgcattgtaactcaaccaattaaactaaaacaaacccaattgactagaattctcataccaaatacaattaatgcacattaaaaagaaatagaagaaatataatatatctgtgcctgtctttaacactggagcaaggttccatcatttctagctttgcagcaacgcgggctacacagccatccacaacattattgatataaactattggtgtattgccaatcaactacaaaatacgaagagaagatcattagtgaaacggcatacaaagcaaaagaagaatcataagattaagttctgataaagacatattacttcagtaacatctttcttgattctagacttgccctccatgttttttctattccaaacacagtgaattttctcctctctatgctccaattgctagaactgccaaagaccattttgtaaacataaaatgtacaaatggttaaaagacaggaaaataaaaaaggaaggtaaagcatctatcatgaattaactttatcacaagaactgagaggcctcaggacaagtgttaacatctcaatccagtttctaaacaatttgaatcaaagaaaataaagattattcacagagtataataagtagtagagaaagggcacatgaaagtttcaagtacccagtaattgaaacagatttgtgaagatgaacacaccaattcagaatgttttaagaggatgtaaaaaaaaaaagtagagagagagagagagagagttaaagtcagttcatacattataaattcaatttgcttcaaatcaaaaaagggaccagtctagtaaacctgacctgaaatgacttaagaactccacatacaggcgataacaacaactatcaactgggtgtggataagcagcttacagtaaaaatctcataccaccctttcgttttctctcaacttgtttcggccacagtggtcaccgcacttattgtgtcgactgagtttagagtgttttggactgctatggcttcttttctaccctcataaacgggtaactctaagttctaaacatttttattttatgagtctaggctgtaaagattataaatcatgacattttttttttgtttagtgtaagaattgtaatagaatcgttattatcagtttgtttttatttttaaatctttgtaattgttttacattgtaatgttcattacttatttattgtaatccctattatattataaaaccaatgtaatgcgattacattgttagaaaatatctattttgttttttttttattacttttttaaaatttgaaatattaaaaataagaaaactaagaatatttttgtcaatatacaacttattaatttgattacaatgttcattatagagttaaaccaaacatcataattccattcctattacaattcttattctattatattacaattactattcacattatattacatgacatcaaagcaaacaccaccttatatttaaattagaaaacacgcttagcgtgcctttgtattttgtttagtgagatatcaaatttcaatttttttgatatttttttaataatatgagtaattatatttttttatttttattccaaaagtaaatttaaatatagtaaaaaaaattcataacaaccgaaaaagacaacattaataattaataagtgtcaatttattttaccataaatctacctttatagttacatgtcataaagtacttatatatttatatattctcattctcattcataaatatttcgaatgatacaacaatagagatgtatacatatatattaataataagataagatagataaaaaatttacaatcttaaataacaaaaatgcgtatgacaataggagcaaacttgttctctttcatctagttttgattttattttccaagcggctgaatgaaagcgaaagaacttatattgttatgttggtagatatttttgtagttttttttttaaaaaaaaattaaataattattaatcgtgtagcattttttaataataaatatttataaattacaactgatttgattcataaaaaaataattataaattattatttggaaacaattttatagttagaagattatttttaagcatatgatttttcaaaaaatatatacgtatgtatattttttggttgatgatattttactttttttttaaataataattattaacttaaaaaaataattaataaaaaagaaaaaaataaataaaaaggtttaatgagtaggagagaattaacaacaattttattaaattataaataaatatttttatattttaaatttttgtagtcactaattagtaaattataatttaaaagtactatataggttcatagtatttagtgttagacattaattaaaaaatttataaattaaaaatttgtaagtttggtatatatagtcaattaatattttttagtcaataagataaaagaaaatattagttcacaataatattaacatatttttttaaaggtttctagtatttttttaggcttaattaggattttttttcccctaaactttgacatgtacc

SEQ ID NO: 220412 - DNA, 1651 bp, Cannabis indica
aaacacagggtccaatctgtaacttttacaaaacacagggtctaaaatagtatttaccgtattttgtatgcgttatattccaccaccaaaaataaaaaaattggagggtcgtcacattgcaatttcaatagggacaaaatcgtcattccaccacttcaacagtcgtcattcatcatgacagcgtgacccatgttatcattcccctcacaaccaagaaaacaaaacccaatcacaaccctccacgtacccacccgatcaaaacccttttaacggttacgatcaaacaacacgtgcgaaaccctactgtcatattgtaagtctgaccgcaccctacctaaaacccctcctctagaagcggcgcgtgcgaaattacacggctctgtcctggaaaagaacaaaacggagaaacataaaatttggagagaacagtaaagtcaaaccataaaagtcaaccaataggggtaaaatggtaaattcacaaaaataatatatttaataataaaattttgaaaatttaagcaaaataattaggagattaaataaaagtaattaaaagctgcttcgtcgtttataatgtttttttattttcgtagttcgtaaattggatttaataaagagttcaagtccgggtccgtagagagagacagaagactttttagagagagagagagataaaggagaagaagtagaggaaaaggttttttggttgagctggttttgttctgatcttcgtggttggtgctaaagaatttggatcttcttcttcttctttcacaaattcttgtacagattacgtctggccctttttctgcaatttttttggcagaatttgctggctaaacaccaagcttcgtttatctgatctcaggttagtgtactgtgttctaccatggcgaaaagggttttaaaaactattcttttagggtttactgagagcttttatagttggttagagcgtaaactgtttacacctctgcggaaatttcaaaatgtttatcaatttttgttttgggcggatttttcgcgtggttgagaacctttttagcttctagagatctgtttttgttaatgggtaaaattttcttaattttaaatgtgttttttttaaaaaaaaagtagaaaatttgaaggtctcagtcagttgttgtgggagattattttgttgtttactttgcgatttttggaacttttattgtgtggttcaaaggaaaaatcttcatttgtttctaattttgttgtgtaaaatgctttttctggaaactaatatatcctagggtttcagtttgtgcactagcaggatttgaccagaaaggtctgatctttgtatggttggcaccgatctttgcaagccctagtggagaagtaatggatctttaattatgtcaaggcctagggcttagtcatttggcactattatttgggggcacttttcaggtttgttcccatctggccactttattctttcaatagtttatttcttagtatggtgctcactaaaaagatgccatatttagagttatcagcttttaatttctatctttgggtttagtttattagtttgccttgatggttaatttggttttaaatattttatgcctaattctatatttagctcgggctgttagttgcagtgttctctctctctctctct

SEQ ID NO: 220413 - DNA, 1995 bp, Cannabis indica
atagtatttaatttaaatttaaattaaataatatttattataaattaataatatataatttaaataaattaaatttcttgatttataataggtttgaaaaaaataattattaatgatttggtgtcagtttttaggcttttaaattcggttatatgtgcatatggcgtcggttatttgtatataactgatgctataatgcataaatgtcgtcggttattatcaaagaaccgacgccaatgggtaacatttagcgtcggttatttttagctttacaacgtctcctggatcaacgtcggtagtgaattttgccaaaatcaatactgaaaggccttaaaaatacctttaaagcctagatttgtagtagtttgttaaacttgcatcactcttctccttgaatacttctcctaggatcttaatatcttatgcccatgatgtagaatgatgacaccgtgtgttttttccagcagtttggacgtcttcttccctgccttaccctcgatattatcttcactttctattgcaacttgaagtccattccgtaccagaagagcttgcatcattaccctccacaaaccaaagtaattcttccccgtaaacttcttatgattgaacttcacattgtccatcgtccccagaatcggttcttcaaacaactaatgttcacaatcttcacctttctattcgaaatcgtccatgatgctctgatacaaatctgttgggaatagcttgagcttgatcaaagttcaccaaaaccaattctacaataaacaaaataaatagagaaaaataatagtggtttgtgtcaaaaacttttacaagagttaacttctaaacttttactagatttcttatacttggttagttgatagttagtgtttcttgtacttggttagttgatagttagtgtttcttgtacatggttagttgatagttagttaactaaattaactgacactaacaactacacttactatttgctacaaataggactaggttcaatactataatcataactgaaagattaaagtgaaaggattaagggtcactcctttctaataaaaagagactaaaaaatttttataaatgtcaaaacaaataaataccaaaatatctatttaaagccatatcctaacgacttaccctaatatttacacacactttctatgtttcatattctaacaatatagttaccatttcaatttatttgttactaaattatttgccatattattagtttgtggaattgcaatcaattggttgcaatgtaataaataatcatgtaaacatttggttctaatatcttatctttttatagttggtaggaatgaggaagaagtaaataaattttctctctacgctaacctctcttcattgttggtattgtcatttcctaggttccaaacaaacaaagcttacaatcttctccaaaaatgggctgtacaagaaagagagtaggcccatctcattaggtttaagctttttaggtaggcctatcctatataaactatataaaatggtcttctcgcacatgaggttgtgagctgggcctaaaatcaaaacaatgccttttgtcaaaatatcatagctttttagctagtattttgcctgagaccccacttcacccaagaagaaaaaagaccaagccctaccaacaaatttttatacaaagacattcccatcatcacatggacttgtattgtgcatatgccaattgcaaaggtcgaaaggggtgttgcttgaattgtctgtattagaaagatttgaagttattggaccccaaaaataaacacacacacatatatatatgacagctgttgtataattagatattttaaacaaatgaaggtggttccagtaccattggtaaaatgtcacgttaacattcacatccataatcacatcacttttttcttcattcaattttcattcctcacctcatatttttctcctgctcttaccatctttaccaaattttctaatccaagatttcataat

SEQ ID NO: 220414 - DNA, 1890 bp, Cannabis indica
attttctttctttttttttcttgaagttcatgctgattttttatttttcttttttcttcttctcctcctttttggtctttctctaaggattcttaaactcccaaaaatccttaaaattattttgctacaatcaccaaaaatccaaagcacccaccttgtgccttaaaaaattcctctaagctactttgacttttttcaacccaatttttgacttttcttgagttgtaagaaacttgaattgttgaacttgagagggctaggatgaagagaaacagaagactacctgatgagtattaatcccgtgtggctcaggtcaatagtgctaagctaattgtacctaagtcgaagaacttagacaaggtgcgtgatggaaaattgatggaaagtgagcttgtcaaagctaccgttgagagtgatgattagagagatcgagcctttaagcttaggcctcttgttatagcaccctcactaagcttcaagctcaaataattcgagatgattactgtctccctaaaagtattattcgaaagcctcgacttgttgtttcaagggctcttagaatacagactgtagtgtttagttgaaattccacatgaatgcatgtgcttacatgcccttgcatccatggttcatatcaatagctgatttatttggtgtctacctttactacataaattcaaatggctataggatccttgacaccttctttatattctactgccttaggaactggcctattccaactccttacgagataaaatttctttgcaacttgaaaagaagtccaacccgcaaagagcaagacttttaacactttcatcaatttggcccattcatagaaaacatatccaagagtaaatgtgacctttactatcaggagtacttctacactcctgttcttctatcgagacacattaccttccaaaaagttggccattcaaaagacctgctcctcttattgacatgaagaggagagcttatgccattttacttcacattgatgcatgagagagagatgaggaaactctctttagtattgaaaatctttagaaggtggggttgatcatgtcatgctagagagtgtatgctaatactagcttccctgacgaatattggaccatgccactcgagcaaagtggtgaggatgcttaaattgctactattagtttgtctcagactatgatggaagcagtgacttctattcgaactaacacaaaatatctagggagaatatttgtgttcttagaccaagatgatagagaagttacctccgctaggactgctccgaagaaggatggggaatcagtaggtggctgatgctccatgatatgctgtcaacttaccgtcttgtttttattctattgtactaacctctagtctttattctttgaagacagcatgagcttcttggctcctatggcatctttttcgaacttgaaaaggaggattctagtgtcaaaggaaactgagcctctaataagggaagtggttcaaggcatttttgctgcctctactgcttcgaagaagaaggtcatgaagaggggtagaactactgatgctgctcctcctgctcaagattttggaagggagaggtctaacactactggtgccaatgagagatctctgattgacctttttctagatgtaattgaacatggtgctttaaacttaggttcagacttgatggaacaattgtgtgagtaaggctcatggatccttgcaaatagtgagggtgtgattggtgctagggctgagaacatcctgttgcaacggttgggtaggaccaagcctcaaaatgtgattgtataaagatgtttcactgacatcttcggggtaagtgttttgtcttgtctccttctagctttacttttttttttgttttatcatctc

SEQ ID NO: 220415 - DNA, 3389 bp, Cannabis indica
ggtttcaacgatccatagtcctgctagtaatgcctcatactccacctcataatttgattctttaaatcggagccttagtccataatgaaatctaaattttttaggaaatatcattatgatacctgcccctgagccattgtcgtttgaggcaccatctacaaacaacttctagactctctgaactgtttcttctttaagtgcttcatcagagcttattccttcttctaggaaatctgctaatgcttgacccttaatagcggcttgaggatggtatgttatttcaaactaccccaattcgattgaccattttatcagtcttctcgatgcatcaggttttgataatacctgtcgcaatggctggtttgtcaacactctgattggatgtacttaaaaatacggttgcatctttttcgaggcgtgcaccaaaataattgcaagttttttaagtgggggatatctcaattctgccatcaataatcgtttacttatatagtaaactggttgctagatttttcccttctctcgtactaaagctgacttttggaattctttgagacgactagatagatatataacacctctccaattattggtgttgccattataaatggtgtggagaggtgtttcttgatttcttgaaaggcgtgctcacactcctcggttcatttaaattccttattacctcgcaaaatattaaagaattggagacattttatcattatactttgagatgaatttgtttaaggctgcgattctttcgattagtgtctgaacttcctttgaattttttggtgaagccatgtcgagcagtgctttatcttctcaaggttagcctccattcctcttgtgttaactataaaaccaaggaatttccttgatgaactcccgaacgaacatttcttgaaattcaacttcatactgaatttttttcaatattgagaagcattttgcgaagtcttctgcatggtcctcgctcttgattgaatttactaacatatcgtccacataaacttctatgttccaatctatctagtttttaaacataccattctagaggtattggtacgttgctccagcattctttagtccaaatggtataactttgtaatagtacaaccctatgttagtaatgaagcttatgtgttcttgatctgagacatacatttttatctgtttatatctaaaatatgcatctataaaggtcatcaactcgtgtcctgctgttgcattgaataattgatcaaccttagaaatggaaagcaatctttctaacatgctttattcaggtcggagaaatctatgtaggttccccatgttctatttggtttagcaacacacacatatatatatatatatatatatattgaattggggtgccaacaacttttaatgttgcttctggagcactctcctagtatcctacctcgataacaactccaactactagtgttgcttccactaaataaaccatctgaagtaagagattgaataagggaagcacacgaaccgataacaagaaaaggaggaagacacctagttataagcagagtatacccaatatacaaaattaatagacacccaagagagcgtctacttggcgactcaccaaaatgtctactacctcaacctccgccattgttttgagactgctccaagaggaccccaataagagatgcgagtatcatgatgataattgatatgataccaacgaatgcaagtccttgaagggcgagattaaaaacttgatcaagctaggccacctccatgaatgggtaaggaatcatttagcgcaaatgcgaggacctattagaccgcaagtgttagcaaggaatccaagaaggtttccacatgcactaggagctcaggttcctccaagagccatacaagcacctctagcagcagccccgctagcattaggtcctgggcaacctatcggacaattgagtcttcctcctaggccaaacgggcaaatagccataatctccagaggtccccatatcgaaagaactccttgaagagatcaaaaatagaatgttaaagcattggatcacaatgatgaggtgtgggaattaaatcagttgcatgcccaaagacctagatttatgggttaagtcataactttcacaaaaggatgtaagatctatatattttcctcatcatgatcctttagtcacaaatactccagttgccaacaaaattgtagcccgcattttggtagataatgaaagctcagataacaccttgttcaaggctgaattcttagaatttggtcttactaaccaagatctggtctcatgcagttcccaactcactaatttcaatgaggattctctcattcccataggaaaagtatgtctccccatcaccctttgtcctaatatacccagagcacctttaagtatagtactttcgtggtcgttgattgtttgacagcatacaatactatatttggtcgtctgaaactagtagatttcagagccataacatttgttcgacacttgtgcctaaaattccttacccactttgctggagtaggaacagtcagaagagatcaaaaagtagccaacaccctatattgaaccattcatcataaatatatagaaaaatgctaagaatatatggagaaatccaacaccctatattgaaacattcaccaagaaagatataccaacaataataaaagaaaaatatattactaaaaatatgtataccacactaactaaattatatgctataattaaaatatatatactatgacaatataattatatatcattattgtatataataaaatagaaattaaatattatatcatgtaattaaaatatatataatatatacatatattataaatgccaataaaattatatacttacgttgaaatgtgaaaattaatatagaatttcacatatttaaattttaattaattttaaattataatatataagaaagttctacaatgcaccctcctaaaaagggtgcatcaatgcacccatatctgtttcaacatttagtaagaattttttagttctagtttttttttcatggttgtatgcgttataatttttaagtacatcttacaaacttttgtagaaatttaacatgctaaaaatagagttgaaacagtttgttatacgtgtaactcttttatttttatacgcgtatgaaacagactgtttcaacactattttatatattgtaaattattacaattttttttaaaaatttttgcagaatatcttaagtaaccataacatacaagactagatagactaaaaatttttcttagatgtcgaagcagatagaaagtgcaacggtgcacctcttttaagggatacattgtagatcaccctaatatatatatttatatatatcgaacacttcttaat

SEQ ID NO: 220416 - DNA, 2651 bp, Cannabis indica
aaccatgagttagaggtttccagcagtgtacatatcaaccgcagtatctcggctactagtggacaagatccacccttttgattgtattttaaaagtgtaatccgatgttgtaataccacttttgaaatagtatgtaaaagtttttataaaaatgatcactctctcttttttaggaaaaaacatgacactttccttgcacttctcatatatgtggatgatatcatagttgccaccaacaacttaatcaaattataacacttcacatctacttttgactcacatttcaaactaaaagaccttggcaacctacctttttttttcctaagacttgaaatagcccgctgtaatgtacgtatctctgtctcataaagaccattctcattacagcttctacaagaaactggttcacttggtataaaacctgtctccactcccatggagcctaataacaaacttagcaatcatacaagaaagttactccctaatcccactcaatacagaagtctcacaggtaaactcatatatctcacaataacatgacctggcatctcatttgctgtcaacgaactcagccaatatctccaagctccaatacatacagccaaccgcatcttgcaatacttgaaaggcactattggccaagttctattcttctatgcctcctcaccagaaccattacacctttaggcttttgcagatgcagattggggagcttgccttgacacaagacgctcaatttcaggctactcagatagactttcatatcctggaaatccaaaaatagcaaaccatgtttcgctcctcagacgaaggagagtatcgagccatggctaatgcagcatgtgaattaacatgactctactccatcctccatgattttggtatccagattccactacctttaactttgttttgcgacatcaatgttgtaatacacatctctgagaatccagtttaccatgagagaacgaaacacgtagagattgactatcacctcatccgagaaaagatcaacaatagcactatcaaaatgaaccatatctcctcaaagtctaacatagctaacatcctcaccaagtctctcttcccaactcacttttacaatattgttaccaagatgagtgttaaaaacttgtacacttcatcttgaaggggcgtattaggacaattagcattctattatagttattctaagagttagttagagtaagcattagttgtagctaagcttctctctatatatatgtcttgtcattgtaatcaaatcataattttccagattaataaaaactttttcctattctctcttcaatacttgtagtactcattgctgtcaatgatgaatccggtggaccagcacgagtttcaaggtcaaagtacatcatcagtttcatttgcacactcgcagcttctacaatatactctcttttactttctctaatgcaactttcattccaaaaagttctataacgggaaaccttttctgtggtactggaaatgcaaatctatacatcattggtagccatttgtgctgctctcgctagtcttttcgcgagctaagaaatacagagttttggtaaagaaggatttgcttatgtgaatactttggtttggacagcagtggcttggaaagtttgctcggtcactagtctttctccaacttgattttggtttatatatatatacatctgtacactgtacttgaattaatatgatgttatgggttcaagtgttatataaatcatgttaccagttgtactaatttatatatgtctatttctttcctctagggaaaatgtttcttattttatacattatattccctgtcataacctgaattatatcacatcctaaattaatcatgtatttgaataaaaaaaatgattggatatgtacatattcccttttgtttactttactttatatatctgattgtattattgcacataatgggaaaatacagttttgcagggcctgtattgttgttgtcttattgatcaagtgaataaaaataagagtagaggtagtgatcaatagtgatgtggggatagataggattacaagaacctctttgacccatttgatggggaacttgatcttgatcgattgatgtggatgaccccaactatttttatacagaaccgattataaaaatctcaaaaagtaaaaccaatgatatgaaagtatgaaatcatttccattctcatttaatggtcacaaaaagttaaatcctaagtcaaatgagaacagtaggagcatacaataaagtagtcaatgcagtgaatactatgtatgtagccatctcttagtctaacaatatatattaagtatttatttgtacttaaactagcttattccatttagaggttaaatagtgtatataacagatatgaaacttataattttaattaaattatttacatatggaccacaaattggaattggttttgcttttgagtaacttgggagatttgctctttttctcttgtaaattaataatcaactcaattagtttagtggtcagctctcaattgattggattatgatttaataataacaatgactggtcagttgttactttaaacacaaggctttttaagttgcacacaatgtttaatttgtagtccaggttaaaataataataataataa

SEQ ID NO: 220417 - DNA, 2208 bp, Cannabis indica
aaaaacacagtatttttgtaaaaatttccgtgtgacagtatttttgtaaaaattaacccaaattccagtatttttgtaagtttccctttagttttggtttgtttttttaaaatatcagccggcttattattaaacaaagtctttaaattcagaaaagtatcatttctatatgtaatattttataaaaatcacattttattgggcttcacaaattcagtctggctttagtttttttggattattttataaatacaccaaacaaactaaaaaattacaaaaatacaaaattttaaatatttttacaattttaaaattttttttattgaaaatacgagtttttgatactttcatattttcatattatttttatgttatactcgtcttattttattatctgtgtattattttatattatgttgatgttactttttattacttttatataatctatttattgtttttattatagaaaaccgtataaaaaaatatccatataaacttaaaaatgtaaaaaaacttaccaaaaataatattttatataaataaagcaaaatagtgataaaacgacaatttgttgtcgtgaagcgacgttcctttgtcaatttcataaagaaacgacacagtaatagtaaaacgtcatttttatatgcaaaacaacaaactttttttccttttctttttttttcttctttcactaaaggctaaatttatttaggggagttttattttcatcccataaagttataagtgcactctattttatataaaatataagaaaattttacaatctactctcttaaaagagatgcaccgatacacccctatctgtttcggttatttttattttattttaattaaatttttttctccatggtcatatacattatagttatttaagatatcttagtaaaattttaaaaaattcaaaaaaaaatataattcaatttcaaatagtgtattgcacgagtgactagtttaattttatacacgtgtgaaatatgatcttaagtactctttgattcaattttaaaattttgtatgacatcttaaataactatcatacacatataactacgaaaaaaagttagattaaataactatcatgcacatagctattatatattataatttaactataaaaggcaatttggtcaatttaagcaagataaattattattattctatttctaaataattttaataaacaatatattacaaatattaattttgattattttttatttattctgttatatttttccattaatttatttcaataaaagtgccataatattttgtttgttggttcatcaaaatataattttttttaattttaagattgtgtcggtgttatgcagcagttgatatattataaagtttttcatttcatttttattttattttttaaaataaaaacacaattttgtatatatatatattttgagacaaaaaaaaaaaaaaagaacaaatcaagtttagtatatttaattatagaataagtaattatacttaatttcgttgattcacttcaattcattttcagatcatattcacacaaaatgaatatataacaaataagaactttttacgtaaacactaattttattatatatgaaaaaatgtcttatatatatatagaggaaaatacacatatattttcaaataaacgtgtattgctcttctgtaataacacatgctcatttttccataaacaagaaagagagagagagagatcgaacattaatttaaaaatctaatcatattttgtattacatatataactacacatgcatgctttaatttgtatatatagtgcatatatattatatatatacatattaatttgttggggtggtgcatataatgagttcaaagtatatattattattaattatggccactcacatgctcaaatatctaaaaaaaaatgtatagatttctctcatctatgctgtctttgtcaattgaataataatatagtcacatgcactaattatacgagttttatttatttatatatcttaaattttggacgaacagaaataggacccatattcctcaaaaataacaaaaagatataaattatgaaaagaaaaatatatatctcataatattcctcaaataataataataataatagaaaaaagctaaacatatataatttaaacgggaaatttgattttttatacttagaaaatcaaaaaattt

SEQ ID NO: 220418 - DNA, 5090 bp, Cannabis indica
aaaaacaaaatattactaaacgctagttttaatgggtgagtctctcttaataataggataataaatattttatcaaaaatataaaaaaagattacgtgaaaatatcagtaaagttgccctaagtatgaattctttaatttttttttaataattagtgctcaaaagtatttttgttgcttattactaaataaatagataaataaaactttctcattttaaaaattattatctctacttagattaatcacgttgaaattaatttcccatataagcaacttcaacttgtttcaagacataaacataaggatttttctataataggcaattaaggtgatcttaggccaattaaggattttttctatatttttcctttctagggtaaatattttcacgtagtcaatacaagactagtgttattaagtttttacattgacaaaagggtatattacttttaaattatgcctgatggacttaatgacaccaatcttgtattgatcccaaagaagaaaaactttgctgttatgggtgatcttaggccaatatcactgtgtaatgttctctataagatcatctcaaaagttttggcgaaccgcatgagggatctgattggctgtgttatctctgaaacccaaagtgcttttataggccgtcttatctcagacaatgttatggtagcttttgaagtcatgcactacttgaaacagaaaagaagaggtaaaaaatgcttcatggctcttaaactcaacatgagcaaagcctacgatcgggttgaatggaactttcttagagcggttatgaatcgtatgggctttgctagcaaatggattgaccttattatgggttgtgtctctatggttcgctacaaagttgttcataatgggcatgtgcttgattctatttccccatccacaggcatacatcaaggagatccactttctacttatctcttcattatatgtgccgaaggcctctcagctcttatctagaaatttgaagccaatagacttattcaaggatgtcgtgttgcttaacgtgcaccttctataacacatatgttcttcgcggacgacaactacttgttttgtcaagccacacgaggtgcggctgatagcatttccaatctcctgcatctctttgaaaatgcatttggccagaaagtcaattactcaaagtcttcgatcttcttcagtcccaatactgatactaccattcgtaatcaggtttgttcctcactccacatgtctgaagctcttgagggcagtctttatcgaggccttccgaatattataggtcgcaacaagaatttcgtgcttggctttcttaaaaataaagtcatttctcgaatcaacagctgagatggtaagttcctgtctcgtgttgggaaggaaattttactcaaaacagtcatacaatctttgcccacatatgctatgagtgtctttcttctcccgattggaacttgtaatgagattcaaaaattgatggctagtttatggtggaagacaaactcgaataaagggtgaggtattatctggatgtcgtgggatcgtttagcaactccaaaagaagaaggtggaatgggttttaggcatctccatgactttaatcttgccatgcttgccaaacaaggttggagattattgtgtaagcctgaatcttttgctggtagagtctacaaagcaaagtatttccctaattctgatttcatttcatctgatcttggacataatccaagctttgtgtggcgtagtatctagggtgctaaggacttggttcgacttgggggtgctcgagttattggtgatggtactaatactaaaattctgggttctccttggctaccatcaacaagtaataaatatgtcttatctcctcatcctggtcttaatactcatactgtaagttccctatttaaaccaaacatgttatgtggggatactgaagtagtccatgatctgttttctccccaagaagtagatgtaattcttgacatcccactaagctctactgtcgggttggtcttggacagcagatcacaatgggaactttactttgaacagtgcttatcaccttctatagagccaaaaaccagtcggtccacggccaagcaattctggtttttggcgtaagttttggcatttgaagatacctcccaaattcttgaattttttgtggtgtgctatagcaggttctctcccaacctttgtgaaccttgtcacgaaacatgtaccaatttcttcacattgtcccgtcttccatactacaacagaaacaacaactcatgctctgctgacttgtgactttgttaaagcttgttgggctagttttggtcgggctgttatggttgacacctctttcacgtttagttactggtttgagctgctacagaataccagtgacattgattttatttgtcgtgctgcaactctctgttgggctctgtggaaagctcgaaataaagttgtctggaataaatataattctactgtcaaaaaagttttggccacttcttcaattactcttgaacattggaggaaagctcaagataaaagtgctcttttaacactatcattcagcaataatgatgaaggggctgagctatggacaccacctgcaacaaacaacctcaagattaatgtagatgcggcgctctatcaacaagacaactcttatggctatgacttagtggagagggatcattttggcaagttcttagaggccaaaacatgccactgaaatggtacttatcctactgaagtggttgaagctttggggatcaaggaagccctcagttggataaagaacaaggcatggaataatattaagtttgagtctgacagtcttttatctgtgcaagcaataagaagcaaccaaaagatgtcttctacttttggtagtgttatagaggattgtcgttttttattatcttttttaaaggatgttaagttacgctttgtaaaagatcaacaaatcgagttgcccatgctattgcaagacactcttgatttattgctggtggttaaaaaaaataaaatttttattttcaaaaatacggtgctaacaaaaatcacggaggcagctcctacttcttcgtgacccagccgaaccacactgtaatatttcgataagcctaatgataaataattaggctttatatttatattatgggttaataagataataagtaggattatggttctactagtctatttcagcttaaaattgaaattgctataagtgagcaaataaacataatttataaattacggagatttatatagcatgtgtgaatgtaatatgatttatatgtagaataaaatattttcaggttcggcgatcttgaagatccgataagtagataaataagtatatttgttaattatgggatttatttaaaatatgtggataaaatatgagttatttatgaaataaaaatattttcaagttcggcgccatggagcgattagaggccaaaaatatcacaacggttttagttagaaatattgataggataagttgattttagaaatactggagtattttggggtactcgaagttgaccaaatactctagaattagagctttctagtggctaaaaaataatagataactattaagaataaattttttattaatattattattaatattatattattgttattgttattattattataatattattatttatataaaaagttgtcgttaatgcatatattataagttacagtaaacataaacgaaacaaacgaacaaaattctcattctccctccttcgacaaaactttctccctctatattcattttcttcaatttttaacctgaaatctagcgatctaagctccggtacaggatagcaaatccttgaagtaggaaagcttaatgtatgttttaatttcattttaagtttaaaaataattggtttcgcataagggttttgtgaattagaatagttatgaaggttctgaccttataggattgttctcgggtagtcatgggactagtttcgatgttttcttgctgaaattgaggcgattttgggttagaaatgagtttggaactttttaaagctttgtccgaacgttaatggtatttttcaattaagggctcgattttaatttctattatgtaaggatggtaatatctatggtatatatgtgccctgtgaagtttggagtgttttggataagttttggtagtgtttcggtgagtgcgaaaatagaaatttcgtgtttcatagttttaaaaaaattcttaggagatcataaatcgtatttttgtcataacttttcactcgagtgtccgttttggatgttctatataccgttttgaagcttgcaacgagctctaaatatggtgtatgatttagagccaaaatataagttttattttagtgtatttatactgcggggtttggtagaaaaccctagattgtcttatgtgaatattaagtagtgttttgggataaatatttattggtttaccgttattgtgacatagggcctagaccatcagggatagttctccacttgagttggctgacatgtatgaacctggattaaaggtaagaaaattatattgtattgtgtagtacgttgtatggtaatgcacttaatattgttatataatgaaaagattgattagttaagcaatgataatgggatggtaatatggatataaatatgggctcacttgtttaggtgatgcaattttacttggtgacatactgggcgtaggtatgggcatgagtgacatgtgatgagtacccagcgtaagtacgggctcacctaattaggtgatgtgattttctaagcaacgtatcgggcataggtacaggcgtcagtaacatatgagtaccgagcataggtacaaactcacctgattaggtgatgcgatactcctagcggcgtaggtacggacatcagtgatatgaaaattgctaggttatggcatagaatgaaattgttgtaggatttcctctacagacgtgtagatacgacgtcagtgatatgaaaattgccaggttatggcatagaatgaaactgttgtaggatttccgcctggagacatgtagatacgggcgtcag

SEQ ID NO: 220419 - DNA, 4667 bp, Cannabis indica
attcatgcattagacagaaaatacaattagatttctcgatcactataaaatagatcctccagtaaggaggagatcaaaatagagtcgtacaattggtgggtgaaagcccacttaaccacattatggacaacaaaattacaaatccttctaacattaaaaaaaattataactattaaaagagggagatgatttaatacaaaaggagacgtaattatcaagagtctaatggaacaccttcctattgagagcattgatagctagtctcgagtcactctccacaataacatacttataccctaactccaaagccaacgaaacagccaaacagcaggatgcagcttctccgcataacgcatccgagaaatccaaccgagacgtgtgaacccaaatcaccctacccagatgattccttgctacaacagatgtgcacattctctctaagcccactctaacatcacaattcatttttatccaatcctgaggaggtggagtccaggtttccctcaagatcagcgtaggattgggcaagagagaagcatgtaactctgcaaaagaagtacaaatttggtcaatacatttcaacacatcaagaggagaattattgtgtaccctttcattgcgcatcctccatatagtgtcaacaacaattgaagcataaagaaagacgtcctcaactcggatccccctatttctaagatcccaaatgaatttcacccagtcccaaacactaataccagtattacaaacagggtagattccccaaggcgaagatcgctacaagtgtagcgccacctcacaagaaaaaaataaatgttcaatagattcatcccttaacccacacagtggacaacttgtatcctcaatctaaaatcatcttccaatctcagatctaacagggagcgcattagataggatgcaccaccaaagaatcttatgacgctacaaaatttgctattccaaagcgacagagcaacctcacagtgagaggctctttccaaagcctgtgtcaggtaagacgatttgcacgagaactgcctgttgctttccaaggtccaaatccatctatctttaccctgacccgaggggttgccaccttttaagattgtagaaacagtctcttgatcaaaaagactatttaacttttggacatcccaacctccactagataataagagatcagccacactattgtgatccgttaaaacatcaccatttggtttcgggacgaaacttttacaatgaggaatccagggatccctttagatactagtatccctcctattagataccatttcacaggccccttttcttagaattgtattggctttcacaacacttttccaaaataattacggaaacccaattgcggaacttctgtgggaaattcaaaacaatcaaggacacgatcaatgaatttctaacttagactatcataggctttgacaagatcaattttaatggcaaagtacccctctttgccttttttctggttgaaagagtggataatctcttacacaatcacattattatcttgaatattccttctcgggacgaaagcagcttgagttgggtagataaggaaggaagataggtttaattctatttgcaactatttatgaaatgactttgtacatcacattgcaaagagatatgagcttgaaattattaggtctttttgggttctggctttttgggatgagcacaacgttcgtagtatttatacccttgtgcatattgccttgaacaaagaaattagaaattgcatcacaaaaatcatcgccaacactcccaatagtgcttaaaaaagagtactgacgtcccattcggccccggagccttgtggttgctcatggcaaaaagagtagttttaatttcatcacgagaagggcattaaataatcgtctcctggtcctcctgagagatcctctcatggaataactgagtgcaatcaatagcccgtccgtaatcggatcctgagaagatacttttgaagaagtcaatgaattcaaggccaattaactctcggtcattaatccagacattatctttacttaatatactttcaatgtcatttcttcttcctctgattgcagctaagaggaaaatatttagagcatttatcgccatcctttagccaagagatcctcgcacgttgttcctagtaaatcgcatttctggccataatttcatttagggagcagcgaatttcacatttcatgttccaatcacgggctctagcaggtaacttctatatattgtcaagcttaagttccagatctttaatgacccagtcaatcttaccaaattgagttctattccaatgaagaagagccacacgagtcgctccaagtttcttgaagacgcgagctagggcccaagaatgatcaaccgaaccccaagcgttggcaaacactaatttgcttctttcatccctcgtccaactctcttcaaacttgaaacatcttttaaatttggattcctgcccaccaatgtttagacataatggtctatgatccgagttactcgtctaagaggagcagagaatagctctaggaaattgctgaagccaaactccatttatcaagagcagatttcacatggcttatgctagattggtggttatcccaagtcatcttatcaccttgaatatgcatattaataagacctcgagagtcaacaaggttagatatgaaagggataaaagggtcccttcctgatgccccttatcgttcagagtcactaagaacaaaattggtatcgcccaagatcaactaaggacccccaaaccatccccaatgttcatgagttcagccaaaactttttcttagcatgaaggtaaggagggccatacacacacaagagaagccaagggtgggtaggagggtccgaataaacaaggccagtgatatcgttgcgagaacacgagatacactcaaaactaaatccaaatttccacgccaaaataatacccacagcagtgccaataggtagaatattaacattaaaataaaaatggagagattttagtatacgtaccaggggagtggcatccactttaagttcagtcagaaacacaaaattaggagagcgcgctctgataagggacttcaattcacgaactgtagaggtctgccctaaccctttacagttccatgcaacctctctcatggctcctgtggaagagatttgacattctcctccacaggggtatgagagtgaacaaacaagctagatctagagtcttcaatcacaaaagaaccaaccagagggttcatcataattccatcagagcaacttggggaacatgaaatttcatcaaatggttattcataggccaccttagattcaatgtcccgttccttagtatcccacgggaagtcacgaacaacaccagggtgctttttgagtattttctgaggtctagagcacatcaaagcagagccttcaaatttacgcttcttaaacggcgtagttctctcattagtttccaaagtaggcaccactccaatatcgcttcccaacttctttatctcatacaaatccatcttcccaaaatatttaagatcatgaagtaatatttctcgggctttaaaaaattgagacaaatccctttcttgatcatgacttggctcggctccaggcccacaaacagggcccataagattaccctcaactttctttgaccctccttgcccgagtagactaggccttgccaactttgtcactcaaaataatgctatcatttgattgaagtgggccctcattttcacaagcaattaaactttgcttattattaaagccatcgggcctcataacacaattggagccattcacaggcccactaggaataagcggaccacatacaaccggcacatgacccaaactaaacccaccatccttttccaaattcaaatttatatccttttccgaaattgaggcacatacatgtccctctctcgccaaaacaagcaaaatttttagtattcttttctccccccaactgaccccctttgcctccattaccagttggagcccctgcctgaacagggaggtcaaaaagaggcttggggagccacactgccagcgaagccttctcagaactcgtagaatcatgggcacgcgtggtcaccatcaactggcgtctcagttgacgagcagggagaagcccaggacccttcaaccggtcgccaccagtaccatcgactgccttcataggaggaaaagcacgagtcttcattctcgaagtcgtggccaacaatccacggacatcatttgcctttggaccagaaaatacatctctgtatgcaaaggagggtgatagccaaggtccaaacatgggaaaagatttatcttcattgttcacgatcattacaggtgtggataatttgcatcatttgcgttggtgaccaagcacaccacagttataacagaaaaatctcactttttcaaacttgaattgtagccactgtttcactccactagcaggatcaaagaaacaaccagagaccagtggtttctcaaactcaatgtcttagggagattttctacctaagagatgtatatatttcattttaaaaacaaattctaaatctctattgttttttgtaaagtccttttttggcaagttagttgacaaaatattttttcttttatggtaagattctttt

SEQ ID NO: 220420 - DNA, 2125 bp, Cannabis indica
ggcatatccataatttgttggaagtgcaattgaacatgctgggatgtgtttgatgagaaggagagtactgacttggctgcatttaaacgttgtccggaagcattacagtaggtgtttaaagatcttttaattacttcagcagaacgattgttggctttgcatagaacaaggctgtcatccgcgaaaaataagtgagaaatggatggagccccacgagccacacgcaaaccagaaagattaccagctgcttcttcaaattgaaacaatctagaaagaccttcaacacatattataaacaaataaggagacaaagggtcttcttgtcgtatacctcgggttggtaaaacttccccatgagtcgatccattgatgagaaaagaataagagacagtagacatgcaacggtatatcaaatccaccatggtgctatgaaatcccatagcagtaagcatggcagtgacaaagtgccattcaactctgtcgaatgccttactcatgtcaagtttgatggctgagtaaccttctttgcctcgtttcaagtgcttaagtgaatggatcaattcaaaggctaccaagacattatcagtgatcaatcttgatgagagaaaaacgctttgggactcggagataacttgggttaggtacggtttcagtcttaaaacaatggattggaaacaagtttatagagaacattacaaagactgataggccgcagctgagtcatattgatcggttttttaactttggggatcagagttatcaatgtttgattcaagcttgttggatctcttctctcattaaggacttgtaaaacagaacaaataactagatcgccaactatgtgccaataattggtgtaaaacataacggacatgccatcaacaccgggactaccatctgaattcattgattttaaagcatcatggacttctgtagcagtaaacggccgtgcaatgtcaatattatcagaatctgtgatggttcttggcaccttagattgaataaattggagggcatcataatctacaccatcagtagtatagatgtcatgaaaataatcctttaccaccttagcaataacagcctgtgaagtgtgttccacaccagcagcgtcagtaagtttcttaagtgtgttgttcttcttacggctgttggctttttgatgaaaaaattttgtgtttgagtcacccgatttcaaccaattcattcgagaacgttgcttccaatagtcttcctcttgtgctagtaactcatcaaggatattttcacagtgtttcatttcttcaaagtgctcaaaagtggtgacagtagagttctgtaaggcagaaaccttatcttgtgtgctattaatctgccgaggtaattcaccatacttctgcctatgccaggtttgtaaatgggaagaacaagcagagagattattagcaatctgaagaagaggatcagccgtagaaatcacccaattcttgaagataatatccgtagcttcttcatctttcagccataatgcttcgaaatgaaaccgagacttgaacctttgaggtaatgctggtgcaatattagataagggaacaaacagggcacggtggtcagatttgaagaaaggcaaatgtgtaacctcagtagctccgaagaaagatggccatgcattattaatgaaagcataatcaagtctctccttcacatttctaccattcacacagttgttatgccaagtatatcttgcaccattgtaggggagatcatggagaccacaatagtcgactgtattgcgaaagcattcaatttgtttgtcacatcagactggtcctcctagcttatcatcatgattaagaatttcattaaaatcaccaattacaatccaaggcatcaatggagcagtatctttaagccgctttaatagttgccaagttaaatgtcgttgagaagtagcaggagctccatagaaacccgagaaaatgaaataaaagaccatcagaagcggtgatatagcaatcaacaaagtttataccaaaattaagtacattgatatttacatcagctttccaaagtcagcattaaccccccacctaagtcctactctacggaacttctatccaattaggaaattaaaagcagtacgaaa

SEQ ID NO: 220421 - DNA, 2928 bp, Cannabis indica
gttgtcgaaggaatttagacaataccaactagaaaataaacatttgatatttaaaaaaaaagtaagtactcaacgtagaacaccgagtattggaatgagactactcagacaatagaaaagcaaggaaaataatgaaaacaaagatgtatagtggttccgtcagatcatggtctggttagtccactattgcaaaagatatttgtctttgtttattcatgttggatcactcctttatgtacaaagaaagtatacttttagttacatagaactcaatcggttatagaaccgtttcacattaaatattaacattaaattataataaatgtaaaagaataaatgaagaaaaatttaaatctgtttcactaaatacaacaacgtttgcgacttccatcgtgcaagctgcctgttcaaacaatcccacaagcttggaagcttggggtgtgatttatcattctaagggtggcgaacggacctcatattaaggtatctgtgttctaatcgagtcgcgtatatggacaccttatcagggttgattacataggacatgcgagtccttatggagtcatcaagtatgctgggtcattcggaccaattctttatgtaaacaaatgatccttattaagttgcaggagaaggctacttagtcatcgcatatatctttgtatatgcgtgacctgtataatcccttcttgctcctgcttattttaaattatgcgaggcgtaataatgcaactagactttgtcacagtcacatcatctcgcgagttcgattcaagcaaggtttattcttgaggagtcccttcttgacagctcaacaattctcaagggatgtgagtccaagtgtcattcatatggggagcctcgtcttgagtttctaggtgaaaaatttgtagtataacacatgctcctagtttggctatagacagatacgtcatttgggaaactatgagagagaggtaggtgagttgttgtcaagagatggtgaatcctggttgtcttatcgagggtttcaaatagatggctgtaattattactttatttctctgagatgccacatcatcaaaactgttatagtgagattttctcacctagaaactcgagaccggactcctattaaaaagacacgtatattcactttcctcgaggaaagttgagatgtcaatgagagacccctcgaatacgaacctcgcctgaaccagattcagggagatgatgcaaacatgaccgggtctaatcgcattcgtatagctcgcattaagtaggaccaaggaatggttttaaggttgcatgtaccagggtatatgcgagcatccccgatatccttctacaaaatcatagagatcgactctctattttgcgagccggtcccattgacccaacaaccttgataaaccgatacagatcgcatgtcttagtttatcgattgattatgagatatctgtataagcgacttgaataggacgcagacatcctagactcgactagtcttaagtgcaccttaagcctgcgagcttatgcaagaatgtgagcagccaactcgcattatagaagtcgcatacattactgtattaagtgaattaagctgaaactgttcttcatttattatgtttacattttttagtttaattattgtaattcaatgcataaacggattcataatgaattcaatctctgtgtaaatgaacagacacttaatttgtatataaaggagtgatccacagtgaaacaaaaagggagacagaactccttgcaacagtggactaagtagaccgtgatctaactgaaccactatactctcttgtgtcctttgtatttccagttagtttttattaagtattttgcgtccctaatttgaatactctccattcttggtgagtactcgcacaagttcttcatattattattattataatttattttggtgttgtaaaattccttcgataacaattggcaccgtctgtgggaaacgcaatagttcgttgatttagaagaaaaataactatggttggaaatcagacaaccggagatatcaacaatggatcaatcaacaattaaacgatgaatgtcccacttccagggaacaggacacctcccgtcgacaccatcaatggaggaataggacgaacaaacataacacctctcagcttgttcctccacattggtgaaatgtccacactaacggccacggtgggacaatttctacctatcacgcttgccgtggtatttgaaggcattgttcaactaaccactgatcagtacacgacgatacaggatcaaatgcgggctttacaggctgaaattgatggacgaaacaggactcgacgtcctccttgagtgccagctgcccgctcagataatcctcaggtaactagttctagatgatgaactaaccgtactcgtagggaacgaagaaccagtcacgaagggctcaacataaataagccgacctcgagggatctgactgcacaaaacctcgaccgcaaagtgcaaccagaaagggttagagtgacgtaacccacgcagtagggcccaaatgcggaatgaggaaaatgatgctgaatctggctcttcctcttcgcagagtcacaccccaagtagatacaccaggtcgggttcagtagagataccgcgaggagcaaggtaccaagtacataggggtgatctttgtgatcaccttaactcaatttttagggcgcgttctcaaacgcctcgaattgaggaagagcctcgtgatccccaattaggcgatcagggcataaataatcttgccaacctgcctaccacaccagttccagctactggagtagttatcccagcaaatatagttgttgtcgcaattgcgcctgcaatgaccaagagcaatgctgctcatccaggaggtatcgattagggtattattttgcaggctttaaagataattgagcaaca

SEQ ID NO: 220422 - DNA, 3751 bp, Cannabis indica
cataatgaccatgttatcttggtcaatgaaaacacagctggctattctaatgaggaattaatagaaatatctgacttaaaaaggaaaataaaggagtctattctctctagtggggccgagcagttggtacaagaaagaatggaaacggaagtggttaatgggccaaataattcagcaactgtggcaaattcaaaaaatttggacaaggtgggtcttggtcttcaggcccaccagacattatgagtactatcagttggaattgtcgtgggcttgggaacccacgagcccaaaaattcttagctgacatttgtgtctaaaagaaacccaaatttgtttttcttagtgaaactttgtgtgctaaagatgttgtggaaaaagtaaaaaatcgtttgggctttgaaggaagtttttctgttgatgtaaatggtagaaaaggtggactagctcttttatggaaagataaatctgaggcccaattactcaaatattcccaaaatcacattgatcttgttgtgaatattcctggaatgatttgatggcgcctctgtggactgtatggagaactaaatcgacatcttaggcatcgtacttggactctgcttcgaaccatggcaagtgaatcaaatctcccttggtgcgttataggagatttcaacaacattctcagccatgaagacaagagaggtggtcgtccatacccttcctccttgctcacgggttttcaagcaactatccaggactgcaatttaattgatttggagctcaaaggctatccttacacctgggaacgaagcataggaacaactaatgcagtggaaatccgactggactgagctatggttacttaaagttggctagatgttttcaatgaggtatcttttactaatcttggcttttcatcatctgatcattcccctttatttttactccctgaaattactgctggtattatctccactgctcctttttgatatgaaaatgcatggcaaagagagcctctatgccaccaaatcgtttctaatgtctggtactccaacccgactgaagatattatggggaaaattgctatttgtggtaagaaactagctgattggggtcaaaacatgactgggaattttaagtctcgtttgaagaaaagtaagaagcttcttgctcagtacaaacactctgccaatgaatttgatgctgaaaacttcatggtggaaaagaacaattattttgagattctagcgcaacaagaactctattggaaacaacgctctaaacagttttggttacattcgggggacaaaaataataaatacttccatgctacggctagtgctcgaaaaagatcgaacaaaatccaacaattgcaagatgttaacgacaattggcaatgttggaatacagatattgctacagtgataaatcagtactttgagagtctctatcagtccacgaattcattctcttctcaaattattgataacgttagaagctctatcacgatacctcacaatgaagccctcttgcaaccgatccttgatgaagaagtaaaattggcggtgttctctatgcaccctgacaaagcccctgggcctgatggtatggggcctggcttctttcaacaccattgggatattgtcggttcggatgttactaatttagtgaaagaattttttgaaactgaggctttacctgaagggttaaatgataccaatcttgttttgatccccaaaaagaaaaattttaccccaatgagcgatcttagaccgatatcattgtgcaatgttctttacaagatcattttgaaagttttggctaatagaatgagggacttgattgactgtattatctctaaaactcaaagcgcttttatcccaggtcgcctcatttatgataattttatggttgtctttgaagttatgcactatctgaagcgaaagaaaagcggcaaaaaaggtttcatggctttaaaattcgacatgagtaaagcctacgatcgtgttgaatggagttttcttagagcaatgatggctcgtatgggatttgctagaaaatggattgatctcatcatggcatgtgtctctacggttcggtatagagttgttcatattggccatgttcttgaccctatctctccgaccagaggaattcgtcaaggtgaccccctctccacttatctgttcattatatgtgctgaaggcctctctactctaattcagaaatttgaagctaacagactcattcaaggttggaaggtcgctcaacgtgcgcctccaataactcatatgttctttgctgtcgacagttacttgtttagtcaagccacataaggggctgctgatagcatcaccaacctgcttcaactctttgaaaatgcttcaggtcagaaggttaactactccaagtcatccatctttttcagtcctaatactgatactactacccgtgcatacatctattctatacttcaaatgtcagaagctcttgaaggtagtttttatttaggcattccaaacattgttggccaaaataaaaatgttgtgcttggatttatacaaaataaagtcatctctcgtatcaacagctgggatggtaaatttttgtcccgtgcaggaaaagaaattctactcaagacagtggttcaatccctacctacatatgctatgagtgtattccttctcccgattggaacttgtaacgagattgagaaactaatggcagcttctagtggaagacaaaatcaagtaatgggcgtggtattatatggatgtcattggaccgtctagcaattcccaaagaagaaggtggtatgggatttaggcatctccatgactttaatcttgccatgcttgccaaacaaggatggcggttattgtgtcagcctgaatcccttgctggtagagtgtacaaagcaaaatattttccaaatactgattttctttcatccgaacttggaaataatccaagctttgtgtggcgcagtatttggggtgcaaaggacctggttcagttagggactgctcgtgttattggtgatggaaaagatacaaaaattctgggatttccttggcttccatcttccagcaacaagtatgtcacttctaaccatcctggactcattaatcacaatgtaaactctctccttcaaacaaatacacactgctgggatgtagaggcagttaatgatcttttttctcccgaggaggccgaactaatcttagccattccacttggtatcaactctagacctgatagttggtcatggacagcagaccatcaaggtaactacactgtgcaaagtgcataccagctgctgcagaaccaaaaaccagttgaagtgcgaccaaacaattatggtttttggagaaatttctggcacctgaagcttcctcccaaggttttgaacttactatggagagccattgcagatacactcccaacttgtgtcaatatagtcacaaaacatgtgccaatctcctctcaatgtccggtctgccaatctactgcagaaacaacaatacacgcacttctcacctgtgattttgcccgatcttgctgggcattttttggttctcctgttgcgattgatctttccatttcttttggccattggttcgaactgttgtagaacacagatgacaaggactttatttgtcgtgctgcaactttctgttgggctctgtggaaggctcgaaacaaagttgtctagaataaacgcacttcaactgttaaagaagttttggctacgtcttcaattactctt

SEQ ID NO: 220423 - DNA, 1034 bp, Cannabis indica
atatatatttatatatataatatcttatgataactagttactagtatggaattagttattttgaaatttaatgtggtagtagccagttaccagtactactattaatttttaggggaatttttatttgtagggttttaaggtatgagtttgcaaaattatcattttttggggaaaattttagaaaaaaatctaaaaatatagggaaaacactagtataaggttactagttaccctccttatggtaatttgttatcctaagagtatctaattacttttatttatttttccatatttttcaattttccataaaataatttttttggaaaaaatccattttcttacacaaaaagtataaaaacccataaaatttaaaatttcctctaatttttacttttatcaatttttgaaaaattaatgtgtttgtaataagttatatcaattgttttaaaaataccacaaaaagttgtaaaaatagaaaaaaaaaccataaacaatacacaaaattaaaaatttcacatttattaaatttataaatagaaaagtaaccataattttgatgtaattttctcatttagttactcatacaatgcaccaatatcccctcttttaatatgtacttttttaagttgtagttttcaataataatacatatttgacttcattttgaaaattcataagatcttgtattcttcagtaactattttgagatataccaacttagatataaaaagtgtttattcccacaacaatcgattagaatattttaaaagtgacatcatgtgttattttaaatctcatatatctttctaaaaatttcaagttctcatattttccaaatcataacaattatgagattttgattgatagttaaaactaataaccaatttatttactcatgtaataagtgttttgatatatattatataccattaccaacaaggatatgggtcttttggacaagcttgtacattcaaacccatcacattttgttagcccaaattttatatgatcatccagaatatgcttttattggt

SEQ ID NO: 220424 - DNA, 4538 bp, Cannabis indica
cgctcgtataggcgacagttttacagacctcggaattctttacccgacggtgtaaaaatgtcgggaattttgaggtttttagtagtgttggttaccttcctacttgtgttacaacttgttgttaagcatgttgatatttcttcaagctaccctgtatgtaaatctcaacctgaatctgctacacacgctcttgtttcttgtcgctttgcttcgtcctgctggcaaaaattaggggttgcttttgtctgtgatcctgtggctcttttagcagctggttggatggtatttttaaaagatatgcagtagatttggtgtgcgttgtagcagcaacgtgctgggctatttacaaagtcaggaacaaggttgtttgggaaggcaaacactcctatgtggatgaagttcttgtatcagcaagagtaattattgatcattggaagcaatctcatgatgaaatttcattatcatctaaaatcgggtgaaaatactatcaagatagatgatggtgcaacagtttttgaaagagaaaaaatgtatagtttcagtattgtagctcatgattgttccgacaagttcattgaagctcaagcaggctgttatggaggcatttacacagctgaagtggttgaggctgtgggcattaatgaggctctatactgggtaaaaaacaaacaatggcagtcaattgagatcgaaacagatagtatggtttcagtacaagctatcagaagcagtataataatgcactccatctttagtttccttattcatgattgtcaaattttattagtttttatgcattttgttagtttattttttattatgcacaatctcttagaattgtaaatgtcagtaggttgttaggattagttataaaccattttctgttacatgttagttatctctgtaactaactcttttcttggctactgagtattatataaactcagtcccttaatgtattcaatcagattaagcagagcaataatattcttcttcctctgtttctctctctctctctctctctctctcaaattctcatatggtatcaaaagacaccttgcccacagcttccatggcaagacccacaacttggtcacaagatggtgctcctccatcaaaggctgaccacacaacagctgagatcaactccgatcatcctccagcttgcaatcacaactcctcagtagttcctcggagaaatcaacatgttccaaaccaagatcaagaacctgatctggttcaaactcaagaacactccaccactgttgcagataacaacacagcagctcctgctgttcgaaatctcacagaagatcactcaagcccgttcttcctaagcacgggagatcatcctggattggtactcgtttcaacagtcctcacttgatccaattaccaagcatggaaaagagggattactatggctttgactgccaagaacaagatcgccttcattaatggcactctccctcggcctgagaatggtaatttctcccttaactcttggctccgttgtaacaacatggtaatgtcgtggttaatcaattttgtttcccctgaaattgctcaatatatcatgtattttgatctagccactgatatgttgaatgatcttgccgatcgttcaatggaaatggtcctcgtattttccaacttcaaacccaattaacccgtttacaacagagtgacctttctgtttcttcatacttcacaaaactcaagtctctttgggatgagttgaaagaatttcaacccattacatcttgtacttgtggagccatgaaattttttttggatcactataaccaaaaccaagttcttcagtttttaactggtttaaatgagtcttttgcctcagttcgagctcagattttgctcaatgaaccaatccccaatttgtctcgggtttttgccatgataatccaagaagaacgccaaaggtctcttggttttgtggaaattcctctagctgctgcttccagctccaataatccaccaagaaccaagaaaccacgcccttcttgctccaattgtggcaaacctggccacttggtcgacaaatgttatttcctacatgggttctccccggttatggtgacaaaaagaaacaagaaaagaccaaaggcaaagccaatcttgcttcctgcaccaatgataaatctgatgcagacacttcctccctcaacaatgatctctccacacgatgccaacaactaatttccttgttgagccaacaacaccaatccagaacctgctgtcatggctcctgctgcatcaaaccttgcaggtaatacctgatcctttacttgggtagttgacagtggtgctacacaccacatgtgctataacatggaatgctttacttctttttccaatagcaatcatcctcaacatattcttctcccaaatggtcaacaaattcaggttgccaaagttggtactgtcaagattaactctaatcttacactttctaatgtgttatatgtcccaacattcaacattaatcttttctctatctctgaatttgttgaaaatacatctcattccataaatttctttaacaattcttgtgttatacaagatcctattcggaatgtggtgattgggatagctagaaagcatggaaaactttacctgctgcaacaatgctaccctactgctgctacagcttctgttgtttctttcaaaaataaacatgtaaaccaatggcacaatcgccttggtcatccctctttgtcaattacaaacttgttcaataaagagaatattttttcttctcctccaactgatcatgtttgtcatatttgccaattggccaaacaaaagaggtagcctttcattgctaaccataactttgcaaataactcatttgacttagttcatatggatatatggggcccttttcatatcattagtataaaaggctataagtacttcctcactattgttgatgataaaactcgattcacttgggtctacatgctcaaaataaatcagatgtacaaaccgtaataccatacttctttaacatggtttgcacacaattttcatgcaccattaaagccattcgttcagacaatgcaaaagaactcaacatgcaatcgttttttgcctcaaaaggcatcataaactaccattcaagtgccgaaagacctcaacagaattccgtggtagaaagaaaacatcaacatatattaaatgtggctagagcactaggttttcaatccaatttacctctggtttattggcctcacttcgtacaaactaccacatatcttttgaatcgaactccatccaaattactcaaaggacttaattcatatcagctccttcacaacaaaccaccacagtatgaccatttaagagctttcggttgtcttgcatatggttctactttgccttcaacaagacacaaatttactcctagaagtagagcttcagtgtttattggatatcctcaagggatgaaagcatacatgcttcttgatttagaatccacacaaatctttatttcacgagatgttgttttctatgagaatatttttcccctattcaaccaatcttctatctctgaaattcatgatttatttccagatgttgttcttcccactgttacaccaatgcagcaacaacatcctactacaaccattaagaatcatatgccatcgatccctgattctacacactcagattcagcaccagtgactacaaccagtgctaaaccagtgactacaatcactataaaattctgagtcacatactcctataccagtgaccacaaccagtgctaaaccagtggatacaaccactaagaatcctgagtcacatattcctataccagtaactacaaccagtggctctccatccatttctaagactgttcaatcagttcctatacccgattcagacatgaatctttcctacaaaaaaaaattgttcccaaaacaactcgatctggccgtgcacttgccaaaccagatcacctaaaggattatgtctgtcacaccaccacaacagactatcctatagaacaatttctatcctacatcaaactgcaccctcaatttcgagttgcagtacttgcagcatattctgagatagaacctcaaagttatgctgaagcctctcaatttaaacattggctattagccatggataaagaaactcaagctcttgaaaacaacaaaacttgggtcataactaaactaccccctggccataaggcaatcggctgtaagtgggtttataaggtcaaatatgatcgaagtggggttgttgagcgctttaaagctcgtcttgtagccaaaggttacaatcaaagacatggaatagattattcccaaacatatgcccctgtggccaagtttaacactctcaaagtgtttcttgcacttgctgcaatgaacaattagaatgtccatcaattgggcattaacaatgcttttctccacggggatcttcatgaagaagtatacatgaaaattcctccgggatacaaggcaccccctaacacaatttgtaaactaaacaaaagcatt

SEQ ID NO: 220425 - DNA, 9124 bp, Cannabis indica
taaaataggtaactagttagtggtaatctttattttcactcttctttttgtgtgtccagcagtttggatgcacattatggcatcatgttctcttcatgtataactttttcactaatgattgattttgataatgggcattgcgtgttgattattgcgatgatagaaggaatatcaaaagataattaattctatgaacttgtgaaaattgggctacaatgattatgtagagtgttgaggggaaaactccggctcaaaagaaaaggaaactaatcaattgatttagaggcaaaattaggggagaataaaataaaaatggaaaatttcagaaataggaaactgcactactttttcttcctagtagaatcagagggaaaataaggaaacaatctgtaaatcagtcaactggattttgtactccaatttttgaggtttgattacatgttttcatagctttctataaatattttttaaaagaaagagttagcactctagggttctttgtataatttgcaattcgtggttccaaaccccaattaatccggaccaaactatttgagaacggaccaaatgaatccagtgtcaatggtttggtcaatccagactgtttataattctctggttcagtcacagctttaaaatttttgctcgtggttaaaaccaaactaaaccacctaattcttgatacatacttgatatgattttcttattgaatattgatatttatgaataatcttaggtataatattgataattactttaacattgtgttaagaatatttattttcattgttatttacgtattataaactttaagtaaaaataatgcagtaaaaaatattaaaacatttatgaattacaaactacggtttcgaaacaaacctatccgttcttaagtggattggtttgagcatttaattggtctagttcggttcgaaaaaaaataaaaatccagaccaaaccaaaccatgaaccctcctagacttagcagtcatcaatttgttaaattagcccacactccttgcacacaactcacgcctaaacacctgagagccatgcttgagttttcatcggttagtgccttactattattaattctttaagtatgtatgttgaaaggaagtataccataaaagaatgcacatatagaatagaatggatggaaatcttcagtctcccattcaaaataaataaataaataaaaagaaatcttcaatgtccaaatttctctcaccacttaacatttgacgaatcatcatttccatttatgtatggagatgtgcttttaaataagtacatgagattgagaggggaaatttatgtaactattgttgatttgtcaaattttgaatggtagaacaatagaggtatttaataggcaagtaattgatggtcatatttgaaagctataattaatattgcgatatgtttaagctaacattaatagagtaaatgaaatggcccacaagcataattaagtgtacttagtacttcaagatatattctctagtctaataatagcatgttaaataaccttcttctgtgctgcaatgaagattctgccaccttattaaatgatttgttatcttcaatgatcacttgatcaagctgcagacaatgtaccacatatgtaatcaaaccaagagttgttgcatttaattaatgtgacactgaactgattttctggggccactcaatgctaattacatagcttgaatgtcattgcccatctcattgtaaagtttctgtagagctacatagcttgcaaactctacttcttttttacctatccaatgtggatttgttgctactagttcagaagaagttattccatatagttcatgtagtgtgtaataaaatgacaaagaagaatttgttctctgactttgatattatgaaattatgtgtttattctatgatgggttcatattgattcacttacttcatgtccgagtaggaattattttcagcaattgtcaaatagttgttctaggtttctggaccagatctgtctagaaccaaagcctgtcctaatgaacatgttagggtgtgtgtgatacttttttagtattttttttcttcaacagtcatttgttgaggatgtcttctgtggaatattgttacaacgtttaatactttaataataagattagcaaacaatcatgaaggataattatttcatcttttaacctttcctctgtgttttctcctttggctctggagtatgactgaaacagattttattcttctctggcagatctttattccattgagcttaagtaattgccaatatgggtgtctcagggaaatggataagagcattggttggtttgaagaaatcagaaaaatcccagtcttcagaaaaggatgaaaatgtatgtatcattttgtctctagctctaattgcttcatacagtgtataatgaataaatcttatgtatgtataacatttacttgttttcaacacattctgctttaactagttcttctgagcttttattatgctaagaaatttagttgaaaccacaattgttataatgcttacattaggctactcatgcttgagagagttgtgtttcccaaatatatctgacaaaagctctattagaatttttacaaaaacagcatgaaggttcattagctaagttctctgaagagacattgacaatacaataggatgctacaaattcacaatgcacaaaaatgtgattcactgtcccataatctttttcaatcaacacataaatctagaaaatgagcttgatttgttcaaatttatcaagcttaagaatcctattcaaatctactagtcatcctgctacctatcccaaaaccttgatctattggactaaaaaaaagtggcattccatataaatatatatggttccaaatccctactgggttaccattcctcggtctgactttaataatttacacatatacgatctttcgtaatatcagttatgaagaaacttaggaaaaaaattaattcgggtagctgtttggatttttagcaccgtgattttcaattgttcccccttctctaatgcaatggcagggaacaatttagttttagaatgattgtttcttttcaataactgtattatccagtggactaatgttcagggtttgttgcagaacaacttattggtaaagtactttgctaaacaagacatgagaagtgtgatgatatctactgagaattttgtttaatttggctaaacacgtctttgcttataaaacatgtggtgttactgtagttctactttatttttgtgattccatttaattatcttgttcatcctttattatagagggctgctagcaagtctcgtcatcgtagaaagaattctgttgaatttgactgtgacaaacttcaatgtgatacaaatccaaatgctgctccggcagttaaagacagtagtactcaaatgaaacccgatacagctgcttccccttctagttcgcttccagtacatgaaacagcacagagtcagatgaacgtaagggaagaatgggctgcagtacgaattcaaacagcttttcgcggttttctggtatgaggttcttactctatatcatctggttctttctatctttccttcttgttgatgcatctttattataatatttgaaaataaaaaagttgatattctataatgtgattatgacattatgtgagggatgaataagcatactgtataaaaaataaaatatatttaaaattaaagtggggcctggctctacactcacatgtataggtacataaatcagaagatgttgaaagtgaaatctgtgcttgagactgtataaagtgaaatctgtcttacaggttgaaatatcaaatgtgttaagcattattttccttctgttgtgaatttcatatttgcaaattatagtattcctgttactgaaagaattaacctcagttacattacgttaaatgtgcctgttatttcttccaacatttggtttcctagttcaacttcaaaagtttgttattatcacacagaatatttggagtttatttatgactaacctttgttttgaaatcattcttttaaatgttttcctactacgttcatcatgatccttgtaacgcatgtttcctttaaacttccaagaaactgtcttccatgattgttgttttgcttctctttggcaataaacttgggcaagaatgcttttatagtggaacacgaatcattgaaacgctatagaaaaactgtgctacagttgttatcctctcgtgaacttttggttaaataattcaggctcgaagagctttacgagctttaaaagggttggtgagacttcaagctcttgttagaggtcacgcagtgagaaaacaggcggccataactcttcgctgtatgcaagctttagtgagagtacaagctcgtgtgcgagcaaggcgtgttcgtatggcattggaaagccaaacagaacaacaaaaacttcagcaacaacttgaaaatgaagcacatgtgcgagaaatagaagtaagtaaccttttattcttgtgttattagttacatttatgatataatctattgaaagaaagggaggtctcatggtctgttcttgactaaagataattttctattatgactaaatctagtaagaggatactttaatttcaaactattggtttgttcctcgaatgtgtgtgcatatgtgcataaatatatacaaattttgttacatagtcaggcatgcttacttttgaaattgccatcattaagaatatattctttgaatgaagtaagcaagtagatacttaaatttaaaaaccaataatatttaaaagtatataattagatttataacatgatattggctttttaaaattttataaatcttttatatactttcatgttcttttacctattaaaatttttatacatgctcattgttatgatatcttatcaatatttcttgataatttcttaagtaaaatatttttgatatttatacttaataatatattagttgttttcattgttttagtgaaaaccattatgttatttttattagtttttccttcattcatttgctcgcaaatgcatcttagaaaagtcattaaaataaaagagaaaaaagtatgcagtgtcaatatgtattttgagttaaaatttacatttcatggctctatataatatatatatttatatatataaatagttgaatttcatttaaaaatagatagaaacaacaacttttgtataacaacttgctgcttcgaactatattcttaaaactaaaatattgcagcacatgtaagaaacatttatatgtatgtatgtgtttgtctgtatgtacatgtgtaaggaatttttatacaccaactttcttcaatttggtttcaaactatttaactgttgaatttatttgacttgtcattagtagtgactacggaaggttcctacctacctcgtttctggtaactttattgatttcataagaacaaaaaacatgctagattatatcatagaaaactttgtattttgtaaaattttgactgaaaaactgcatatttgaaaaatgttagcaaaacctgattatgttttctgtcatataattcttttgactattatcaaatcgtccgttttcgcccttagttaaaagtcacaagtactatgtatttcaataataccaaacaacatgaccaaaataaaaaaaaaatgcttatcttaattatcaaaattgtaagatttcaggtgagaacaaaaaaatgaagcaaatactaataaatttacaatttacttttgaatttatatttgagtaatgctagagacactaaaactacacacaataatgtatatttaatttagttatagatagtttaaatggtaactccatcacttctaattgtaagataagaatttttttttggaacaattgtaatgttaatttaagattatgtaaaaattgaattctttatatttttcttgagactagaaaactgtgacttaaacttcaaaccttttagaaacaaattacatttcttttgagagttgtacatgttaatttgagagttcccttccctcacttgcaaacaagtggaaactaacaactcaagtattgtataattattttcccttgaggccaaccaactttctatatacatacaaaatacaattaatgccagctcacgaatgaactaactacccccaacagacacagtaagccactatctattagtttacacaagcacgagacaagtacaaagtacacactcaactgagtctcccttctagtgtatttgaaacaaatgatgggtctatcagttgatcattttacacatcattctgtggtgcaggaaggttggtgtgacagtgtaggatctgttgaacagattcaaacgaaattgctaaagagacaggaagctgctgctaagcgagaacgagcaatggcatatgctttggctcaccaggtgagaagaccaatcttttttcagttgtatgagcagtttaatagtcttgctaaatgttactgtaatgtgcataaattgatttagcgaatatcatggtttggatatgtatagttacatgttttctctttatgctgttattatgaatgtggtgttattcttgcacattcatgtaatgttgagacattgagcagcaaatgtgctgctattttgctgtaccaacgaaactctgtagccagctgtttccttttgacagtatgatctgttgtattaggcttttaaatcacagtgttctccattttgaattaagaaactatcagtttgaaagttaaaataccttcccatggttttacttggttactatcacttactaggttctgtgggtgatttgaaattatatgcatttatactttagactttagtatcattcttatagctgatgtagatgaattttgaaggataacagagaatgtttgtaggatatggcatcaggcttctatgtgcgtctctaactgaagatttgggattggggtttcatttacataagtgaaaatgctgtaaaatagtattgtggctagattgaaatagaaataagaattataaatgaaatactttacctttttgatgtgtaactaatgatttcttcatgcttagtatagggatcaattggaataaataattctaagcaagctaaaaaactagagttgtttaccccttgcaataattgtttgaagtataccgtatatcattgagcttaaatcattctgcctgcagtggcaagcgggatctagacaacaggctgctccttctggatttgaaccagataaaagcagctggggatggaactggttagagagatggatggcggttcgcccttgggaaaaccgatttttagatataaatcttacagatggagttatggtacgagagaatggatcagctgagggcaaaaatggaaccaaatcccagttaaaatctgctgggaaaaagccaattacaacaaatatgcactcaaatcttttgcaacagaaaactggtgctgctcattctgatggctgcagttcgtcgcccagcaaatcagcagccatagttgagccttccaacacacaacatcccaagccaaaatccaagccacatttagaagatcaaactgcagaaggaaactcaaaacctgctgtcagttcgagatctcaaagcaatccaaaagagagatccacacaagctgataaacaagcaaagaagaggttatctctaccaaataacagtgagtttgttctccctgcctctctccctatatatatttacacacagatacatacatacatacattatgtccaattgcagtctccaaattagaacataacaatcataacagacacggttccatattcccatttctcaagtcacctactcgagaacattgtagtctactttttttttttgggtaaccgataaaagttaaaataacaaaagtaacaaaggttacatagtaggtggggatttcttccatttaagaaagttcattgtctatcttaagggcatacttagccaatctatgggcctcaacattaaagtaatatgagagagacctaggaaaactagacaatatgactttgatatcagaaaagataacccccaattcattcaaatacactatttgaccctccaaagctgagaccaaagaaagtgaatcagaaaaaaccctctccacgggaagtcccacatcttgagcccaacgcaaacctactactagtaaagcaactgcttctgcctaaaaaactaaaaaaaaaaacctgcaaatgagatagttaaaagcaataagtacttttaatttttaaaactcaaaaaaaaattttagaatataattgtaatagagtcaaacctttttagttcttgttattgtccgtttaattgttgcttttggttggatcagggggaggttccggcgctcaagcagccaggcaaatcaatagaggtgctgttaaaggcacacccaattctcagaaggccgggaaggaaagatcgaaaccgaatagaagagaggaactaactccttctaaacctgtcctgcaaactatggatgcgtagcttaaaatatcccccagaaaaataatctcatgctatttcttggttttgatgccgctgtttgaggctgtacatattgagctacctaccatgagaggatattcaaccacattacattcacttctgtacaaatatattaagtggttaagctgcagcggtgtcaagaggattaagcttgtcaaagggaacaagaatagctagtattggtgtgtgatgaccaggtatatttgtggtgttaattatgtgattatatttatgcattatattattattattgtttttcaaatgtaaaaatttcagagctgtccgtttcagtattaattaagttggtagtattatttttgtacttatgtttcatctagacaaaattttgtatgggatgagagtggtagtggtaattaattgagaagtgttatatatattaatatatacatatataaatatatataaatacataaagaaattctttggttggtgtatcacgtttgccactaccgtatacacattttgttttcatacattttagaggggagattcgaacttgagattttctatttgtgataaaaagtgtagaattattaagcaatgtctatggctatccgtatagat

SEQ ID NO: 220426 - DNA, 3447 bp, Cannabis indica
agcgaatgagactgagtttgtgacttgcatcactggcggtgatgatgggcaactaattttaagcagtaattcctgtagcaatgcttttgcggttgagacataagcagccatcttttctccgtgagtctggtattttcccaatacttggttaacaaccaattgaatgtctttatacacttccaccttattggctcctactactttggctagccttagccctgctagcaaggcatactcaacctcattattggaggcaagaaatgtgaacctcaaggtggcttggagtctcattctgtcaagggatatcattgctactttggccccggatctattctcgttcgatgccccatcaacataaactttccatgcagtggtatctaaatctggcacattggcattggcttctgtttcgttgtacttgacaataaatctgcaagatcttggcctttgatcgagatgtggggtatgtactgtatttcgaactgatagagttcattgcccagttgtgaactatgtattgtatgtactgcacaagaacaggattagctaaccagtttgggtgaaataactcccttataatgaagtcgcatgctaacaaacgatcaacttcttctttaagcgcttggtacctcgcagggtccactttgttgcacttctattgtactcctcgcacttcaaggtcaatgttcaaatagtgacacatgaccacgggcggtattccgaccatgtctgaatatttccacgtttgagaaaagtcataagcttttctcactgctgaaaaagttagtttagaaccaatttttagcactttagaattatcagaagaatcaataggtacctcaattgtcttttccgcggcttttacaacgttggtgtagttaaggatccaaggatccagatcgggtttctatatatgcagtattttctcgattttaaaaaattcatgtcgaaggggaggagcctcgaggaaatagatgacatttaccaattttttcttttttgcaactttcaacacagtattatagcattctcttgagttcgactggactgatcgcactgatcccacacccgaggggtagggaatttcatggtaagatgatagattaacatgactatattcatttcctttagaataggactacatatcatcgcattataagtagagtgttgatcaattactgtgaaatcggccattgacttggcagtgacgggtgtgcaatccctagaattattggtaattttatcatccctttcaatgcgattgtatccctagtgaaaccataaatactcgaggtcattggtcgcaagtccttttcatgtaacgccattttttttaaaagcctgtaaatttatgaggttgatagaacttccattatcaactaagacacgatgtacattatcccctccgatattagcgatcaccactagggcatcggcgtgtggatgatgtaccaatctcgtgtcgttttccaagaaggtaatgtcctcgcattcctttttgaataacttttttggtcgttcactcaaattatttacattggtaaggggtttttcttttgcttcttttgcatagcgctcctgcgcttttctagtctctccactgacatgtggtcctcctatgatagtcagaatatcgcgaggggcttgaaaaccactcacatcattcgtatcattgttatgatccgctcgaggatgattttctccattcttcttatattggctgaatttccctcgtctgattaattcttcattctcatcttgaagaaaccagcactccagagttgtatggccaatatctttgtggtacttacaaaatttcttcggatccctcttgtcgtgatttccctggattggaggcggcttcctgaagacgccattttgctcctctattgcatagatatggtcgcgaggagcagacaactcagtgaaattgacgaagcgtggaccccctttcctcttcggagatgcttcctttttagtgggggatttggcgagctttggactttgtcaccttgacgaattgggccttctagggcttagactagggtttctcctttcctctttccaattcggccaaagaattctcaatttttttatgcagtttttccatagcaaaaaattcaaccaacgactcaggtcgtcgcgcttgtaattctttccaaaattcgattcttggcaagacacatgtaatcaacatacagagcaacaaagactcaaggaccttctcgaccttggttatcttagcattaaaacctttaaataatcttgtaaggactcaccgacttcttgtttaacattttccactgttgtgtacgacagtttgtacgttattgtggcctggaagtgcgttaagaacacgtctacaaaggtttcctaggttgatattgaagcctcaggtaattggctaaaccaatcatatgcattatcttttatggtatctgcgttctgatcgagtcacatatatggacactttatcagtgttgataacataggtcatgcgagttcttatcgagtcatcgagtacgctaggtcatttggaccaatttgttatgtaaagaaacaatctttactaggtcgcaggtgaaggttacttaatcatcgcatatacttagggatatgcgcgacctgtataaacccttcttgatcctatttatttcataatacgcaaagcgtgataatgcgactagactctgtcacgttcacatcatctcgcgagtttagttcaggcgaggtttattctcaaggagtcccttcttgacagcttagcaattcttaacggatgtgagtccacgtatcactcttatgggagcctggtctcaaatttctaagtaaaaaattcgcactatagcacatttgtatctaaacactatattttagtcacaaataattttacttaatacccattcatatatatcaaaatatatttatatatataaatatatatatatcagaaaattgattaattaaaacatatcatctacgaaagcactctgttcatagaatataaattctttttgaccttgatgttatatatttcttttaaccttatcacagtattctaaaaagtttttatttattattaattaagttctctgctgggtgatgtgtacgaagtgttttattaattctagtaactctgattaaaggtgcgaagcatggtttttattttattatctctatatataaaacaaagcttgatcgagtaaatagaactatatatacatattaatttgtggcattcaatagaaggtagcctgtccacgaaatatatcatagatcttcatgttttcggaactatgagcatctttaatagagtactaaaatagtagtatattcctatattttaatatacttagaaaaatttactcaaattcgtttagaacgtggtattaggtcgtattgtattatattgaattcgattatatatcatatttttatataatacta

SEQ ID NO: 220427 - DNA, 5524 bp, Cannabis indica
aaagttcagggggaaaaattactgattagcctaattattattgtttttaaaatatcaatattaaaaggttatacagttatagagcatcatcaagcatgtggaaccgcgaattgtgtaaacattctggttagctttttctttctcttgtcggtcagactctactaaccctttctttgagtttggttgggggtctgatcaggagggccttttttgattgagtgagaaatttttcggtggtgtttggctagtctaactaggattattaaatttacagagtctgttattatgtaagagatgttaatgcttaactgtcattaacggtttccgttacttctttttccttttctttgggttgtgtgagataggtggttaggttagttagttcctatttttcttctgtctctggtttagcctcttgtatatattgtcccctatttttattcttagatcattcaattcaataatacaaaatctctttttcaattctacattatggtatcagagcagggaaagatatactttccctgatcgatcctattaactccggtctccttctccggtgctgacgccgtgttcttgtctccttctctgacattctgctcatcgtgttcgtatccctgttctctgtgtttcattcatgtcgaatgaaactttgtccatagctcaaatggaaagtgaagatcccaactcaaaatctgttgatagtccttctgcttctactggacatgggaatcaagatctgcaattcatcaatcaaaagaacccgcttgaagatccttcaaatccgtattacttacaccatggcgacaatccaggtaacgtccttgtctctcgacttctcactggacaagataactatgcttcttagagtagagctatgcaactttccatatctgtcaaaaataaacttgggttcttggatggaactattcctaaaccaatgatctcagatcatactctgtataatgcttgggtgaggaataataatattgtcatttcttggatattgaattctgtatccaaagaaatttcgtctagtatcctatatgatgaatctgttgccaatatatggaatgatttaaaggttcgttttcaccaaagaaatggtccacagatttataatcttagaaagaacctaatgaatttgagacaggaaggacaaactatcagtatatacttcactaaattgaaaaccatttgggaagaattggccaattataggccaaattgcacttgcaatggttgcacttgtggtggagtaaaaaagatgcaagaacaccaccacatggagtacataatgtccttcctcatgggactttcagatagtttttcttgagttcatggaagtatcctttcaatggatcctctcccagatgttaatcgtgtcttccatctagttactcaagaagaaaatcagaggtccaatctcactgcaggaaacgatccaaacactagtcatgcctttgcttttcaaggagacaaaggaaacaagactgataatcaaaaccagaaaaaccaagcttccaagaaagggacccttctgcactcattgtaacattcatgggcataccattgaaagatgttacaaaattcacagataccctcctaatttcaagtcaaacaaacaaaaggaaggcatggcaaaccagttttataccagtgaagaaagtaaaggaaaaatagaggaagctcatactcttttgcctcaactaagtgccaatcaatatcaacaactccttaaccttcttgccagtcaacaaaccaacgtgagtacaccttatcctagtactttgataggtaatttaggtataattcttacctatgcttcatctaagttctttgacacatcttggataatcgattctggtgctaccagacacatctgtaacaatcctaaaatatttcaaagcatcacttgcgtgtctacaactaagttaatcttacctaataatgaagctcttatggtaaatcaaggtggtactgttgctatttctaaacatctaattctcgaaaatgttttatatgtttttggtttcaaattcaacataatttcagttagttgtttaactcaaactaatgctattaaagtcaagttctatactgataatttttgcattcaggaaaagcaatccaagaatgtgattggaagaggtaaagaatggaatggtctgtatgttctggaagatactcagattgatgcctgcaacactactattattgctgatatgtggcattgtcgtttggggcatccttcccataaacgacttgctttactttgtaataagattcactgtagtgttgacaatgttcataaacaaactccttgttatatttgccccttgaccaaacaaaagaaaattcatttttctaaacatactggttttgctaaatccaagttttatttaatccattgtgatacatggggaccttaccatattccttcacataccaatcacaaatattttctcactcttgttgatgataagataagatttacttggatttttttaatgaaacagaaatcggatgtcatgcaaatcattcctaaattcttggcttatgttcaaacccaattcaaatgtgtgtttaaatgtttctggtctgataatgcacctgagttaatctttaaagatctcttttcaaaatttggtatcttgcatgaattcacttgtgctgaaactcctgaacaaaatgctatagcagagagaaagcatcaacaccttctaaatgttgctcgggctctatattttcaagccaaaatgcctattcatttttggacagaatgcacactcactgctgcttacctcataaaccatatcctacccctaatcttgaaaataagaacccctatgaaatcatttttgataacttacctaagtatgatcatctaaggaacttcggctatcttgcttttgcaagcacactcaatgcacacagaaacaagttcacaccaaggactagagcttgtgttttcattggatatcctcaaggcataaaagggtacaagttaaatgatattaatattaaagaaattttcatttctagaaatgtcatttttcatgaaaaaaatatatccttttcatcgtttaaatattacaaaaaattacattgaccctttttctaacatggttcttccttctcctaatatatctaacactaatgttgatgattttcctgatattgttaatgatagttcctgcactaatgactcttctcaagattgtggtattaatcaggactttgctgctgatgatgaacatacataacaagaacaagacgttgagaatgaaaatccttcaattcagccaaaagaaatacctctagtccccaggcgcaccagcataatcaccaaaaagcctgcatatttgcgtgattatgagtgctattctgtactccaagacaaaaattctacacctcatatacttgaaaaaattttgtcatatgaaaaactatcttacactcataaagcttttatctctgtcataacagccctctttgaacctgcaacttacaaccaagcttctcaattgcgaatatggaatcaaaccatgcaacaggagttatttgctctgctaaaaaacaagacttggacttatgttcgtttgcccccaaacaagaaggctataggatgtcgttaggtgtacaaaatcaagctatatagtgacagttttttagaaagacacaaagctcgtcttgttgctcaagggtatactcaacaagaaggtttagatttcttcgacactttttctccagttgcaaaaatggttactttcaagctattattagccatttccaccatcaagaaatggcatactttacttgacgtaaataacgccttcctcaacggagacctcaatgaagaagtctatatgcaacttcccaaaggacttgttcttcccccagaaattgctacagattctaacatggtgtgcaaactgaacaaatcaatatatggcctcaaacaatcatcaagacaatggtacaaaaaattgtctgatgctctaattcaagaaggttttgtccaatctcaagctgactacactctatttactagaggttcacaagacgatttcattgctattttggtttacgtggatgacataattctcacgggtccaaatctgtctctcctaaacgaactatgatctatcttgaatgataaattttctctcaaagcactcggcaccctcaaatattttctcggatttgagatagctcgtgcacaagaaggcttggtgttgtttcaaagaaaatacaatttacaactcttggaagacaatggtttcataggcagtaaacctgccaaaacccctatggacccaagaatcaaattggatgatcaacaaggagaaccacttgaagacccctcaacatatcggcaacttgtaggtaaattgctatatctcactctatcgagacctgacatcacgtttgctgttaatttactcagccagttcatgtcatctcctcgaacacctcatctacaagcagcacaccatcttctacgatacttgaaaggaagtccaggttaaggtctaatatactctgctgcatcatccctcaatctttgaggttattccgactttgactgggcctcctgccccattactcgtcgatcaaccacaggattttgcatctttgtcggagactgtttgatttcctggcgcactaagaaacaacccactgtttcttgaagctctgctgaagcagaatatcgagctcttgcggcaataggcaatgaacttacctggctgcaatacttacttcaagaccttcaaattccccaagatcaacctgccttcatatactgtgataatcagtccgctatccacatagaaaacaaccaaacttttcatgagagaacaaaacatattgaactggactatcactttatccgtgacaaaataaccaagtccaagctacgtctcagccccataaacagtaatcaacaacttgcagatgtcttcacgaagcctcttgcttccactattctcaactctcacataggtaaaatggctgtatacgatgtataccgtccatcttgaggggggatattaaatttacagagtctgttatgatgtaagagcggtttaatgcttaactgtcattaacgatttcgattacttctttttccttttcgttgggttgtgtcagataggtggttaggttagttagttcctatttttctactgtctctggcttagcctcttgtatatattgtcccctgtttttgttctgtgatcattcaattcaataatacaaaatctcttttcaattccgcattaaaaattcttctttgtcttagatgagttgtctctgatctggtttggtggttctggattgtggtctgatttggtggtctcttcctcgatcttgttgaatctgatccatgcgaattggctgtacaatggtctctgggtgggttcttccattcatggtcgcgtatttcccagtcagtcctaatctataatctaacatcctaaacatgaatttcctaaaataataaaataaacacatttaaagt

SEQ ID NO: 220428 - DNA, 2614 bp, Cannabis indica
gactcggattgagtatttcatgcctcagaaaatcagtggcaatgataggaatggttctttgcattataatacaatacaaaaatgtaattatttgtatagattgatcatgatgtacatagttcttggccctcttagggtgcgaataggatgtaaaaattttgtttgtgcaatacaactcattgatttatcaaaaaaaaaaaaattaacaatataagaatggaaatctattcacttttaaaatataattgtattatatttattagatttttaaataactattttcttaagattaaaatgttatttgtatatataatgtttaattttttttataaatatgtgtggactgaattggatcagttatttttacatgtcaaatccgcactttgcaaattggattgaatcgtggaaattgaattaaatcggctattttatgaaccacattcaaaagtgcaagttccaagttacttttaaaagaataataaaagcctaatatattcaaagaccgtgtgattttataaaaataggagggtttattattcaaaaatgctcgaacatcttaatacactcaaccttattcaaggatacatctaccaggttcttttcataaacaaaatcaaagcctaaaactgaagtaccttgttatttttcaaaataacacataagttaagaaaaaaatacaattgaaatagatgtatgagtatctatagtagaaataacaaaagaaattaaaattacaattgcttgaacaaatcaatcaatattttaatatcaaatgaatctttgttgattttgcttcattagacagaagtaacatgaagacaataagaagatttgtccaaaggtaattggtgtgaaaaaacataggaagagaatgttgagaaaataatcgccaaagaaagagtgaaccatttactttgttgtttgggcaaatgaattttaaatatggaaataccactttataagtatcttattatttccatttagtttttttttcagcttttaaaatatatcttttattgttcatatttttctagttcaatttaaaaaaattccagatttaagaaaaaaaaatggtaataaaatacatctctcacatcttaaaataaatagccataatactaattttgaggccaattgaatagtgcaaatattttttgaagttataataagagagaagaaagaaacattaattaaaacaatgccaaaatattacctaatgttgagtttgctactaattcatttcttaaatgtatgaaactagttaactggaacggtataattaaagttgtgttagctgacctatttttttaatcactttatatgtgcatttttgaaaaaaaaaagtcatttttagtcacccacaccttcaactgcagtttattcttaaatataaaccaaaaattgtctatgttctctttgattgattttgcttcgttaatttttaatcctatttttaggtaaaaaaaaaagaaaataaaaagcgttcttgaaagcaaacctacaatgaaaaggaaagaggagaaatctactcttgttagttgttactaattagcataaattcaataagttgatcggtaacctaaaccatcaacaaacacaacatacaacacacaataataaagcacaacattttcacacgaagatgatcactactaacaggccgacatgatgatgattactttactaatctaacacacaaataacacattttatttaaacttaaaagtgagatagattactgaaatgtgtaaattttctagccatcattgatcagctcagccagattgcaccaatccagaggaaaatagatcatgtacagcaatgcaagatcttttgacagaatcgtagtattcagctgggttgggtacattttcaagcacttgtttgatgcaagtgtccacatcggtgctgaccctatcgtcctcggccaggctgcaaacctgatggatctccacctcgtcgaaatggaaaagctcactcactttcttcaagcattcctcgtgctccattcgctttcccattacattaccattctcaatcatcgcaccattgcaaaccgatatcatcaaagaagcactcactatcaacacaaaaatattcatcacactcattttcatcttcattatataaacagcttagtttgatgtttcttcttgaacctaataatacttatatatatagaatagtctgtgtgtagagctaggagcggaggaggctttatctagatgagatgactaagcaagccaataatgaacaggacattaaagtgggattccttttttatatgctaattaggattttttgtcctaatcaaatcatggcctctgatttaaaatgtccctaaactattgatatagttgaatttaaagatttttgtgcaattttagtagaaaaagtctaacatgaatgaaagttgagagagtatgatttagtatatgtcgagggatatgatttggtagatataaaagtttgaggagcataatttagtatataaacaatcactacaatagtaaaattaaataaaattagacaaaagtccttaaatctaacaatttcaatagttcagggcgaattttgaacggctaaaaaaagttcaagaaacatgatttaatac

SEQ ID NO: 220429 - DNA, 2452 bp, Cannabis indica
tctagataataaattaatgaaacgtataacttatttaacataggttctattattcattataattaaaaatacttttgacaatattaaatattacaatttatcaaaaactcttagaaccctagactattaggtgaatagcattcttaagataataatagattaaagcaaaatctattttagtaattatctaaacaagattaaagcaataatcatggcattaaaaatagaagaataaaaacaattcaataatggaaactaagaaaataacattcatcataaaaattaagaattcatgtttttggatttgaaataacccttaactaaaagaaactattctgaactagtcattataatgaaaatcataataaaaagtacaagtttaaggagaagagaagaaacactgatgatgaacaattgatgtcgcaatcttctttatcttctctttctctctcaaaacttacgcagttcaaaagtccataaaaacgaaccctaaaagtcctatttataccccataaaattcatttgatttaaaagaaagataaaatttaaaaattctgaaatcccgctctcaccaccgcaaagctttaggctccctgcggccacaacacgctcattgcgacaagagcctcatgctgaaaaatttatgttccgtgcttatattagtattttggccataacttctttaatacaactcgaacttggatgattcaagatagtctgaaaaatctgagaacgaaatctacaactttaatgttcagctccaagtctaattttgcttctaaggtcgtcaaaaatcacaattacgttccgttttgtctgagctcgctagcttccattattttccaccaaaatatattaaaatcctttcaaataacactcctaatgtataattagtctttaaaatagcttaacaaattataatcacacgaatcggtaatttaaataatcaatttacgaatattaatacataaattggtcatatttataagataaaatatcaacttattaacgtacaattcaaaatttaaactagaaattttctacttacaacgtacaagttgaggatgctcaaagggcaccgaaacttggactaaactcctctgccaaataatgtgaattcgacctttaatactcaaactagagtaataatcttagttgggagaattattttgtatcatagtcataattaacatgttcattttggttttaaacaaagcaccaaatcaatctgaagatttttaacctttccttattacccttataattcatcacaacaattagcattgaataattaaagtgcaaactataagcttggtgttgaatattatatgaattatatattgagctaacacgtttgttatatcatgtgttcataaatggcaatactaattagagaaatgaaatggaattataatagaatgaaaaagaattaatttcattttaatactttattagtttacattttaaaatattgaaatatgattatcatgaaatggcttttaaacaatttggtggaataaaataaactattataataaaattatttaccaagctactatgcaagtgatgttttagtgtatatttgttagaacatatcattactcataattaattaactaaacaaaagagaaattcgatatatgtcgtcatcacatattagtttcataattgatgtgccaaaaataatcacggattcgatacaacaaaagacaaatatatttatacaatataaaaacaattcttagtgacaaaataataataataataataataataataataatgggccaaatgaacatcgactatgatttatcacaaacaaatgagaagagaaagaagaagacgattgtgctgattattattaccccatgatttgcaatataatgtatttgtctcaactctcattatcatgttgactaatattcaatatatttatatctaatacgtacgtctttctatatctaaataaacatgtataaatattattgaagacaattaatgtggccaaaataaaccaacaataatatcagtgaacctcacgtacataaaaaacagacaaagaacataatatcaaatacattgaaagaggccaagagatgtaatatgtatagcttttatttgtttcatattcccacttgagtggataacaacaaacaccactatatatattatatatatagatcgaaagatagataatacgcatccaatattaatgttttctttctaaaggatttatagggtgaaaggacagatgaaagctatttgtggtatcagaatccgactgacctttaattaattattaattgcaagaaaagatgaagaagaggtttgaatatttccaaaaacctttttgatttctttggacaagtacattggattgtcttacaatcatttgatttttgaatttccaggagaggcaatatttaaaaatttttatttcttgattgtgaat

SEQ ID NO: 220430 - DNA, 5361 bp, Cannabis indica
ttaattattgggtttatttatttgttaacgtttaacgttaacagtctgttaagttaatcgtgtaaggctaaataaaaaaagaatcgttaaaccaagaatcgttaaaccaagaatggccgttagataggcacttttaatatataaagatataaaataataaaaaatatttgcggcataaatattatgtttttgaatttataaaataaaaaatttatatttcttttaaatataaaaatatcatacattacattttccaattctgtgttactacaattctattaaatgatgagtgtagttattaggataccaaatatcatgttattattggtctactttgtattaagtttaatatttaattaattattttgactaaaataataaaaaacttattaaaaaaactaattaattaataatttttttttaaaaaaaattatctctcaaatttatcaaataaaagaaaaaaaatatctccatcacttttttttttcactgcggttcttcttcttcaagtttacccaaaaacatgtggtttaacataaaactccaatccacaaacacataacataaatttcaaatctacaaactcgaaagattaaaattaagccctaaagtagcccttttgaactaaataaaaattgagaaatcacaaacaaaatcaaaatacaaatgaactcaaaaacatagatttgaaattcaacttctcagtactggtaacaagctttcaaccaaatgacaacctagatatgtctgccattaacgtcggaggggaacccactaaaagagagaacgagaacctatcagcaaattgtggccaagatttgtctgccattaatgtcatcgaaggagctaccagaagaaagtcaaacataatttgtgggataattcttctaaataaaaagatctccataagaatgtcacagtaatggaaggttaattgtctcccgaaagtgtcttcatggataactaatttgtctatatccaaaagaagtctcgtggaatgatagttgccatctggaagggtgttcccaaatgtctatcatgtccactccaggtgtagtcttcaggaaaactaactttcctccggaaaggagttttggatagctagttgttcttcctggaagggtgttctggatagtcgactccaactggctcttttcttatccagaagtccattcagcattcgcttatgtctgttatccaggaagcatgtgtctcatccggaagcaccttgtattgtgtagatgtggagattttgttacaaagagtttattaagtttgttaagtcgtaactaacttaacagcttaacagttaaaaccactatcttaggatctttatcttgagcctatatataccaccaacacttttcatttcaagtacgttgaattgacaagctccaagaggagactttgagtttgagagagaaagataatgaaagctgtagagagaggtacaaagaaaagagagagattgggcttgggttttgtatgaagaatcctttgtagatgaagaagattcttgggcaagagtaagagacttgaaacatcttgaagagatccaacaaagaatctttctcgattgtattgtacatgttcttggtcaatcaataaataagatttggtggtgttctagaactggagtagagacatagatcacatcgatctataggatttgaaccagtatatatcttggtgttaaatttgttatttattgctttaattgtttctggttttagatgcctctttttatccttgtttttctctgattattgtttttgactttaatattgccattactaactatttgttgatcaagttattagttgatttgttatgcactttagtcttaattttaccacaaatcaaagcttggtaatctatcaagaatgcaaaatcaagattcttttcgttgtaattcttgaagaaacagttaatgtcatcaatgatgagatttaaattggagaagtttgatggaactggggactttgcactatggagagaaagtttaaaagggatcctagttcatcataaagtctatatagttcatagaaatgagaattattggctaaaaagaaaccataagataaagcagaagtggaggagatggtgtattgtgcgatcatcatgtatttatcaaacattgttcgaagaaaactcattgcagagaagacgaagaaaggagtctggaacaagctggaagaattatacttaaagccatcgattgctatcaagattaatttgttagaaaggttatacagttttagaatgatatcttctattttttttagatgataatattgacattttaatgagattactgtaggattggctaatataaatcagaaggttgatgaagaaagtcagaccatcatttttttttgagatcgctcccaatcacatatcaagaagtcaaggctgccatgaagtatggtagagacgtgattgcattggaggatgttctttccacactcaagtcaaaagatttcaaatcacaatcggagaatccaagaatgaagaagtttatttggaaagaggaagaacacccaagaaaggaagttcaaagagtaaacactatcactctcaattaagatcgaagtctagagagaaggaaactcgaaagtgttacttttgtggaaggtctgggcacttgcaaagattttgcaagaagtaaaaagagcagtaagacttcaacaaatctcacaatggagataggaaggacaacatgcattatcaccacaggaaggattcaactatagttgcggaagatagtaatggcttcgcaacggatggagaattttttgccatgttaaaatcttcaatgaatagggagtggattcttaactcatgatgcacttatcacatgtgtccaaatcgagaattaatttttgattatagatcagttgatggaggttaatatctaatgggaaatgatcaattatgtagggtcattagaactggaaaggttatcatcaaacattatgatggcggaatcaaagtattgacgaacataagacacattctgaacttacgacgaaacttcatatccctgggtgcgcttgaagatgaaggttatggatacaagtccatgaacgaaagcatgaggatcaccaaacgttcgctgataatgatgaaaagtgaaaagattaatggtttatatgttctctaaagagaaactattccagccggagaagctagtttggtgaaaggtctcgaatcagatatgcagttgtggcttcacagacataggcatattagtgaacaaggccttaaagaactgcaaaagcaaggtataattaaaaatttaaattcttgtgccttaccattttgtgaagcatgtgttttagggaaatgacataagtcgaagttcactccggaaaggcacatagctaagaagatacttgaatacatgtgtgctgatcttaggggaccaacaaagtggctactcattctggtaagaaatattttctttctatagttgatgattatagtagctgcgtttgacgtatctactagcaaccaagaatgagtgcctggaacaattttgaatttggaaaactcaagtggaaaaccaaaccgatctaaaagttaagaaacttaggacagaaaatgggttagagttttttaacttttgatttgacatgttgtgtcaagagtatggaatcattaggcatagaaccatagtgaagaccccgtagcaaaatggtgttgctgaaaggatgaaccaaaccatgttgaacaaattagatgcttattgtttagttcagaagagaaaccattttggggggaagctctagctactacatcctaccttataaataaaagcccaaactgagttataggcctaaaaatctcttatgaaatgtggtacaatagaaccccaaacctaacacatctaataacctttgggtgtacaacatatgtacattaatccctattgacaaggtggaacctagatcagttaaggaaactttcctaggttatgccttaggtaccaaggggtatagcatttacatttccaagaaaggtagaccaaagattgtaattgctagaaatgttattttttaatgaattggaatacccttacttgatatctgaaaaaggtagtgtgtctccgtgtgatgcaagaaaaatacgaaactaggacactacatggatggaaatggattacggaacgaaacatgtggaagaagtttcatggacggatgctattgtggaaccagatgacagtgtgtggacgtaagctgatactaaaactggcagtagtacaacaaactaaaattgaagagcctagaagctacgaagaggcaatttcaagtggaaataagttaaaagagctccatgccatggatgaggagatggattcacttcggaagaacaagacttgggttgttgtacaaaagtcggagaacaaaagattgtggagtgaaaatggattctcaaggtgaaagaggaaatcaatgagaatgaatcagtgcggttcaaagccaggttagtggctaaagactttactcaagtggaaggaatagactatactaaaatcttctcacttgtggtaaagaacatgacaataagatgatgttatctctggtagctcaaatggagtttgaagttgaacaacttgatgttaaatcttcctttctcaatggattcttggatgaagagatcgaaatgaaacaactacttgggttttaagaggaagaaaagtgagttgaattagtttgcaagcataataggtccctatatcgtttgaaatagccccaaaaataatggaataaatgatttgatatttatatgcaacaaatcggcttgaaacgatcagcatatgatcaatacttatattttaagaacctagagcaatctacatcgatgaatctactactttatgtggatgatatgctcatcatgggcaaagataaattagtgatcaaaatcttaaaagagaacttgagatgaaagagctttgaccggtttaaaagatactcggtattgaagtttcaaagaattggaaagaagggacgatcagtttgaaacagtccgggcacatcaagaaagttaatttgaagctcaacatggaagatgcaaagagtacgtctgttctattaggggaccgtttgttttgttgaaggaatagtgtccgaacagttcgaagaagaaaaaggaaatgaaggatgtaccctatgctatagtcttacgatttttatgttagggttatgccctcaaaaacatgtaaaaacatttttgattattaataaagagttaaattttttgatatattgttgaatattaaattattaatattattattggataatttatatataaatatttgtaactgtacaaaaactaagaccacttagctatgaa

SEQ ID NO: 220431 - DNA, 1442 bp, Cannabis indica
gacctagacccggacctggaccctagacaccagatcctaactccgaacctgacttgaacccagatctatagcacggggttaggtctgaggtccttagtcgtgttcaggtttgaggtctgagtctgggtccagggtttggggtctgagtcgagatctgggttagggtccaagatccgagtctgattttgagtctgggttggagttggggtacgagtccgagtccaggtctgttggaacttattttaccaggatctagatttactaacatgtatgttgattataattctatagtctaacatcctaaatatgaatttcctaaaacaatgaaataaacacataagagattaataaatccttacattgatggcagtgaaatataatgactcattccattcaaatctcaagctcttgattcctatctgtagcataacactatcaagatttgagatcttctcttcttcaatttgattagatacagtcttcctcattttgctaggtattactttaacatgtgtgggcatactctcaaaacactataggctttgaattattcagtagagaagaagaagaatttcaataataatagctttctttattttctaattgtctgacaaaaggagagtactggtcatcatctgaaaacaagagctatacttttctatttatagagtagcttttagggttagatttagaattaaaatagaattaaaaaagataaaaataatggccttatcaaactcgttggtcgaaccctagtgtgcctgggttatctttcttttcacaaacaccatattttaattctaactctataaatgtcaaatctatctatttaataattataattagttatcaaataaaattagcattaacttatttattaattagaccttacaaagtctcttaattaataaacaaaccctaaaaatctattttcttctaaaataagcccttgcttagcaaaaatttacaaccaagacatagtcttatttagaattttaattgattaattaaaatgaattaattgagactacaaaatataatattatcccaattagtgcggggactatgaccctatgtaaccaagctcccaattagtagatctgaaatttaccaagtaaattctttgacttattagttcctcctgactccactgtagattcagaattacaattctgattacatagaacctctatataccaaaaaatagatgcactttaaattacccattatttcaatccaaataatcaaagatcctccataaataatcactactacaaaaatagtttttctcgacgtttttaagcagtcatttaaattattcccgtcggtttctataactgccgcctatatgatcgtcgcaaaacgggtaaaataggcgacagttaaaaaccgtggctaatgtagacttcctgacgatttaaaaccgtcgagaatgtaaaaaa

SEQ ID NO: 220432 - DNA, 1213 bp, Cannabis indica
tgtcttctcttctctcacgataaatataaataaatctccagcaaaaaaagataaatataaataaataaataaacatataacatatatatataatgatcaatacatactctccaacaaataaattcattacttttcttcttctttcacttcaataataataatatacatttaattaaggggcccttcatatggctaaagattcagaaccagaaaatcataacaatgatgaaatatcaacaacaaaccaaggaataagatcatcatcatcacaatacccattagactcaaactcatacaaaatcctccatgagatcggagccggagtgagtgcagtggtctacaaagccatttgtttgcccaagaactcagccgtggtggccatcaaatccatagatctggacatcaagtctcgtacagatttcgataatgtccgacgcgaaacgaagatgatgtcactcctttctcatcccaacatactcaacgctcactgctctttcatggtggaccgtcgtctttgggtggtcatgcccttcatgtccgctggctcactacagtccattatcgcttcttctttccccaatggcttgtcggagcccagtatagctgtcgttcttaaggagatactaaacgcattgtcctatctccatgatcaaggccagctccaccgtgacattaaggcaggtaattaatgattaatttatatatggtcagttatgagaggaggtggctttttaattagagttaattaaatattgagtcctacttaatttaatttgacaattagagaaatactgagaagcatttgtggtagtaactttctatgtatcaatattttattggtccaaataaatatcgggtttcatataatttaatataataatttttaaagagtatcactagtcaattataaaacaacatatttagaggtactaaaatattgctaaccataattacttagcttcacccaaagttactactgctaacactttgacaaactattcacatatataaattaaaatttcacctattattagacatttctaatagataatgtgaaatctgtacggctcaaaaataagttaatatatatcttatatttaactcaaattttataattagagtttatgtaaattaacttatctctaatagagtttatattaaatacataaataaatagtcaattagcaacaaaactcctttatgttttaatttt

SEQ ID NO: 220433 - DNA, 3884 bp, Cannabis indica
attttttgcaaaataagttaatcctataattatcctatattaacaattaaaatcaacttattaaataaaataaatcgctaaaagaccaaagaataaaaggccgagaagagcattttacccatgcctaagccaaaaagcaaacttcttagttaggggtattttggttattctaatcctcggataatccttacattcccaatatctaactatactgcctcgctaatactaaaatactaaaatttgattttattggccaaacgtcgcgttccattgttgttgagcacaaaacatgaaaaacataaaatttcatatataacataaataatacaccctgaattaaaataaatctccatatattaataaattataattaataatctaatttcataattaagtcctaattatctactaatttccatattaactctaagtggtctttacaattcctcccattaaaggatttcgtcctcgaaatctaacttgaacaactctagatactaagccctcatgtcagactctaactcccatagtacctcgaccgaagctatggtcttgttttgaaggactttatcttttctgccttagatttgaactggttgttctttgtacgatagatcagcttaagttcaaggttctcataactcagcacatgagtgggagagagacatggaatacgttgtgaactgctgatgtgctgaaggtaaggccaagcaatatgccaccagtccaaccttctcgagaatatcaaaaggctatataaacataaggcataacttaccctttttcccaaaacgcctgatccccttcatcgaacacactcgtaggaatacatgatctcctacctgaaactctacatgtctgcgtttcgaatatgcataactcttttgcccactctgagaggcaggcattctggccttgatcttttctatagcttcattagtttgttgcactgattccaaacctaggtacttcctttctctcatttcatccaaatgaattggaaatttacacttcctaccatacaacatctcgtaaggagccatccctatagtactttgataactgttgttgtatgaaaactctatcagtgaccggtactttctccagagccttcaaaatccaacacactatcacgtagcacatcttccaatatttggattgtccttttagactgtccatcagtctgaggattgaaagttgtactgaacttctgtctggtacggatggcccattggaaactctaccaaaattttgaggtgaatttcagatctccatcctatataatcgacttcagagcccaatgtaatcttactatttccttcacgtatagctctgcatattgattcactctaaaggttttttttactggtagaaaatgtgcagactttgtaaattgatataccacagcccaaatagaatcgcactttccggtggtcctaggtaaccgaaccacaaaatccatggtgacatcctcctacttccacgtaggaagtgttagtggttgcaataatcgtataggtctctgatgctcaaccttaatctgctgacaagttacacaacggtatactaattctaccacatctttcttcatcatacactactagtcgtaaggttttaaatcttaatacatcttggtagttccaggatgcagtgagtgtggagttgtatgagattcctcgagaatttcatttctaagttccacacagccttgaacacaaaatctggtcttgtataatagcatcctgtacttgacaccgtaaaatccttagcttgaccagctaaaacctattccctgatttttactagttctggatcagtcaattgagaggctttaattctgcctaatagattagattgcaatgtcaaattattaagtttgcctacaacaaacttaatgcctgatctaaccatgtcatttgctagttgaggtgaaatctttatcatactagctacctgccagagaccctttgtactcagggcatctgccaccacattggccttcccaatatggtaaaggatttcacagtctcaatccttaatcagctccaaccaacgtctttgcctcatattcaaatctttatgggtaaagaaatacttgaggctcttgtgatcggtataaatctcacacttttctccatagagataatggtgccaaataatcaaagaaaaaactatagccacaagttttaaatcatgtgttgggtatcgttcttcatattcctttaactgacaggtggcataagcaatgactcgatcaatctgtatcaaaacacaccctagacactgtctagatgcatcacaataaaccacaaacttttctttattagatggtagagcttatacaggggctgtaatcaatctttattttagcttctagaggcttgcttcacacttgtttgtccacaaaagtcgctgattctttttgttatgttcggttaaaggtgttgagatcttagaaaatccctcaaaaaattgacaataataactagccagacccaagaaacttctaacttctgtaagtgtcttcggcctcgaccaatccctgatgaattcaatcttccctggatccaccttgaatccatctttactaacaatgtgttcgagaaaagacacttgagatagcaaaaacttgcactttttgaacttggcatagagtttatgttctcatagtcactgtagaaccattcgaagatgttgctcatgctcctcttttgattgaaagtacacaaggatgtcatcgataaatataataacacaaatatcaaggaaatccttgaataccctattcatcagatccataaaagttgttggagtgttggttagtccaaaagacataaccaagaattcatagtgcccatacctagtgcaaaaagtagtctttagaatgtcgtcctctcggaatctcaactgatgatagcgcgagtgaagatcatcttagagaagaatgttttcccttgaagttgatcgaaaaggttgtcgatcttcagtaacggatatttattcttgatagtcagtttcattagttcccggtagtcaatacacatgcgtaaggattcgtctttcttcttaaaaaatagtacaggaggtccccagggtgacacactaggctgtgaaaatcctaggtcaagcaacccctgaagctgaatcttcaattctttaagctctgctggagccattctgtatggtgccttagaaactggttctactataggtgctaaatcatttccctctgtggcggtaagcaaggaagttcatcaggaaaaacatctagaaattcttgaaccaccctcatgtcctctggccaaaatgattcaagccgtgtggtatccaataccactaccagaaaccctaagcacctatcttttaataattctctagctttaaatattgagattattggaactcaggatccctaaactgatcccactaatacaaacgattcctctccctcgtgtttgaagatcaccatcttctgtttacaatcaatactaactgagtacttggaaaagaaatcaatttgaagtatgacatcaaaatctaccaaatcaacactcaactccctatcctcaatttttattggcataaacctaacccaccttttggagataaaaaattctccggtaggaagtagggttccaaaccctttatcataactatcatatagtatacccaatttatcataaatccgggcccacataggaatgagtggccccagagtcaaacaatatagagaagtaagagttgttgacaaacagctgacctgtagaaactgaggggatggcttctacaacatcttaagttgaagcaaacacccttgctggagcgggttttgctgggacagtttaacatcttccctaccgcatgccctgttgggttttatgccc

SEQ ID NO: 220434 - DNA, 2793 bp, Cannabis indica
taagtcgggtctagatccgggatcggattcgggtttgggtcagaggccaggttcagcgccagccgtgggagaaggatttgggtccagatctggtcggagtctaaaacattgattaagaaaaaaaaaattatttaaaaatatattgaaagtaattttttttttgtttttaaaattttaattctcaattaaaaaattaaaaagtgaaaacagttttatagaacatattttttataaatattttcactttttcaattttaaaaataaaaaaataattaaaaaagtgttatcaaatgacaccttaattaattagcttatagttatcttaaattaaaatattattaactctaattaataaatgtaatcctttttttccattagcctttcgtattgagcaagtaagctacagttgcactatagcccgatggacggggctacatactccattctattgaataaataatgagaaccaactaaaataatagtctgcaatctcatgagtcaaatttttaactttctaattcccacatcgtttgacaaataattataatcaaatcaaatgaaaaaaattatagcatcacaaattgatcttaagaacacctatattctgtttcattcattgctcagaacacaatagtagaaactgttacagcaggttcattcaatctcatagcttattgagcactcaactattttgtaaggtacgtaactacactactaatactacaaaaaataactacatttagtgacaattttttagtcacaaaaaattttagtcacaacataagttttttgtgactaaatgtgacttttaacacaaaaaaaaagttacttgtgactaaaacatagtatttagatacaagttatcactaatttagttttggtcacaacaagtattgtgactaattaaaatacatttaagtcacaataaactgtaacttttgtgactaataattttagccagggatcttttagtcacaatataggaatgatggtttacaattagtcacaacttttttacttttagtcgtcacaacttttttacttttagtcacacgttttgttgtgactaaaagtaaaaaaaaaaattgtagtgtaataaccaatttagtcgtagagaacttgttcttcccaaccactaatattgatttgatggcgagccaacgaagaacaaagaagaaccatcaacaaaaaaaaaaaacaaaactatgtcacacagacaaaactaaaacactcaaaatcatgtcataaaaacaacacaaaaaacgttcaaaattatgtcacagagacaaaactaagacactaaaaccacgacacagacaaaactaaccgcagtagcaaaaattgaattacaatagcaaaatacaacctcgatcaagtcaaacctaagcccaaggaaggccagcatgcctggccagagaaaaaagacaaccttcgatagctatagatataggaacgagaaactctaatttttcccccattattgaaccttcatttttttaatagaatagggcctgagatttcttttttattatttttccattaaaaatttgtttattgtcccctttcaatttttttttcattttaccccttacaaatactctatgccttcgtccctataggtgagtgttggttgcaattagggatgaaaatctcaccagtgggtataaaagcctcgcgggtacctacccctaatgggttagggattctctatctaaatggagaatttaacggggacaatgacaacttttcatccctaaatgttaaactggtggggatggggatagcacctcccgccttgacggggaccctaacttgctactagtttccaaagaggtcgagagggagagagagtgtttgtctaatttttctatttgaataaatggtaaaaaaaaactttaatagttatctaatatatttcattaagataaattcatattaattcagcttaatataattcaactaaaggaaaaaaaaaattatatggtaaaagaccattttgccccttacttaaccaaaaagtaaccttgccacctagggccattttgttcaaatctaataccacaaatattttcgacattcccaatatctatctaaattgcctctctatttctaaaatactaaaccatacgaaaatatgaatctattggccaaacgtcgtgtttcactattatgggacataaaatatgaaaaatatgaaattccatatataagataaatagcacacccagaatttaaatatatctccataaattcgtaaatcataattgaaactctattttcaaattaaactctaattatcttctaattcttgtattaaaattaagcggtcattacaattgttcacctagtgtagctagctcccattgttaagggtaataaattgaatttaagccagtgtccaaataatgattttgaaagagaataaatgaagaacattcgttatgcttctactatcaaaagcctattgtatgcttaagtgtgcataagacccagcattgcctactctgtcggagtgttaggaagattttatagtaatggggatagaccattggaaaactataaagaagattatgaggtatctttaggatactaaaaattacaatcttatgttcaaacgaacaagaaatctagaagtagttggctacttagattcaaattttgctggttttacaaattcacgcaaatcaatatctggttacgtgtttataattgctggtggagctatcatgtagaagtaacaaataacccttgatcattatttctactatgaaggttgagtttgtttcttgtttt

SEQ ID NO: 220435 - DNA, 1766 bp, Cannabis indica
agtgtaacttcaaccataaccatattggggggactaccatatactacaatatattgcaaatatttgcatatatacatatatttttatctcatgttaccaagcaaagaacatccaccactttgagcaaaaacaatgatatgagttaatccatggtaagttattttaaattgaaatatacaatacttgaattgaagtgtaccaattcatatcttatagcaatatttagataattgttatcaaacattttcaatttacaagtaatatacaaattttgttaatgtcttaaatttatatataaacttagtttttgaatttattaaaaaaattaaaaatcattgatatttgatactatcagactacaaggtattggtctaaatacaataattaaaatctaagtcggaaaaaactaatagaatctgtaatgataaactgaaagaaaattataatttactaacataattatccattgataaatataattcatttcacaaaaaattggctttaataatatgacaaaaattgatctaaatttatctcatattaaatttacatcacaatatttatatcattttgaatgtttgattattaaatttagttattctattaaattataaaacttaaaacattaaattttaaatactacaaattaatacaaatatatccgaaaatcttttgttttaatcaaatatagcacaaatatttttgcattaaaaataatagatttatactatctacaaagttacaaactcaaaactttccttatacccaaaatatcccttatataagataatgcatacaagtttctctattattctttattatattcttctcaaatatatcatcatggttgaccgttgaccgtcaatatagcaactctcacaacttgagcaatacccctactttcctcttatacccatattcctatattttattattattatttattttattgagaaatataaataattatttattaaatttataaatactacaaaaaataatttaggatataaatagttaaatttaatttttcaccataataaaactaactaactcaataatgctatgacagttcctggtcctaaattattaaacttttttatttaaaatattaaatttagtatttatgagaattaaacttatttaagcgatttttttttttttgagctataaataatataattcaaattttcttatagcaattatattaaaaatttagaaagaaaaaaataaaattactgaagagattcaaacttatgaaatttattaatttctaatgtaattattatatttacgagtctggaagagatttaacaagaaaaaaaaaacacagaaaagaaaatgattttctcgagaaaatctattcagacaaaatacgaacagagtcaaattttggatttagttgatacaatttatagattaacgacaaacagagacttaattaaaaggaatcttaaacgagaaccactaattaagatcaatgtgcttacctgcaaatcaagatctacggagatctactgaatcgccgatcctttagccatggaattattagtcatcatcttcttaaactcatcgaaattaacattaccatcaccatcagaatcaacggatccgatcatccgattacaatcatcaacggtacaattcatccctaggcgactgagaacttggtgaagttcagaggctgagatgagtccgttgtgatcttgatcgtagagatcgaatgcatctttaagctccgaagctccaccgtcctctgagctctg

SEQ ID NO: 220436 - DNA, 1368 bp, Cannabis indica
ggcaaaagacttagccaacttatcgttaaaagctttcagcattttgcctcaagagtctctacaaaagcaacaagcacatgttagcaaaccaataccagaacagtaaagtcaaaattatgaacaacattcaaaccaaatactcttagaagggtgtgcatgtgggtgcaaccattcactgagtggctataagtttccccgcgaacaaagagagtgatgtctgtccagccaacaaagctgccataatctctaaaggatggaaaggacatagttgaaaagggtccactacaatattgtctaagggaactctggattactaggactcctaacaatctcgtctattctatctatgaatttgctcattagacacttaacatgacttaaattcaaaaagtaactatcaaatccttcttgatccaactaaaaaatatgatggaggttgggggtatgcaagacgcaaaaaggcctattacctctcccaaaagtgttggcccccagagtgccttcatcttgatagattgcagcatacctttcctggatctccttagccttagtcaacgaatttgaatgtcagagcttccaactctcttctagaatatgatcctccttggcagcttccatgacaagtttggccaaatcacgggccaatttatccctaaaatccttaggagtttgactatgacctctgtagctaacattatcaatgctttggaaagccacaatgagtccatgcctccaaagtaatggggtagtgacaaactcctccacttttagctggtttaataaagtcttatactgagccttctttttgatcatttcctcaatctcggcacttcgaggaaaaaaatctgttaaaagaaataaaaaatagagcagttcactcagcatttgaaccaaaatagtagacgagggagaaaaatgaattaagacactagaggagaaagaatgtttacctatgagctggaaactgaggtggagagtaggcaccctcttcactggaaagccagtagagaaaaaccaatattccttgagattgtgggtgcatttggtaaagatggtgggacagtacgcgccagagtatttatgaagcttataaaatcccaatttcttacaattagtcctcatcagatgagacttcagtgcataaaaaacaaaatttcctctggggagggcacttcaaactttttcattttgcaaaaagtacaccatccacccaagagcttgtaggatggaggtattagctggaaggagctattccaatgcggtcgatgaaatacatgaaataatgtctaagtgggaggtgaacccgctttaaatatgagaccaactccaggcactgaacccatccgtgctcacggaggcacactcctc

SEQ ID NO: 220437 - DNA, 3226 bp, Cannabis indica
tttaattgctcatgggctacttgaatattagtaacacaattagctttcacacgcccaacttgttcttttgcttgaagagtcggcccattagagttggagccaatacccaaagaaaccggtcccaccaaatcttggtttacattagactcaacataaatacccttaagtaaaggcccacccgtaggaatattgctagaaataactttgagcccattatcatcatttccaaaattatttttagctaaaagactaggcccattattaccctcctcaagaccggccttctttttgaaattcccacacggcccaatgaccccaggcccaccttccacttccttctctttaacggtcaaagaattcaaatgaccttcatataaaacacaatcttggctatttgaaggcaaaacaggtaaggattcagtatcctttctcacactcaggttgtttctctctcctccaaagccagaaatggcaactgttctccctgcatcataaggacgcctcttggggaaccacacagcccgatgggtcttcccaagaccctcagccgcatgggttgtccctttcacaggaaggctcggacgtcgagacacaaaggacgaacttcccttcggacccaaacccccatctcccgtagccgccggcagcaacagcacagaaccaccctccttttcctcagccaagaacatggactttcgggcattaccagataaagggccagagaaaacattcgggtatgcagacaaaacagagagccatgggccatacattggaaacggaataccatcaagattcgccaccgtcaccggcgtcgagagagagcagcccctgcgttgatgccccagacatccacagaaataacaaaatattccaattttttcgtatttcatttggacccatttcttcacacccgaagctaaatcgaagaagcaacctgaaaacagaggtttatcaacctcaatatccacttgaactctaagatatttgctccatgatgcaggcttcccttcatcaatctgaacttgcactactttaccagccaaaccccccagcatactaccattagactgcgaaaaatactcatggggaaggtgatggatttgaatccaaacacgcaggacattgaaggttgtcggaatatcaaaagtcggagaccaggtatgaaggaccagagtgtatccacgaatacaccaaggaccgttaagaagtgcccagtccctttgatcagcactctcaaaaccaaacttgaaaacattagcttgcttctcgacatcctccaaagccacaactgaaactggtatcttccagctttttgcaacaaagtcagtaacatttatatcatcaaccaccattggtgctaatactttcccaaacaaacagcaagaggacaaagctttaatagaagcgtcacatggagtaagtttgaccgaagtttcaaggcatgaaaagcacttgcctttaagagtggagttggaagcaattattggctccataaatacccgacaaagaagaccaagcaaagcttttaagagacaaaccaaactcaccaaaaggaatcttaccaacctctcctaaagctgacaaaatcacctcagaaacaaaggtgataaaggggccacgaaccagaaaacagaaaaacaaaaagacacaacacttaagacaagaaggaactcactaaaaaccagtaatgcacaccacagcaagactaacctaaacacacaggaaaagaaggagaggaaagtatagggcaaaagcgacagagttagacacaagacacacacgaaatgaagggtacactcacactagagagatagttgaagaccatctctccctttaaccttgaaacagagataatatcccacaacagagataattataacccaaattataattggtttgagttatttgtttttattcattatgttatagaaccggttctatttttatttatatctgagacatctactttttggtgacttttccgacgactgtgacttttttgtaactttttcggtgacttttccggctacaataatttttccggtgacttttccggcatcggtgaatttttcggtgccggtaacttttctggcaaacttattattacaaattttattaaatttatttattattttttccatattttaaactttaattattttttgatttcatattttttgcattatttatttatgccacataaaagtaaacgttatcccatttctctatatttatgaaaaaaccctaaaataaaactattgtcgtgtaacatatacctattttctttttcttttttttttaataaaaagggaaaattcattaagatagaataaccaaattggacattatattattattaatagcacaaacattgctatcaacaaaattacaatctaaccatattttcttgttaaaaaaaaagaaaaaaaataatacacattttccaatgtatagcttggtgtaccatattcgtgtctcagttcatcttttaaaagataccaagttggcctagaatttttatttaattatttttgttaggatattagcggtgaactatctgaacaataggttttgtgacacttaactcacaaattgatttttttcggcaaaattacatgtgttgacctcacttttagccaacgatagtgagtctaatttagtaagcgacaagtagtttataacgatcgaaatataataaagcaatataaagatacaggaattttataaaggttcagccccgagcagttcggtaatagcctaatcctcgttatttgtattaactcaagaacaaggagaaagtcttatagctcttacaacaatatatctgaattatgaattcttagataatatctctcaagtaaaatctttcgaccctttgcccagtgaacatgcatcactatttatagggctatgagcttggagaggaagtatttcccttctcgttacaatggatataagcagaaggattgcataataaatacagaatacagtgatcatggaatttagacagcttgccatatctctgcaatttggtccctaagttatagggatttctttgatgactcacgatacaaaagctgaattcactaagtgttggtcgctttgtgcagattgctgattgctttgcctcgagcatgcatatgagcaggggcgaagccaggaattcatctgagggggggggggccaaactatagtaaaacttaatatattttttgaaaaaaaaata

SEQ ID NO: 220438 - DNA, 2072 bp, Cannabis indica
tttcggttcctagaagtttggactacttcctcggagtatggcaatattatctctagcgcttggtagtcagaagcgacatgaaatgagggctctattctgtgcaaaaagctaaaatacactaaaaaagaactaaaaaagtgcaatgtcatgtgatttggccactgtgaaaaatgactgaaacatcttaaaagcgatcttggagttatccaaaaagcagcgttctcccaggaaaaccttgaaaaagaagccagtattcaattagaaattctaaacttggaggagagaattgaacgaatatggagacaaaaatcaagggagtgttggctgaaatttggagataacagcacgaaattttttcatgcttcaacgttgattagacgaagatgaaatcgtatcagttgtatcgaagcttctccgggtttgtggttaaagcagagagagaaaattagagattacatcctgacaaatttcaaaaatctgcaccagactacagacatgagttttggcgatgattttgagtccctattcttagaccaggttactttggaggaaaatgaagcaatttgcagcaccccgagcgaagaagagataaaaaatgtggtgttcagaatgcatccacttaaatcccctggacccgatggtttctctggaattttctttcaaaaatactggcatacggttggtgaacaagtctgtaaaatggttgaagtgatagactgaagaaaatcctggacaggctgatatcccctcatcaatcggcctttatcccaggccgatggattgcagaatgctcagtcttggctcaggaggtgttacatgccatgaagaacaagaagggtaaaagaggtgttatggaaattaagacggatttgagcaaagtttacgatagacttgaatggaagtttatccataaggtcctacaagccaacagatttagtaacaaggtcatatcactaataatgtcttgtgtgagttctgtaagtttctcgatttctccttaatggtgcaccccttgctcccttcaatcctaatcgagggctgagacaaggggatccgctatcaccctttttattcatcctttgcagtgaggtcctgaccaaaatgatttctaaggctgagaaggatcggaatattgatgggattaaaatctccaaaaatgccactcctatatcccatttgttttatgtagatgatgctatttacttctaccaagcaacaaaggaaaatgctagctccctgatgagtattctgaagcaatatgaagattggtcaggtcaaaagattaacaaggaaaaaagtggtgtggtgttctccccaaacaccaaggaaaatacaaagaatctgttgatggagattataggcatgccgaagctgaatatgaaggaaaagtatttgggaaatccttttttctttactgccaatagaaggaatgacttccagttcttgagacagaaagtgttgaacaaaatcgaaggttggaaagcaaaatgcctttcgcaggctggaagaacaactcttgttagttcagtgctccaaagtattccaacctatttcatgacaacctcgttggttcctcagaccctctacgaagagttagacaaacttttggcaaaattctagtggataggtcctcgatcgaacaaagaaagatattgtgctctaaagagttggggtaacttatgtcaaccgaaatgttgtggtggtctcgggtttagaagatttccagacatgaatcttgcattactggcaaagttgttttgggaaattctccaaaagaaagacaagctatgggtcagagcccttagcacaaaatactgttctaatttggatgcgtggtcggtggaaaaacaagattcagattcgaaactttggaagaacttactgcagactagggaactatgcgtgactgttgctggtttcgtagttgctaatggtgagattgatctttggacgaagccatggatcccttggaaaacaatacaacaactgaaagatggatttcattgtaaccgagtacatgctttcaacaaggtgagagatctattcattgatggaactcgaacatggaatga

SEQ ID NO: 220439 - DNA, 2785 bp, Cannabis indica
atattaaaaatgtatgatttcatgtaataagttttcaaaatgtataaatttttaaaataattgttttttgcacattttttataattattttatttttgttgtacatttatgaaaatggccctataattaacaactgatattgccttctattttgttttaacaaacatttatttattttattgatatgaaaatgtcttgggactcccaaatttacatacttcttttttacatcaaaagaaaaagtgttacaatgtctttttttttttattcaagcgtttatatattacatcatgttttacctgggactcgaacccaggacctccaacactcacacacccacctatggccacttgagctagccccaagtggttaaaagtgttacaatgtctgggtatataaaaaaaaatatattgagcatgcttagacactataattaaatgttagaaacccaagaaaatcaacgttccttgaaaataaaaggagaacaaaataagtgtatgcacagctgtcaatgttgtccaattaattactttcttttttttttttaaaataaataatacttgtaataaattatctacttttgatgtggtgcggtgaaagacaaatcatataaaccaacccaatttcctggaaagttcttcccctccctcgtaccatttaacacattgaccttctttttctattttattttttaaaaggacttttatatttattttaattattataataataaaatatttattattttaaaattatgaaatactctcatctcatgtctaacttatgtcattaattttttcagatgtcttgctcatgtttcaaagaaaaaaaaaaaagaaagttagaatagaacgcaaagtgagatttgtatgtttgtttggctatttcaaaaagttttaaggatggattattttataattgttgtgaattaacatgttttaagaacgaattagtttcaataataaagcaaaataatacaaaaataataattaagtaaaattataaaaataattaaatacaaaaatatgatgtgacaaaaagatatagcatcgataacaacagacaattaatttaacgaaattccatttcaaataacttttcgcttggatctaattcccaggaggaaacacattgtcaccaatctttattcaaaagaatattgcttgatgttcaaagatcagatcaataataaaaatggtgttttgcccttaaaattcactcacatagggaacacactcacaatagtgtgggggctatagccccagtaaaaaaaaaatgcattaaaaaaattaaatatttttcttttttcatttgataattatagcacaaaaaattgaaagaaaaaaaattccgcaaaaataaaaattaattaaagtagacctaaaaatttgtttaataacaattaagtctcacataataaaaatgatgagttcatcactgtacatagaggtgttgtgatcaaacacacacaatccttttttcacaatttatctctctagctcatactaagaattgataactaatgctccttatataaaccagtaaaagagctccaagaaattgggaaaccgagtaacaattatactataactaattgtaaaaccaattaagttagttgctaattactaacaagtggctaaaattttaaaaatggtcaaagagaagaaagtatttgtttctacaaatgctacttttttagaaaataatcatatcaaaaatctcaaagcatgtagcaaaatagtgttaaaagaaatgctttcagatttatatctacaagagatgttctttcatcttctactcctgtagagaataatctcactctttctgttgaaccaatgtaaattgagacaactgaataggacattaccactgaagttcttttctgaaagtcacattacctcgccgtagtggaagagtttcaatcaaactacttcgttatgacttggatggtgaaatcaacttggttgttggtgacactcatgatgatgatctgtttacatttaaacaagcaatgactagtcttgatatgaagttatgattcgtagtcatgaaccgagaaataggggtgagcaacagtcagttttttacacaaaaaaatctaaaattcgattttcgattttcatggttataattcgaaaaatgactgatcattatataactgtaaaaaaaatcggctgttttaatccacggtttggtcggtttaaaccgagcttctatttttttttttaaaaaaaaaaatgtctttaaattttctataattatttgaaaactaaaaaaattagaatattgtatcaaatgtcatataatttaagaacaaaattttctttataaaataaataatgtaaaattaacttttttaaatttgctcaaattatatgttctactaatatggtaaatgacttatagtaaaaaactcgtattattttataaatgtgtgtaatacgtaaatacatcaagttataataaaataaagtaatgaataattgagactttaaataaaaaagataaaaagtaaaactagtttaataaaattgtatataaaatatgtacaataataattatatgggtaaatagtggcataagtactcaaagttttaggtttgtaagcggcataaacccaatgatttttttttagtgtacatacgtacccaatgtttataaaactgtaattttcttcaagtttcatcagtcaaactctgttattgtcttaaacatgacacatataagactcaaatttttagattatttggtctggacaaaaaataatgtagtatcagttacttct

SEQ ID NO: 220440 - DNA, 2810 bp, Cannabis indica
cttggaactgccgtgggcttgggtcccctcggactattcagttccttaaggacttaattgttcaaaaaagacccacggtgatttttctttgtgaaactttgtgcgcaaaaaataaagttgaggatttgaagagaagtataggttttgaaggttgttatgtggtggaggcccaagggagaagtgctgggctgggcctattatggagatatgaaagtgatattagaattgagtctttttctaaaaatcacattgattgctttgctactgttaatggagggagtgagtttcatttcacgggtatctatggggagccaaaccgaagcttgagaaaagaaacttggaggatgctaaagaatcttcatgctaggcgtagggaaccttggtgccttatgggcgacttcaacaatgtgttgagtcaatcggaaaagagagggggtaacccgtaccctcaatggttgattaatggctttcaagaaactgttttggcttgtgggctgtgtgatttggagctctttggctacccgtatacgtgggagaagagtagggattccccaaattggattgaagctcgacttgaccgtgcgttagtgtcggcttcgtggttagatttgtttcaaaatgctcagctgttaaatgtggagatctcttcgtccgaccattgcccactactcttagaaaccaacgttgcagattttacaagaaatcaaaaagtcttttggtttgagaatatgtggctgggaaatatggaatgtgagcaaattatccgtgaggtctggcacaattcagttgggcagtcaatgcagtccaagatcgagtcctgtggagaagatctgttactttgggaggctagaaacccggagaatttttctcagaacttaaagaagtgtagatctctggtgaagcaatacaagcaccggcgggacattgaagggaaacagttattttttgaagccaaaaaggctctgttcgaggtgttgaatcaaagggagatattttggcgccaacgttcaaaacaactttggcttcaatcgggcgatcaaaatagtaagttttttcattccaaagctagtgctagacgtcgtaataattcaaacacttgtttgaagaatgagaatgggactaaagtaacttgggaagatggtttgggggatgtcatgatgaattattttaaagacatttttaattctcattcagtggaatatagtgaggtgatggctagtattacaccaaaaatatgagaggagcagaattctatgttgttgcaaccgattggtgtggatgaagtcaaggacgagtgttccaaatgcatccctataagtcaccaggtccggacggcatgaacccgaccttctttcaaaagtattgggacattgtgggaatgaatgtggtggattcagttagacagttttatcgtacggactctatgtcgactggtatgaatgacactaatctaatccttattcctaaaaagaagtgccctgagaatatgagtgagttgaggccaatttctttatgcaatgtgattgctaaaataatatctaaagttgttgcaaatagattgaaatgccttctgggagatgttatatctagtcatcagagtgcttttgttccaggccgtcttattactgataacataatggtatcttttgaagtcctccattatttgaaaagaaagcaaggggcgagatggctatatggcattgaaactggatttgagtaaagcctatgatagggttgaatggtcctatttgtgtgcaatgatgagtcgaatgggttttaatgataagtttgtccgcattgtttatgggtgtttgtcttctgttcagtataaaattgttacgggaggcagggtgctgggaccgattacaccaactaggggaatttgtcaaggcgatccgatctccccttacctcttcttgctatgtgctgagggtttatcagcgttgattcgaaggtttgaagagaggaaatggcttcatgggtgtcgtgttgccaatggggctccagttatctctcacatgctttttgtagacgacagctacttatattgtaaagccactgagagggaggtttcaaatgttcttcttctcctcgaaacatttgccaaggcttcgggtcaactagttaacttctctaaatcctcagttttctttagctcaaacacgtccccacaaacaagaggagttatttgtagccgaatgggtcttgttgaagctgatgaaaggagcaaatacttaggtttacctagtgtaattggaaggaataaaaatgcatcttttggctttctaaaagataaagttcagaagaggattcagacttgggataataagttcttgtcaaaagcgggtaaggaggtgctcattaaaagtgtagttcaatcactaccgacttatactatgaatgtgtttctattacccattggtacttgccatgacatgagaggatcattagcaatttttggtggcagtcttctaacaaagggggtgttcattggttgagttgggaaaagatgactaaaaagaaagagaacgaggggttgggatttcgggatattagagattttaatttatctcttttggccaagcaaggttggcggctgttacacaatgaatcaagcttggttgggaaaattttcaaggctagatattaccccaacggtacctaccttaatgcaactttggggagtaatccgagctacatttggagaagtatttttgaagtccaagcattggtgaagaaagggattcgaaggagtgttggtgatggatcaaatgtgagcatcctcaatgacccgtggctacctgatgagg

SEQ ID NO: 220441 - DNA, 3536 bp, Cannabis indica
ttaattatattaatattatttttttcataataataataattaaatttaagtatgtattgtgaatacattaaaatggttgtacatgcatgttattgatttagaatccattaaaatcaagcttttgtaaaattttatttggattacaatatgggaaggaggttatcaaaataatttgtttcacatatcgaaataagttttaaaataatttatttttatattatcaacaaaatcaattacaattctaattaattatatttttatatgacaatgtagtaatttagaacctttcacattttttaaagtaaaaacaaatttcattgaagcctgcttcatatgtcgcgagtatataaaataagttattttgaaagatcaattatacgaaaaagaaataaaaaaattgtagactttagacattggtgcaagtgactatttttggacagttttagtagttgaattagttagttaattctattaagtttattgggttattgtacattttgtatcagcctatataaatatatatatatatataaagaccatttttgtgacttattagtgggtgaacttagtgtgagctgagagtgattattgttgtaaagagcatgagagttcataactcatgcatcttgagtgaatctggttttggggtaggagcaagattccattcagttctgttattattcataattgtatcctttttgagcatcatcttcaagtaataaaggcaaagctccaaagcagtgcctcccaaggattagctccaaatgtcacaacttgtgattaaaccttgtaactcattgtgttcacctactctatttttgttcttgttgttattagttttctggttcatgtttttactgttttaattgatcttgttgatgtttgttatattcttggttggtgtttgattcaccacaaatggtatcaaagcacaggttgttgttgaggatccaagaaccgtgaagatcaaagtttgaacacaaagatggaacagcaagattcgaggtggacaagtttacaggggtcaatgactttggtctttggcgaatcaaaatgaaggcactactcgtgcattaaggcattgcaaatgccattatggaatatgtctttaaaaaaaggtgaagatgtcaaaaaagtctctcaagaaactaaaatgaaggctcacagtgcaatcctgttgagcttgggtgatgaagtacttcgagaagttgcagaagaagagactgccttgggtttgtggaacaaactttgatcgatatacatgaaaaaatctctggctaataaactatacttgaagaagaagctttacaccatgaagatggatgaaactaaagaacttaaaaggcatcccatcttgatgacttcaacaaattgatcttggacctgaacaacattggagttaaaattgaagaagaagatcaagtcattctcctactaagttctctactaaagatttatgaacactttgtagacataattctttacgggaaggatacactgaccatgtctgaagtaaggctgacctcactccaaagagattcaaaagaaggtagatgataaatctgagattggtggggaaggattatttgttcgaggaagacagagaagagagacttcaagaaatccaagactggacacaagtctaactccaagaacagaaatgtagtaggaaagaaatgcttctattacaagaaagaaggccatttcagggatgattgttacctattgaagaacaagcttaagagagataagagcaaggaaagaggtgaagcagatattgcatcaagtggctatgattctgcagatgttttagttgtctcaagtgaagattctagtgttgaatggattcttgactctggttgctcatttcacatgactccaaacaaggaccaattcacaagttatgaagagaatttagttggtacagttcttttaagaaataacaaagcttgcaagattcttggaattggttctgttgacatgaaaatgcatgatggcataactcgatctatacaaaatgtaaggtatgttcctgatctcaaaaagaaatttattgtctataggtatgtttgataatcatggttacactgttagaatagacaatggcacccttaacatctcaaaaggctcactcgtggtagttagaggcagactcaagaatggactatactacatggttagcactgcaattacagggacatcatcacttgcaatcaataatgtcaaaaatgatagcattcatttgtggcatttgagacttggtcatgttagtgagagaggtctcactgagcttgacaagcaagggttgtttcaaggtggattgagtggcaaacttagtttttgtgaagagtgtgtttatggtaaaagttgcagggttaagtttgctactagacagcccattactaaagagaaattggcctatctctggggtccatccagaatcaagacacttggggtgcaagctatttcattagcatcatagatgacttctctaggaaggtgtgggtgtttctcttgaaaagcaaggatgaagctttcaacacctttgtcacttggaaaaggttgattgaaaaccaaaccggatgcaaaattagaaaattgagaactgacaatggttgggaaaggaacatgggacagttagacatcaaattgttagggatactcctcagtaaaatggccttactgaaaggatgaatagaactcttattgaaagagtaaggtgtatgctaaagggtattgttttggatagacctttttggagagaagctgttaagacaacctgctacttagtgaacatgtgtccatatgtcccattgaagtttaaaactccacaagaagtatggacaggtcatgtacctaagctagagcacctaagggtatttggctacactgcctatgctcaccacaggcaagataaactttaacctagggccctaaaatgcatgttcctaggctaccctgatggagtaaagctatggtgcatagaactagggcacaagaaatgcatctttagcagggatgtggtgttcaatgagaaagaaatggctatgaaaagaaatgacatggttactgcatcaaaaaaaaaacagcagcaacaaagaccaaattaaggtggacacaacctcatctagacctacagagattatgaagtcactgctaaagatagcacgttaatgacactcaaaccagtcttagaacataccatctagctcgagatagagaaagaagaaccacaaaagtgttgggttttatgccctaaataaaacttcatttcaatgtaatttggattattcaatatcaataaagaaatagaagtattaatttttcattcatttgtgtatgatttggttcaccttatcaattatttgtctatttgatttataaattcatccaaacccttttcacatacttgatcttgtttattgtgctgtcagcacagtggaaagtaaacatgactatgtgattaaagatatctagatttatcagaacactggggttttactgatatgacagtctacaacagagtttacttgcat

SEQ ID NO: 220442 - DNA, 2235 bp, Cannabis indica
agttcgagggaaaaaattgctaattagcctttgatctttgggtgtttttctgagttttaatattttttactgtttagttgattcggttgtaaaaagaaaagaaaggatatggatgttatatggtccttactatgagaaaaaaaaaaaaacttttactgaaaatttataagaatttaagttgcatcaatctaattccaattattacataatgtggtttagtagttgtatcggatgttaatataacatgaaaatcaataacaatattataatgtaaagcccagcgttacgtacgtgcttttataaattaatttataataataaactatgatttaagaaaaaattaaattatttaaaatttaaataactatttcttaaaacataacttaaatcttttttaaatattactgagttgaagatccgttctattataaacttttattaaaatatcaccgtattatttttattacaaaatattaatacatacatattcaaagtactatgataaaagttggatctcttcaactcagcacaaaagacggtggggttgataagtacattcattaggagaactctgactcatggttgatccatcttccctttactcttacctgcaccacaaagcacacgtgaatcataaagactcagtaagaaaagcaagaaaaatacaaatatcatgaatagcacaaaactctaagcgacaataagcatacatttaaacatatgatttaaacaattatttacatgcagtataatcaaacactagtaatcaactatttgtctaataagacaagccaatcttgatagtttataaagtatcattaaccctcgttatcaatgagtcactaatgtcactatcgttacctaatgaggcaaccaataagtaagaaacccaacaacagttctacatgagagttataaccctaccatattaacggtaatcgtatctcaattagccatgcaaagtggtacaattgactttttctcacctcaagcccaagttcaggtgtgcaggtcgacctaagtggaataaaacttgacgatctcgggtcctatgtcacgataatggtacatcggtaaaaacaggatcccgtattatgtaaattattatatataagattaaagtttaactatgaaaatatcaataattcacgctttttactaaacctgttgattagtaatgaagtgcacaacaaattaaaatcacgataacgtgtctattctaatagggtgttataggtatgaacaccagaagtgtcgctagaagaagccatcaaagatatttgtcgaagactttcgatatcatgtaaaagcttagacaatggaaaaggtaccactacaagaaatgtcacttttgccagcacatttttgtgccggcaaaagttggtattacgctgttaaaatagaatttacctatggtgtgttggcaaaagggggttggcaaatcaatgttggtattagaacttttgccaacataaaatgaaaagcgctggcaaaaaagattttttttcagggcgtaaatgtactggtaaaagttagattttagccactgcaaatatacgctggtaaaactttgatctctttgccagcgcagtttgcgaaatgcgctgataaaagttacttttaccagtgtagtagcgaactgtacgtaaaggtgacatttcttgtagtgtacaaactagagaaaacaaaacagagagaagaagaagaagaagaagaagaagaagaaaagaagaattgaaatggcaaagaagcctattcagttcctttatttatatagctacaaaccaaagattacaatttactaaacagaaagttgttacaaaaatttaacttaactatttacaacgaagctaactgttaatataacaaactgttagttactttggtaaatagtactaaacgaaattatttaagaaattatgtaaattttttaaaacttcaaaataattcataatacaatttttttaaaacttaagaataatttaaagtttaagaagtctatttaaaatattataaaaataaaatgtccatgtgtgcaatatattgttgaacctttttttcgaaatgaaattattttgaattttttaaaaaaatttagaatgtctctataatatatatagggacatgatttggtcccgttatgccaaaatagggaatacaatccctgattgtactgtagccgttggattgaattgggggttgatctaagggctggggttaaagtaggggtagtta

SEQ ID NO: 220443 - DNA, 1044 bp, Cannabis indica
ttattgtataaagaagtatttttatggatagatgatattatatttatatttatacaagttggtttaacacataaaaattcaaacataaaaacaagtatgattgaattactcttacaggtatattagttatattaacagttataaaagtataatttattttaaccatttcttataagattataattgcacatcgacaggttgatcagtctacatttattgaatttggggggactcattttttttaaaaatacgatttcacgtggtggatttccaattttataaaaatcgctaaaagatttttttagagaaaaaattactaaaagtttgattgacatatttagaatttaatttatataattgagattatataatatcttatggtggttttttttttatatataaagaatataaatgtttctctaatacgacaacgattctaattaatggtgtcattatgcaataaattagttataaaatttaattgttttagtaagaaagaattgatataaaaaaataataactatactatggaaacataagtgatttaagaagtctataatattgatttaattaatctataataatataactacacatgattattttttattcctgcaaaatataattacaagtaatttagctaaactattggtgagcaaagaaatgaaaaaaaaaattcaagtttaaaatgttatattaaagtcaaaaataaattttaaaaagttgaatttattttaaaatgaaatatatgagattaataattgatatttatgttgcaacaaaaactatcaccgctattaattatattaaattaatattttttaaatttattatttgataatgttagcaaagcccaagatcaaggcccaataccaagtgacccaaagctaatggaccaaaagataagataatggacagagcatggtaaccaacatcaggagttggagccttcggcttcagctgtcaacgaaggggaagaagctgctgaaggtgagcatggacttccaacacgtgggaaaaggagccgagtgagacccaaattac

SEQ ID NO: 220444 - DNA, 5734 bp, Cannabis indica
ttgagttcataaactcaaactttctctaaacatgcttcagctgcaaaagaatccgaaaaaccaactactaaaataaaaattcaaccgatagaacaacttctaactaaaacaaaaacatagagaacctaaatatctattttcatgcttaaaccaaactaaaaccataaaatcaaagggagaaacaaaattaggtttacctctacttggaaacacctcaatcctttattgagactcaaaaaattgagaggaaaggagcagattcgctctagttaaagctagggttgaaaagggagaggaagaacatggagtcttgttgctatattttgtatttttgcttaatggattagatctaataatcaaaaaaaatataagctgaaaaaaaaaatgaagattaatggccagctttcaagttcacaagtagccacttaaacaaataaatcaatttctcaagaatgcccctttaacttcttaagttaagcaattgtaaacctaggggtaaaatggtcaaaattcataaccctatttaaacccgatattcacaatatctcaaatgtttttttcgctaaggaatatgttctaaacttacccatgtgactctaacggccatccatcgcattttccattgtcaccaagcaaaaatcataaaatttgcataattcatatttagtataaataatactcttagagtttaataaaatttctgaaattgaaaaattataactctaatgcctatttctaaaagtgggacccagaacaatataaaatcataaataattataaaaatatcaataattaatgctaattaccttcactaatctataatttaacatgcgatcattataattatcttcccgttaaaaggatttcgtcctcaaaatgtaacctgaatagctctagatattgagccctcataccagactcaaattcccaagtggcttcttccaccctactattcttccagagcatcttgacccaagatatggtcttgtttcgaagaatcttttctttcctatgaaggatttgagctgactgttcctcagaggataagtctgactgtagcgctagggctttgtaacttaagacatgagtcatgtctaaatcatatttcctcagcatttaaatataaaatacattatgaacaaccaataacgctggtggtaaggctagccaatacactacctgcccgaccttctcaggtatctcaaatggccctataaacttagggcttaacttgcccctctttccaaagcgcctgataccttttattggcaaaaccgtcaggaaaagatcttctcctgcctaaaatacaatgtctttacacttgggatcagcataacttttctgcctgctttgcaagcaagcatctaagccttgatcttgtctatcacctcattggtcctttgaatttactcacgacctaaatacttcatttcccctatttcgtcccaatgtattggagaacgacacgtcctaccatacaacatctcatagggagccattcctatcgtactctggtagatgttgttgttgaaaaattctatcaaaggcaaatatttattccatgaacactaaaagttcacaacataagctcgtagcaaatattctaatatttgtatcgtcctcttcgactgcccatcagtctggggatgacaagttgtactgaacttcagctttgtacacatagctctctgaagactttcctagaacttagatgtgaatttcgtatctctgtccaaaacaatggatttcaaagctccatgaagataaactatctcttttacttatagcaccgcagaatgatccactaagtaggttatctttatcggcaaaagtgtactgattttgtgaagcagtccactatgacccatattgaatcatacgttctcgtggttctaggtaactcaaccacaaagtccattattacatcttcccacttccacttaggaagtgtcaaaggttatagtaaccctgccagtttctaatgttcagtttaatttgttgacatgtcaagcacttggacagataattgattatatccttcttcattttgtaccaccaataatagggcttcaaatcttgatatatttcggtagttctcgggtgtaatgagtagagtatagtgtgagcctcctcaagtatttcctttccaagttcatcattgtctagaacacaaacccgagctctataaagaagcattccgttattcaagataaaaaaagtccttaggtcgatcggccaaaatctcatccggaatgttaactagctcaggatcttccatttgtgtctttttgatcctttccaacaaatctgactgaagtgtcaggttatgaaatttcccaactacaaattcaatttcagccttaaccacttcaaaagctagtagaggagctaaaattaaagtattaaagacctgcccatggccttttcttctcaaagtttctgccacaacattggattatttttgggatggtacagaatctcagcgtcataatccttgactaatttcgaccaccgcctctgtctcatattcaaatccttcttagtaatgtaatacttgaggctcttttggtctgtgtaaatattgtatttttcaccatgcaagtagtgtcaccatatttttagagcaaaatctatagcagcaagctctaaataatgcgttagataacgctatttgtattccttcagttgacgggaggcataagctataaccctgtaacaccttaactaatttaggcatgttagcatgatttttaacatattgtgcagctcgtttctaatcaacgaggttatcaaaaattgtgattaattaaaactttgcttatttaattaaaatcataaagttacatacatatagaattccaagatcccgtttacaaaaagatgcacaaaagtttaactatacttgtacaaaagtctgtcacctactgactacatggcaaaagctctgatgtcccaaagatcgtacgctccaggcctaaccgccccgacatgtacaatctccatctgctcgctctcacagctgctcagccttagccttgcccttacctacacatggaaataacaactgtgagcatacttagtaagaaaagcataacataaaacataataatatcgcgggttataataaggcgcccatacgcccaaccataaccctatccccatgtcccacacggtgctgagtctagaacgttcatacgataataccatcgaccatgatgtcagcctatactcaatatgccagtcatactcctgccatattgatgtgacagcatcgatcagtatttcagccaacatacatttatcaataatcagtacaactctatgtatactattatcgctatcaatatattctaacaggcataaacaacatgtatgctaaatatgtaattacatgtgcataacattacactagtcttaccttgttttcgaatttaggtgtgccagccaaccttagtggaacaactgctcggtgaaatacaggcccctaaattacatcgatcataacatggttaagtgacacgctaaatcacaactagggacttaggttttaaaccataaacctacctactataagttaacatggcaataccctaaactaacaggagttggaatgggccttttcgtgatcgctgtagatacaatgagtaaaataaataaatgccttcaatttataagtcaaaaactcaaaaccaagctttagagagaagatgatacttacgtataacgcaaaatgttgttgtgttgatgggggaagaccagttgtccagaagaattcatccttgaattcaattttattaggcaatctcacaatgatcctgtgatcgttcgtgtgggtaccgaggtagtaaaaagctcttgatcattgcttccttataggggcggcttttacagagtaaaaatacagaacttcgaggggagtgggacactcccatccaataatctagtataagacctttaaatagaataggattctataagaacttagaattaactaaaaaggggtaattccgaggtaattacagaattccttatagtcctctcttagcgagagtatagctccagctctgatgtgctcgaggctccaagcacctattccagaaaagctactagtactagcaccaccgcactcttctcagaccactctttctggtgcaaaatagctaaactcccctggaacgatggacctaatgcaacatcctttatcgtatttgatgtcacaagcttttaatatatcactaagaaagggagctacgtatttgactttggattcaattagttctacctcgaaggtaactgttgaatcttgagggttctttgatttttgagcttgagttgacatgatttcaaaatctaagtcaccggtgaaaaagcaatagtgactccaggtaaaaataaagatctcgctagaggaatataagataatgtttggggttcaggccaagcttcttcttatcttgattggtttttattagatgatcccaaagtttggcatcgtttatcttaagtatggactcatgaacgtaggttttggattcaaatggaaggtctaaatttttaggagatacagtttcaaggaattctggggttgtaatttcaaaattaaattgggtcatacatacagactagtgtaatcccaatttctggaaaaaagaaattcaacttaacctagaaatctaagaacctaatagcctagatattttacttaaccataaaattatccaaacatacaggttaaaaattacataaaagagaaataaccaaacaaagtagatacagaagacaataaatctcaaaaatcaaactgcaaatatcgaaaagaaaggtatacaagagaaggaggttaaccactcactattttaatgaagatttccagacaaagaggaacttcatgattgagattgtgatgagcaaatcaatgtgttttgagaatctctgagaacgaaggtgcaattagatgaaatgcgcaggaagtaagacaaagacaatgagggcatgcaaatacagaggagaaatgcaatcgaaaaaactttttgtagaaaaatttgaacgtttgaaaagccaaaatagcgaagttagccctcacttctaccttttatttctaatcattgatgaccatttgatctaaagaaattagatctaacggatgggaatactgcaattgaaaaagatgggacatttaatgctaatgatgtgcctcgaagttctgaactgccaaaacccaaagcatgcatttttcaaaattgagttaaagaaaaaaaacccttgtaatcatttaaaaagttcttttaattaaaaagtactttttaaggggcaattattgtacccaaaattcagttacacttcagaagtttacatatgtccaatatattgaatatgaatcaattctaaatgatataatgatatcattaaatgcatattgaataatttgttattatttaaaggataaatagataatattcaaaactcgttggcgttatagtcaaaaacgagacaagaatagtaactattgatctgaaattaacgagatatatacatgcctcagaatatacaaacaagaaggggatattcatccactcgaggagaatgaatgtatcaacataaactccctcgcattacaaatagcgagaaaatcacctcgcattacaaaagccacaaagaggacgtagagagatcgaaaccttcccaacacttagtgttttttcttatcaagatggacaaggaagataactcaaat

SEQ ID NO: 220445 - DNA, 3623 bp, Cannabis indica
agaactctacacatacaagtctaaggatattggttatgcccatgcaaactcttcacaacaattaacgacattggtcgtgcccatgcacacatctccaaaaaagaagtaacattcatgccctctacgaagaagtattttttgtgcaagccttggggttagtgcaaaagtagtacttgaaggcttacaagaaaatatttttgggaggcaaatgttatacctaatttttgtatacctaatttttgtcaaaaaaaaataaataaataaaatggctactcttgcacaagggctcacatgcaaggagtaccttgaagatacttaagtcaaccttgcgactttgaccaagagttataaatgtcaaataagttaagatatccaacttgagggccccatggcaccactaggagacttgaaaacattgaccaaccatttggtgctgggactcccacacccaagtgtacccagactagggtttatgggctcacacgagcattttcatcctagagaccttaattcaacaaggaaaccaacaaggacttaactcatttaggtataaaaaggcttagactgtacataaagtcaaaattacacaagaaccccatgcaatatggcctatgcgaccactgccacatgaagatgccagtgttctccccttctttttggagagcactgccacaagaatatggaagctcttgccactcactaaataccaaaagggacttgtcaaaatgtgtcagtagtgcaaaacatgtgaaagaaaccatttctcaccaaggaacatgcctagccgaccattgccatctttagggcacaaaaagtggtagtggttggccacatcaaatgagaatgagattttttttgccaagagttctttttcatcactaacatgtcaaaactaagtgagaaaagccaccaagtagtgtagaaaccacttggccaaccactaccgcctatttggcacaaatggtggcagtggtcgaccagaacataagagggggagtttctttggccaaagtttatttccaacatccatgtgtcaaatacaagtgagaaaagtcactcaagggtccatggccctcttatgcgaccattgccatctttttgacaaaagttgtgccagtgctctcttaaccaattggccaagccccagtgtgaccaaaatggttttctagcatccatatgacagaaataggcaaaagaaaacaccatccaaggcttcccataagccatggccgaccacttcacttacaaaaagcttattatgatactgtcgagtgggactttctggaagaaatgcttcgagaattaaacttcccaaataagttagtaaaactgatcatgacttgtgttcgaactcccaggttctcactaatgttcacttgcgcaatgcatggatactttgaagctcaaagaggacttaggcaaggggatctgatgtctcctcttctatttgtcctaggaatggagtatctatcccgaataatgcagtgaattggaactaaacaagatttcaagtttttggacaggtgtataactttgaaaataaatcatttgatccatgcaaaagatgttattcgagattataaaaacatctattatattctccaaggtttgaagttgttctcttgtacctccagcctacaaccaaactcgactaaattaatcagccatttgttgttgtaatatgcaagatagagaagtgcagcgtattgtagatgcatcgaatttcaacaggaaagagatgccatttcggtacctcggtatccccatctgttccaaaaggatctcaagcaaggagtgctcgattcttgcggaaaaaatgacaactagaatcaagacatggagcgcccaaaatttatcctatttgcaggtagagttgttcttattaattcagtgttgctatctatacattcttactggagccaaatcatgattttgcccaagaaaattattaaagaaatagaagctatttgccgagctttcttatggaaaggccagtatatgctacaaggagcggggctgatttcctgggaatcagtttgtgaatccaaggcagatggaggggctggttttaagaagatagcagaatggaatgttgcaggactattcatgtacgtttgggttgttgctaacaaggaagataatctttgagtttgttgggtacctagtgtatatatcaaatatgaaggttggtggtcttatgaaccacctttgaatggaagtttgtactgtggagattggcagctgttaaaaatcaatttaaacaggttgatttgcaacagtttttaggggtcaaatattacatatcttaaggtcataaattgttatgtccttcccaaaataaagcgtgatggagcaatgaagtatgggtgagattcaacataccaaagcatagttttgtattgtggatcgcgatacaaaacaagttaagaacgaaggaaagattgctgaaatttcacatggtgactgatgcaaattaattgtgttttttgcaacacaaataatgagtcggttgatcatcttttctttcaatgttctcttcctcttagttgtcttcaacaagtgaaaaaatggctctcttggtgggctgaatcaaaccatttgaacaagctagcttattcggtggattgggaaagccaaatgcaccaagttccgcaagcaagtatatgtggctgccatggcagctcttgtgtacgtaccaaatttggcgtgctagaaatgacatagtgtggaattcgagtacaaccaaggaatcattgatcataagcaagataaaaaataatgttaatggtagaattacttgtttttggcctaagaaaactaatgtcatagatacaatttggttctccaagttgtaaaaaaaagagaagatagaagcggagaatagaatactttttttttttgaaaagacaaagtgtttatcttagattagcaactgagaaaatgggatccacagggggaaatccctcccctttacaacaaagagtatcgctctcagaacagcgagcacttttggccaaagagtctacaaaggctagataagtgcgattgaaatgaaaaaaggaaacattcgagaaactgtgtttaagttttgtggcagcgtcaaaccaagagagacacttccagctgggggatctgtcattagcgaaagctttaaggacaattgaggaatcggaaatcagcgcaaagtcgtcccacttgtaggtgctattgcttgtaaagttgttttaatgaaaagcttgttgattcataaaaaaaatgattaaatactcaagatcatgagcccaccaactttcatatcttgttctactaaacttctttttatcggtaaatgagaatgaaaattagttaaaatattgagcaatagaatttattttctaaattcgacaatgtgaaaaatatagcaatgatctcatgtagaaccatgtaaaaataaggcacttcaaacatttacaagataagtagtataattataattttttattaattggtataacaaaacgagtatgctatataatttatgggtcaaatggatttattgcatgtacttaagcatttaaaaacaaattcaagagctgcattgataacaaaacgagtatgctatacaatcatattgttactaaaat

SEQ ID NO: 220446 - DNA, 1654 bp, Cannabis indica
ttgtttcgttaagcgatctgctaacagagttgcacatttgtgttgcccgcaacttcttgtttttggtcaggttgtaatttgtagagggacagcgcctgctgctcttcaaactcttattcttgccgatttggcagttttaatggattgaaagacttttacaaaaaaaaaaatatatttacattttaattataaattaatttttttttgtgattttgaaatgaaagtaacattttaattacaaaaagttattattcttattagaaatatactcattataaatatttatgtctacaacctaaaaaaagtattttcagtcacaaattagagtgatttggatgtgattatcaagaaaatcaaagttaattcaaaattggtggaatatttccaaaatttgaaatcaactaatctcatattgtgtattttttttttttttgcgaaacatgttttaagtaaaataaggatgtaaaaacatgaccatgggacgaggttggggataacttcttcactccctcctcatctcggggtcaaaatatggcttgtgtctccgagccctaatacctcgggtaccattcccgatgggttaaatttgataacttaagaagaaaaacatcaagtcaagtaattggaattttaaatatactagtcttcatgtctttttttttttcttttgttttaaattcatattggtccatttgtgtttgtcattaattgtaaatttgtaatatctttactcttcccaaataaataaatgaatagcttttaaagtgtgattttttcatagtggatctttcatattaaagttttttttattttagcaaagtcatattaaagtgttaactaactttgaagtagtttgtacgttagagacttggagttatttatgaatagactaataattaataacaagaaagttgtgtgcttatgtgtgaatagaaggtataagagtaccaacaagcactttagtggggactctttcctttgtatcatatagtagaaaattcaagtgggatcaatatttagaaatgtataaataactacaacgtatgtgattataaaaaaaattaaatcacaagttttttatttaataccgaaaaaagatagggaatactttaccagaacatctctttagaggatgtactacataaacttccatatatgtgtgtaaaatagatattgtgatgggctagttggattaatcaaggtcaatatttataaatttatagacaatcttaattaactacagcatatgtaattaattataagaaaaattagatcaaaaacttttttggatgtcgaaaaacaaatagggagcataccagaatatccctttaaagagtgtactagataaatttttatctatatatatgtacgacagaagtaatagtatcgttactcttcatattccctttaatatcgttgaagttctacacttcttcttcttataagttataaatacttcgacagattagttggattaaagtttatgtataaaagagattcattaacatgttgtgtgtatattatataattcagttgtaatatataataacttaataaattaaaaaataataataataagataagattattatttgaatacacactactaaaaaaaaagatacttttagtataaaatttttagtcacaatataaa

SEQ ID NO: 220447 - DNA, 3197 bp, Cannabis indica
aaataaaaaatattatcctatcttcactttaattcccatagttcttgataacgttcagtaatccttaacatcataatcaaagatatcaactttgagatttcacaaaagtagactattcctttgtatgaattctatatcctcatttatcgtataaattgtctacactgatagacatcatattaattcggtatgtccaactattattactcagtcgaaaccataagatcccacagtacatagttcataattgcatatttctattcctcttgtgggacctcctaacaaagtctactaacttaacttattaacaagctaagtatccgtttctgatagacattcaattatagcattctcatcccaatgccttgtaaatctctacttactaacacgttccttcctcgtggtaatctctggaatgactattgattcttcatcctaatatgaatatttctagcgtactttatcatgactcgtacgctttctgagataatttcccagaagatttcgtatcttgagattaccccaagttaagtatgcttaactccaaggtaagctcatggtgggttatcagaaagtggatgcttctttgttgttcccaattgtatttcttgctttcattctttcgctaataaaactccatttccatcactcccttcattagcctcttacaattcctcattgattttgttcccttaactatgagaaatttccaccttattatcaacttgaatcttgttcatctccacttattttgacttgcatccatttcctaagttcttaactaataacaattgatcaaagatcattccttgatctcaaagccccgtatctgtcttaggtagaaatcctaaaatttcttttttaacacatctagaaatatacatatctcaagtatattctctgttttatccatgagaataaatcaaatcagatttttctatttctcaacctttctgacttgcacctatggaaccaaggtcgaaaagattgagaaaaattagtcattcacaaccactaattgagaattccttgaaaagttaaggattagtaatccttttcagaaatcgaatggattcagtcttatacatacacgaggaaggtaatcaaaacagaaagaagataagtgacaatctcttggtgtgaactaccactccaacttgtagtgaatctcccgttgaaggtgttgattcgtcaacatctaagactcttatattcttctcctattattaccactaaggttttactccctagttcatacgacaccattgctcccttacaatcatcacatcttcatacttggttaaccactctaaaacttgttttatactcaattatgtagttcgatgttgaatacacaacttactttgtgatccaaccttcaccaactacttgaatgcatgccattaaaatgcatcccaatttataagctttttccattttgggtgagtatgtctttccatcattgtttaataaggtaatcttttcccagaattttaatagtctccttatataccagattgaccattcggtcaaatataaaagtattttccatcaataccgtattaccatgaataatttaggtaatcttccttaccttagtgataccactactcgccctaacgttctaaaatacgttaccctggtaacgttctcgcttcaagcctccattgggccccttacacccacaaaataatggctcttatacatgagtgcatcactttagctgcttcctggactgacgactggctctagacaccaatccaagcatttccagtgtgctttcctctaactcgcacgcttcatgggaaaactccccaaatgaaattactccaggtcaaggacactcaaccatggagttcctttatggtgggttaccaaaacaatatgcttcttgctaacatgggtagtctcacgcccacataatctcaaaattactatacaatcgtcgccttcaatttacctaggatttagggcaatactcataaattgtccctcttatactaatactagatcacttttaatcaaaagattttattctccaaattaattagaaggatatctccattagctactcatgtcctatatttcacttgggaatatcagcaaatttaactcatattgccatttttctaatctgtctaccctatcagatgagttatcactaaataacatacatgcactgcccattcagatcttttgatatcccctcattgggtgtacaatatttaatatcgatatgaattgaaacagtaactataatattgcccataaaattctaacttaagtcagccgaaagaccgatacccaaatccccttgaatcataactagtacttgggcaggacccgtacacttttctgctttaacattaacctttcttaattgtgggaaggttcttttcaaatgaactactaccccacaataaaaaaagaacttgctatacattaccccaaatggggtcttttcgcatcttgaatactcaggataagatcggcatttcttattctcgccttgaccgctatcctagtcaccttggaacctttttgttctgtcccataattggtggttcatttagttttcgctccctgacctgctagtaagttggctccatatatttcaccacatccaatggtacaacaggaagtgtcagtagtacaagaacagacaaaagatgagcttgttgttctttcagatctcggatatatttttcccttattctctaatcatattctgcatagcataatttacatgtttctagcattacgtcaataaaggattctcttccttatcgtttgctccaagcccagacatctcgctaatcaagcaatttgattgcccttattgtataacttgttacacatttaattcacatcttccaaacacttaaaactcagacatatatcaatatcaatatgcgtataccatacacatattcttagtatagataatcagtacactacttcttcccatcatacactataattatctaagcaggtaagacaatagcaaataacataaacacttactataccatgagtcgacctgtcttttgcagcaaatgcatatatttgacttgtctttagaacctttaaaaccatggttgctctgaagagaagctctgtaacgccctaatctatagggacgccacgtgcgtgattttttaatactaatagattaattaattattaaaaaccgtgat

SEQ ID NO: 220448 - DNA, 3297 bp, Cannabis indica
tagcttgatttgcatgtttttgatcccaagttgatttttcccgagagttgaccttgactttgactttgactttgactttcgggttgactttttgactttgggattttgaagacctcttttgaatagggtcttgagttgttgatcccttgatgaatcttttgctcttgatatgcttgttgagtccatttagtgttgcttttaaaagtttggtaaaaataccaaaatatttattttctcttttaaatttgctacaaaatcaataaatcattagtaacaaataataatcaaatatttgctaatcatcaaaacaaggagatcgaaaagtttgagttaacaccgcctcctcggccacataaaaatctgcattttccagaacagaattcatagtaactctacccctagccacattagcatcagaaataagggacatagaaccagagatagttatgtaatgttcacctgttgggaggcccgactcaggatcaggtcgagactcagactttgccacttcctcgtcttcgaacaacccatcatcttgttcaagggccagcaagctttcaggtttattgctttttccaccccgatttcttgtaccgcgaatctcctgaaaaagatgatcatcacatcctctacccaaatcatctttcccttggccttctctaacttcggtatcggtgccggctttccttttctttccattgtcctccattagaccaagatttctctcgcccaacgtaacagctgctcgctcgtcccccaaagggagacccgaatttgaactaccctcagcaaacacatccttaggtccccggtcaatcacaagccacgggttcgtcttaaggttgtctccctcgaattcattgtgtccatccgagattttctttctctttgtaccaacagcactcttatccagatcattaatattcccaaagatcggtttctttggaatcccacggggcccaaacattcttgaatgagagtttttatgggccatccttgatctccctttggaaagcagggatgaaacttttccacataacgagacagtcaaaaaagaaatgctgaatattttcagtatccacatcatgcacaaagcaaacagtttttgaatcaaattttgtcaaacaatccattgttttaaggttattttgaatcgctaacctaaaaataacagattattttatttgaaagaattaagtctgttccatacttcattatactatctagtgcaatgaaataagttcataaaaagagtgttattaattataaaataagaactatatccacgatcatagatataggctgcgctagcatcaagataacagaaacaacagaattttagtattgatattaagcatcagatattgtgttgcaaataattagtagtactatgaatattatgaagcttaaatatattgaaccaaatatataattaactatattggtgagacactagtggtattttctaccatttatctttcagcataattaaagtaagcataatagacaagagtccatataaaaaattaaatacacagaataataacaactacgatatttaatggtttcacgcaactactaaagaggtagatgacatatgtggccggtgtctttacaactaattaattaataattatgattgctaatgttaattgttaattaagtctattaatattatatatatctaccaagaatgtttgtgctgcttttacttatgtggccatgttagtgagctggtcagcattatatagattattctctgttccattccattcccctctctcttatccatcctatcaattaataatgacaactcatcatcactgttagttaattacacttttagatctggttcctttcctataaacaaacgtagaattgataataataagctctttacaaacccaaagcagccattaattaaacttccccaaaatttatgatttcagcctatatgaacattggatatagcaacatatatatgtaactatcagtattttcagtttttttatggaaaattatgaccaaattgttttatctacaaggtaagaattttatctttataatataatggttcattacaaaagaatttacttttagtaacaataaaatttgtgaatgaaagtaaaaaagttatgactaattataaattatcatattcttatgttgtgactaaaatgtctatagctaaaagtattagtcacaaaaattacaatttattgtgactaaatgtatttttggtcacaatactctaaaactaaattagtactaacttgtatctaaatactatgcattaactacaagtaatcttttgctgtgactaaaaattacatttaatcacaaaaaaaattatgttgtaattaaaaaattatcactaaggatatatataatttttgtagtggttagtctatatttgtctttgttgaaactgcatggtatcaagttccatctacatattattgcaggttatttgggacacgttagctattactgttaatttgagaagagttaaatctaattaattaactggttagtttggtaattagttacaaattaaggttactataaataatcagattcttaattagttaactaatcctattgattaatttttgttacagtgttaaaaaacgctttcttcttctctctttgttttctttgatattgtatacttgcaggaacttcattgaagggtgaagtttaaagcaagatttgaagctactaaagtgttgcttggtcttatttgaatctaaagaaatttcatatcgtgaagttgttgaaaggattttggcaatttacacaagaagatcttgtgtacaaccaaaggatttggtttagggtaattgttcactagtgtcttttgtatatgatcttgtgaaatttttaatatggattagctgtttttaatatggattagcggttgttaaatacattcttgacttggtagagttattaccctagttctttggggggacccaaggagtagttgactaaaatctgtttctagttatagtgaaccttgtaattttttagtgttgtgattttatatttaccaagtgatgattaattgttcaaaagtttcaagaaaatgagataaaaatttggtatagcacattcaattggtaacagaacctactatttatttgtgaaatagtgatttgaggtgttgtttaggttgtgttatacttttcttgtatccccttcatttcttgatttcatttcattaattcttattttttaccgtacgagttgttgggactaactgttgggttttatgtcctaaataaaactctttac

SEQ ID NO: 220449 - DNA, 5266 bp, Cannabis indica
ggagtttgtgcgttgacatggattagatcacaccaattgctggagtttggtggatccaaatgtctgaagtgattaatttaacttctcaaattgttgttttggatatttccttctgctcccagtctttgtcggttgaaaattgatcttcgggtgactcgctccccttggagagggagtgctcttatttggccggccataagaacttttgaaggagtctggccgaccacagaaacttttggaggagtctagccggccatggagacttctggaggagtctggcctgccatgtggactcttgttggtggttggccagccataggatggatagtgggggctgttgttgagcttgagatccctggtcggcccctatgtcgatgcttgccaggatttggcaatttttttttttcttgttagacctttaaagcaagatctgtcccccctgtagacaaggaagatctattctactctctgaggggacaggttggtcagcttgtcaatagaccctccctatctatcagcttgtcttccttgaagtggatctctgatgagatcctagcctcttctaccagttctctggttgaaccaccttatcagattgctagcctctctattgcggcgatctaatttttcttggtgagattgaaggacgtactcttggtcaaccatccatctcaggaatttgcatctctggtgagcgagcacatcgcaatttgtagtgcgtggttcttcaaggaattcgtgtctctactgagcaaatacatcacagtcagcagtgtgtggttctttaatttggctggcttggcagacagcctctctaagtcttaataacttgagatcttctcccaagtccctatgggactcgctaatttctggtcttgtctctcttgcatagtatgggggtaaaacccggttgttgttcttgggattcttccttcagttagaggtggttgtggagggttctcccttggagacaagggccgactattcatatccactaggatgcttgtatcatcctgacaaactgtagtgaccaaattcgtggtgcctattatgggggcaggattgaccaaatctgtagtgttgatggagattatagttgtggctagatcataaacttcgggatctgtagtctgtgggtcacgagggagacctagagatgcagatggtgcaacttgtgttcttttcatgttaaccatggcgtttgaacagatccgatatctacgctctcaatgaaagcacctaacttgtaacacccaaatttatagggataccacgtgtgtaattttataaactagtttaatactaatagaataattaattattaaaaaccatgataatattaaaaacttgactaaaagaaaccactaaaaacggacattataatggcataaaaagcgtgtttcgaggatccttgttataaaaagttttgcaaaagaactatatacgacgatgcttcaaaaatataaaatcaaaatacacaatacataaggagttccttgagcaagctgatggcttcacaaaattggaaaaagctatctggcaagcctatacaagtgggtaggacaacgacaaataaacatatggcctcatagcgccccaaacattatccagcatgccgaccagcgtagacaatctctattaattctcaaacaacgagaatggtggaggcaagcgtaaaaacgatagctcctttatgccatgaagtccaaggaacaaggaggagaagtgtgtgtgcttcactcttctatcaaaactcccaaagcatagcatgccaagacatactagcaaggcgtgtcagcaactgccagtccaaaggctggcctcctgttaacgcagattttcattaacaaatattcgtaataaactaaacacaaatttttatatatataagaaaattaataagtataataataataatgacactaagtattttacgtggttttgcaattaaatttgcatactccacgagtatatcttattcaagatatttttgagtatttacctacaacattacaatttgtgatctttttctatcaaagattttctgtccctttttctgtagagtctgtcctatttataggaatatacgttagcagttatttacatttaaatttgaattacataaacgtttcatgaaacgtgggctttgatcacgtttcatttaaacacgtgtagataacaatagacaattgcataaccatttatcattcttatcgtcaaagcggttgacgctgacgtgggtataggcatatcactttgcatatagatgaccaaataataacttggtttaattatatgccttctatcaatggcatgagctccagtgtactaaaaaaacttaagaacttctctttgaccataaggtctcgcagactggacaatcatgtcctacatgtttccaagttgttacacttatatattataatgtggaatacacgctaagtgtttcaatagcagattcgtctcgtcaatatttccttatatgtagcgaggcatatgtctcgctatatattacccgtagtctccttgggattatgccctccgaggtagatggtctctcgtcaatacaggaattgatagtttgtgtatccttgtctcgcctaagactatacagtcagcaagttatgaatatactctattagttctatatttaatgagttattctattttgaattaaatgatacaatcattattatatctggtggttcatattccacttgattgacatgtgtcactctctgaagtacagccaaatttcaggtataacacctccatctccgaaggctgacctctgcctctcaaggttggccttccatattcgaaggctgacctcttccttcaaaggctagcctctacctttgaaggctggccttaatctccaaaggctgacctctacctctaaagactggcctccacctccaaaggctgacctccatctctgaaggctgacctctgccttcgaagtctggcctacatatccagggctggcctccctctccgaaggttgccctccatctttggccaggcatacaggcaggtaccaccaatctgcccaaacctctgatggcagaacacttagaggccgtcattgatggaccccatattacaggcgagaacaataaagctagagagtgctatgctcggacactttgtcatgagcccaaaagcgactccctagcaggcaaagaacaaggctctaagcaaccaaagcttggagagcccacgatctcttcctcagaaaggagatcctgcccaagatagtttcctgcacaacgacccctggtcattactacacaaattaggaatataattgtagcaagatacatagtggataatggagcctcactcaacattcttttgaaaatcaacacgtgaaaagatgaggctctaactcgctgacttggcaccttgcaatcaagtgatgtatgacctatttggctgaagtatcatactcattgagtacattagattagccttactgttggagaaaatccaaccaccagaactcagatggcatagttcgttataattgatgttccctcaactttaaatgccacgataggctaactagccttatacaagttgatggcgtaacatccacctaccacctcttcctgaaattcttaacaaggcatgagtttagatatcaagaggagatcagtaatcttcatgtcattgttgcaagttggccttgcccaaagccctgaaataaaagaagcgtccatcatatcaggagcacacaagcttcatgatgttcaatgatcctatcagccgcaactttgaggtgtgcgtggagaacatgcttgtcaagtccaaaatggctgggggcatatggaggacctagatagacaagatccaagcccttttgaacatgaagtcacccacaataatcaaggaagtaaaaagctaaacaggatgcactgctgcactaagcagaattttgtccaagtctacagacaaatgcgtatccttcttcaacattctagagggaataaattcgagtggacgaaggaatgtgaaaccacattctaagagctgaagaaacagattggctcggccacctgtgttgcccaaatccctagacaaagaagagctaggcattcacctagtagtcatagaacatgctgtgagtgctgccctcatataagaagaaaacggtgtacaacaccctgtatactacaccagcaagagacttatcgacactaaaagtcagttcccactcatggagaagctgactcacaacttgctcttggcttctagaaagcaaaggccatacttccagctacaccctataaaggtgtacaatgatcaatagttgcggtaggttctatagaaacctggagcatcatgccaactactcaagtgaaccattaagactcggccaacataaaagcacctgacaacctagcatggccactgaaggccaagtgctcaccaacttcatggctaatcatagaagcatatctccccaaatctctcaaagtttgggagacaagcaggagcaagagaagaagcgagaacaagaacccaagaggtgcattagccatctactcaatgcgagcatggtccccaagaaacctggggacaactaatgcacgaggcaacaaggtcgattttaaagcttctaacaatgaggttgaacactaagctctcaatgttggccccaggctagtacacgaagcatgggctaagaacctagacatgcaccatgactctcagctagtcgtacgttatgacctcgatgaatatacaactcaatatatgaagatgatggcctaccagagctgctatactagaaggcaagcccccaaagacggcacaacagctgatgcactcactcaactaactacctgcaccttaacaaccaaggaaaagtttctaccctctcagttatttaaagaactatgtccttacattccaaaaggaacagacatgtagaccatcaacatggatacacctacaatagcatacctccaaaaatgaaaaacttatcaaaaagcagggactaggagggcggctacaaggtgtccaatcttgcataacataacacatagaagtggtatctcaacaccaccaagaagcgtttccaagaaagaagctatataactgttgatagaagtgcacaaaggctctacgacaatcatgctgggggcaaagccaatcgaatgtagatgggattaaactacaacattgattgggtgtgacagttagtagtcccgtgatccgtaaggggaaataccgggtaagctgtgcaatcccacaccgc

SEQ ID NO: 220450 - DNA, 2101 bp, Cannabis indica
ggtagatatcaaagtttgggaagcatggtttagtacataaaaaaaacaacagaaatagtaaaaattgaaaggaaattaaacaaaagtaccttaaatccaacaatctcaatagttcaggagggatttttaacgaccttaaaagttcagggggcaaaaatcataaaatagtcatttatttaacataggttctattctttatcataattaaaatacctttgacaatattagaaattacaatttatcacaaacacttagaatcctagactattaggtgaatagtaatcctaagatgacaatagattaaagtaaaatctaatttagtgatcgtctaaacaagattgaaacaataatcatgacatcgaatatagaagaataaaagcaattcgatataatagaaactagaaataaacattaatcatagaaattaaaaattcatgtcttgagttttgaaataatccttacctaaaagaatactactccgtaatctcaaacataatcataaacataattataaataaaaattaaaagagtttaagaagaaaaactagatgtagatgtagattctcctcttcttttgtgttatctctttcaaagctcagtttaaaagtactaaaattcgtaccctagaagtcctatttataatccttaaaaatatttcacttaacaaaaaagataaaaattcgaattttcccagaaatcacctcctcttcgcggccatgactcgttgccaaaaaatttctgttatgtgattagtatttttgtcataacttcttcaatataacacagaattagataatccaagatgttccggaaagctgagaacgagatctaaaactttcaagctaagctctaagtccagttctctttccaaggtcattaaaatttgtaattaatttccatgttgtacagccgagctcgccggcttccactattttctatcaaaatgtgctaacatcccaccaaatgactctaaatgcatgattagtctttaaaataacttaataaagtataatcacactaatcaataatttaaagaatcaatttaaaaatattaatataaaaattagtcatatttaaaagacatatatggactcatcaaattcccccacacttgactcttgcttgtcctcgagtaagttaatgataaaataaattgtgctcaaacaaatcgatctttatgaaaaataatgttagtttcaaaaattgtgcatccacttataattccaagaaaatcaaaactcttcaattattagaatttcaactcaagataattacttttcaaacccaattttttgtgcgtgtgttcaatcaactcatctgattactaatattttaatttaatttatgcatgtcaaaaatcaatttttatctcaaaataaatgtgtatttcaatgaaaatctactccttaagcttaattatcgaactattctccactaatataattacacacattttaaagatcaataagactttataggcttataatgtaaggctaggatgaaaggtagataagaaggttaatttaggctaaaatcacaccatagcatacatatacaacattatctcaaataattcccatttgtattccccaattactctcctcaacaattcaatcttgtatttctttttagcataaacttactaattcttccacacttagattgttgcaagtattgatcatttatattattgaacctttttttttcatgtcattctcttttcattcactttttttttttacatatatcaaatacctgcaacttacaaacattcattctaggggaattttttttttcatcatcatttatacataaccatcaatattttcccctcaacacatctctcacacatttacaaataattcccatttgtatccccaattactctcctcaataattcaatcttatatcttttttcagcattaacttactaattcccccacacttagattgttccaagtattcatttatctttcttattaaacttttttttatgtcattctctattcattcaatttttttttcatatatgaaatacttacaacttacaaacattcattcttgggaaaattttttctcatcatcacttatacataatcat

SEQ ID NO: 220451 - DNA, 2325 bp, Cannabis indica
tttttttttctttttaaatgtagcgtattttacaatcagttaataatttaatagcttcaagatcttaagtttgaacccatgatctctccttttggggtaagttgaaaaataccacttttattaatcaattaatcaaatttaccactaattttatatttaattgaaacatacatctttttatatgtattatacccaaaataacctaacataaaagagtcatatggagagtatcttgaagtgacagaggcaaaattagtacaatgtttaaaaaaaaagatgaaaataatagactttaaaaaaagggtaaaaataaaatacaacaatataaaaagagtatagagtgtaatttcctctctccctttttcccatccctccctcaccgctaactttagtggtcaacttgttaattattagcattttattttacttgaggaaggttaggccatctacaatataattctaaaatattacatttgtaaaaatttgacactaaaacttattttttatttattaattactatttctctctatataatattttttttgaaccaatttcttcctatataatattaaagctttcaaatatatatatttttgctatttttaataatataataatacaaaaatattatatttaattaaaattttgtttttgtgtaacttttagtgttgatggttgaagtgaaaaaataatagggcaaatactagtttagaaattttattttgtaaatgttaccaattgaattttctgttttattgaatgataaaatagacattatattttccaaaatagtaaaaataagactctgagctcaatttttaacaatttcattttttaatatatttaagacaatttctaacacgaacatatataaaaaaatataatcagttttgtcataacaactctagatcggattattattaaatttattttttacaaaaaaatcagttcagagtcttatttgtacaatttttagaaaatataggatccatttcatcatctaacaaaacaaatggtccaattgataattttttttttgtgttaaactaatataattataatatttatggttggagttgttcttaataaaaaaaagcattgtttgtaagattgttaccaatattttaaaattattataaattttcttaaaaattattatatgcatttatggtaaaagaattgctcacttttatgtggatatttaattattcataataataataataataataaagttagagcttataatccctcaaacatcctctccatttccttcttccatatttatttattgttacattcctctatctttttctttttgattttgatgtttttctaaatgaaatgaattaaattgcaaaacaaaaatgtaaaccaacctttttttttgtttcatctctccttcatctttcttatttttctttttttgaaaaaatagagtatgaatgtttaagctttgacgattttcatttgacactataaccttatttttatggcaaataaaattatattcttttttttttagatttagaaccttaaaagttgaaattcaaataatttttttcttttggagtaatttgcgacataaatacttaagtttgactctcagttgtaaatagatacttaatgagatcccatgagcttggaagtaagtacccagtgcccaggtcctattgcactgggttctgcttatccaattttgataacgtttcgaccgcttatctagttttttataataacgaagttctatgaaatcaaattcacaactttacatttctcatttctggctcactaggaaatagagtctttctagtctcctatttttgcaaaatagtaacatcaccgagaattggtgaccagccttgccagaacacagatgctgactaagtgacgtaaaaatatcacttaggcaccttaaagtacaccccctagatatttttgcactaacccaacgtataggttaacgtcaaatgtcaacctgggtgctgggatatcaacctgggcgctggatatcaacttaggcgttgggtcatgtactccctttagtaaaacaactataactcactcaattttgatccaattaacgcgattcaatttgcatttggaagctaattcaatgttatatccagtcatgtctcacacttaaattgtaattctaaagatatcgtcgtcaaaattcatcccaagagagttacaaaaataagcttcgggtaactcacagcgggacctgctgggctccagaaaatgaccatcaccaccaagagctagttttcactgttagattatcatcaacagtcaaaaatatcttatttgtattttttttt

SEQ ID NO: 220452 - DNA, 2411 bp, Cannabis indica
tagggcataaaatccaacaatacccacacaatccaggatcaaacgtgaggagggctattagagtttgtcccacattgctaatgtgtggaaataaattgtgatatataagatgaatgggctacttctcccattgccaattagttttgagatggaaccccattcatcttatcctcgaattctaacaaaatttgacacaatctatcaagagaacaaaatcggcacaaaaattggaaacaataaaaacatatgcgttggccttctcctctgcctcctggcgaatgaatctaacaatttactggatctgcttggacacatctgcgtcgtttatcatgatcggcaatggattcaaatcagagaagatcgaaaagagcaaaggggattctcgtgaattgaagccttcaatttggatgtgatcgcagagtgaggtgagattacaatccaaggcacgaagctcagtgttactctaatcgttgtcggagtgctacaagggcaaaatcgtcattttcatgtaatccatacgagcaattggtcttggaatattggccttccatgttcttcagaataaactcaaaaaatgcaccattttgatccaccacattgcttcaataattaattgcatagtactaaggaagaacgtgaagaacaaaaaggagaaagaatagagtgaaaacaagaatgtgaagaacagagctaaggaagacaatgacagaattttaatcatcgtggaaaagggaacagaatcacctacaaatattcaaggaatttctatgatttggcagtttaattccacaaacaaaataacaacattgcaagactcatcatcgcaacaatcctcgactactgagaaatcaaaagttcaaattgagtttcaagaagaaatttatggagaaagtaacaaaaggattatctaccgagagaagggaggagctgggtttcgaagggtagaaaaaaatcacattatatcaatcgatttggagaagaggaataaacaatgatattatattttttttggataaagaaaattaaaatattaattattcctactattaacccaaattttgtcaacctaacgtggcatgtccacgtaagccaaagacagagtacaggtggaacacaaccttgctagtagcaagatagggtccctatacaaggtacggtaaaatcgtcaagcaacaacagaatggagtgaagtgagctctcaaggggttgtatctacatccctggtcggacaagagaagcctataagctggctagggtgagcctataggccaaccaagatctatgcacaggctgaccagccaagacgtgacttctggaccaagggagcttcaatttgaccaaaggaacctgacctctacaaggaaactgtgtacaaagctgtcctcaacttgaaaaaggctggcctccacatccaaaggctagcctcctcttggtgaagctatagtgatttgtaggatcctggcaggagcatggccaactaggctcatcctgtaggccttggtcggccagacctcatcctgaaggccttgggcagccagacctcatcttgaaggccttgggcggccagacctcccttgtaggtctatggtcagccaagattgatcgacctggcaagactctatgtacaacccgaaacatggacaacaagctacctgcaaattgggcccttaacgacctaacaaactgatggaaaatatctacttttaaggggtagtttagtcttttttatttaatcaatttaatatgtaaatatattagggctttattataaattagggttttaggcttcctatataaaggccttaactctaacctaaaaaacctaagtcacactaagcctccaaatcactctaagtcaaaaaccctagtctatctgtctctctcttttctatacgcccaatagggtctcctctcttcatctctctcacacgcctctaaggcaatatcattctcttattagagatctaccaattgattcatgttttgtatccttatagagagctatatcaaatcccacctatagcgatctgaatagtattatctctaggtattaatacaactaaaaggggagtaggtcattacctgctatcacaagggggtcaaacctctataacaaatctgtgtgttttatactttttcattttatttgtgtaacacgtggcaagcatcagatctatacgaccccgctgtcagttaatcactttttgaattcaacacctacaatactaaataattttaaaagattcatttaaaaaaaatgataattataaaagtttataaaattatttacaaaatttaaaaattttaatttttatattaaaataattttatacgatactaaataataaaagattaattataaagtataaaattaaaaaatatatatattaaaattatttatgtaaaactat

SEQ ID NO: 220453 - DNA, 4369 bp, Cannabis indica
gaatctgatttactggccctacatataagttgacaactacagttaatcataattaaaaagtggttattattatttttcacaggattaaaaatcagccattcttacagtgaacccctaataccagtctgttgttttcctcgatcttcggtgatctacggcgatacggtgcagtacaagttggtgaatgaatgaatcccttatcatatttttttccagttaaagaaggaagaaaaaaaaggtacttgttgggtgacagaagtaaatatattaggaagttgatcttaaattggagtgaagcaaaaggtaggtttaaaatgatattttatttttgtttgatccttcagttttctgttaaagaaagataaaagattgttgatatgtaattcttccttttttgtttttcagaaatgtaattagttttgttttctgtttctatacaaatgatcagacagagagggttaaaaccaagaatgttttctccttttcttctttttttgtacaaaaacaattgagtagattttgatatcaaaattagagtggttgattattttgcatgtttatatatatatatatatacaattttggttaaggcaaaatctgtaactgagacttgcacaagggagattaacttcgatttacatagctcgagcattgtgtgtcaaagcataattgactaattcacgagcaattctattaactttcctatacaacaaataaaaatttcagcaatatttgtcaaaacaataataaatgacaaatatgatgtaatataatattcatatcccgtcagcctttttttttttttaattaattagatagtttcaagacaatcacattctatacttaggaattttgctgtttaggttattttgtttaacaaaatgtttgttatgtaaagttgttttaattttgtataataatttaagtaatgtttcgtcttactaatttaaattttgattaaaggtggataaatattcttatctgtcgatttgttcaatgtatttatcgtgttaagcatttcggtgttagaatttggattcacaactcaaattaattatttctaaacataaatactaaatagaaacggggtaaaagttaacttaaaaagaaggtttagttacaaatattctttttataaatgcaatgtacgccgatactcaaattatgtagatataaaaatactgtttgtatagaatttttaacatttttacagtttttaaaattttattacataaaatacgatgatttagtatatttttatgttctactttattaatttttttagttttgtatattgtttttcttgtatttttataaaaaaaaaataaagtaaaaaatgaaaaaataaaaaaaaaaaaacttagaacttaaaaaatataaaaaaaaaaattagaacttaaaaaatataaaaaatttacaaaaaatgtatgttttatgtaattattcctttaataaagggcaatatactgcaattaaagaaaaggtgaataaaagcccccattcgagaacgttctgcaactctttgattgattgattgatcggagattatgaagccaacagccatggatttattcggagacatggatgatcaaccctctacaatggctatggacgttgatgacgccgacgcacttgaaattctaggcgacagtgtcatcgccgagaacaagctcaccgacgccgacttcttcaactccttcgaagacgatttcgatgattccgatatcaattgatgaatttagctttctagggttggtttcctttgctctaaaggagaagactttattatggttagtttttatttgagataaatcaaatcacacaatttcaaacttcttttgctgtattactatttggtatcaatttcaaatggtaaaaaatgggtttgaaaatttctattttgaatttaagaaagctatgtgtttgtgtgattagcttagtttcattgatttgggtgattgagattttaggatgtttactaaaattataactatagagaaataagaacaacatagtgacaattacattgaattgaatcagttcaattgtatattatctaacaataatagtttctaaactagtttaggaagtatccacaatggtggtggataaatcttttcagcttgaatctgatcaaaccaaggttcaactttaacaacagttttagtctccatactgtaaacaccattgtcatgaccaccaaatgagtaatcaatatccatcatatcccaattatcatcactaaaatagattgagtttcctttgtatcctggtacaaactcagttgaacaacacattgattcactccttccaacaaaaacagcttcatcacaccccaaactctccacattctcccattcaaactccaacttttctgtctctctcttcatcttcatcttcatcttatgaacacaaatcgccacagtcgagtaaggacaaatcaaaccatcgtaaagatcagcctcttctagcaactcaccatctgagttcactatatacccaacaacccttgtcactagtaatagctcaccactcattgattcaaccaagtagctttgacaaaagtaactttcttttttaaacttctcacttttcaacaaatcaaaacaaggctgagattttggaactaatggaatgagtttagtagggacattagacccattgtgagaaaaatcccaaatatgaacatggttggaatttgacaaaccaaataaatgatttttgtgactcaaaatatcacaaaaagacatatttggataagcagtgtcttttaaatcattccatgaacaatcatcatcacctccaaccttacaacatgcaagcttttgttgcacatatccatatataacgacaacccaattagtgttgttgtcgttgtcgtttccttgtttcttcttagatgaaacgacaatagctttagagataattgtacaagtaaggctagtaccaacattgggaatgtgaagtttcttcttagtaaatggattgagaataaaagacccttttttgggtttgttcaaaaccacaagccaaccattagaagatcccaagaacaaattctcatgttgatcaaatatttcatcttcaaatttataaaattcttcagaaccctttttgtaactgaggctaaagaatctctgatgatgataatgattagtattatcattaacatcatcataatgattatcatcttgattaggaagcattagacatggatgagcctttacaaatttgagacaagaataccatgaagaacaaacttgcttgcattgaaataaatccatgaaggaaagtttatggaatattaacggtaatatatccatattcaaatcactaaatgtagttttgtaaaacttgtaaagatgtgatcttttactagaaattatcgacatgaccaagttagaggaaagaaaaagagaatagaacactaatatatatgtataatatatatatatatatatatatatttgttcttatttaataaggattaagaacactttttaaggagaaagatcaaaattatagattgttaagaaagtaagtttaagtaggatccaccttttatagacgtttttttttttttgaacaaaactattttgattaggattagaaataaattctaattagtgtagagaaaagaattggtgagcattttaccgttacatttaaaagtaaggcacatgcaccacaattaggtttcctttttgtgaatttatttatttatttatttttggtttcctttttgggtatttattaccctttttcgttcctatctttttttaataaaaataatttgttactattaaaaaatttggctcacagaagtatcttaggaagttgatcttatgttgttcaggttatcaacggaaattaataaaaaaaaaagagttttgaatattaatatcgcaatttttaaaaatttgatatttattttagcaacaagccaaacaaaatatctatttgtgccacaaattttcctagatattttatttcatttacttattatttttttaaaaaaataaaataaaataataaaggtacttattactaatttattggtcttctttaaatagtcagtggtatagaggatcgaattggaattatgataagttaaaaactactattttttttatcacattaattaaatataattttaaaataattttaattgataaatatcatcttattaaaatataaagtcacataaattattaaaattaaaatttttaatgcacagaatatgacctataaaactagatatattgtaaaaattaataaaataaaagtaaaaattaaaataaggaatgaaaaatgagtatactgtataattttcttgttcaaatttagaggaatttttttttaaaaaaaa

SEQ ID NO: 220454 - DNA, 2479 bp, Cannabis indica
ttataatattcaaataattaaagttacattgacgattaaatatttatcacgtgtatgttagggtacactgtgtcatgtccacgatgacacttaattgagtcttttggacagaaagaaaaataacataacataagtgcaaatcaagtagttttaccattaaaaaataagtttataaaaattaaatgtcacaaatcgtataatttatgtaattttactgtcaacattttcttatttatttatttgatattgtggaggtgagatttaaacttgaatttcttttttatgagaataagtatgaaattacttgacaaaatagtttaaataataacagaaaataatagtatataataattaattttaaaatggacaatatttagtaattacgtaattattaacaaaacatttatggaggccaaggtcataattgaaattgaagctcaccataacaacaataataataattataataacaataataaaattattagaaaaatagtttaaaatggaataatgaaaaaaataaaaagggagggactttggagggtcaccataaattaaattaaattcctaattaaatgtccagtccaaaagaaagtcaaaggaagattaagattgtaagtttaatattttttcagtgtcatatcgttaggaataattacatcacatattaaaattttaattttttatttttatactgtgaggcaaatttctttttcaaaaatactgtatttttttaaatattgtgtaaattcatactgtgttctgtgttaagttttcactgttatttcacgaatggtttttagttgttctattgttatttttaattgttctatttgttgtttacggttgttttataaaaagatagtatttttaaaaaaaaatctgtatagcagtaaaattataaattttgacccaaaatttaatattttttgtaaaaaatctatattgttattagtgtaattatatatcgagacttctataattttaaaaaatattggtaattaattttaaaaagtgttagatactatatgtgtagttggggttcatagccagccttatttattaaattaattcatttctaagctataaaaaaaaaatgatgtttaatggctacaaaggtatggtgactttttttcaaaaataaataaataaataaagtgccccacatcatcaatcaagacaaatgtatatgtatctatcaaatgtataatagtagtttttttttttttaaaaaaaaaaaaaaaatagctaccaacattattctctttgatgagtcttggatttcatttcctaccagaaaaaaaaattattttttaattaaagatactcttaaatcttaataataataatatattgccttgattgatatagtactaattttgatgagtaggtatattggggccattatttgttttgtagtactattaggcagcacatcaattttcatcaattgttagttataaaaataaaccattttatatacaatgactagttagtttagtttaattattataaatattgtttttgtcttctattaaccaaaatatatattttatatatactactaattagtgttaaatgttacttaaaaaatgtactatataaaattatggataagtttacaggacactttttaataaatattttagtaaattttttatctgtttcggcattgagtagaattttttagtttaatttttttaatgatcatgtatattatagttatttaagatcatttgtaaattttcaaaaaaaaatcgagtaatttataatacaaaaaataaaatttacatattatatttacgctcgactatttttttcttatccgcgtaataagtaataagtttaaattttatattttttgcattataagttattcagattttttttaaattattacaaaaaaaaattaaactaattttttttttaaatgttaaaacaaataaaaaatttaccagaataaccctttaaaacttgaaagagtttactacataaatttactaaaattataaacctctcttattgggtaagtactaactaaaaaacaaaatatatgtagttgttaaaagtcataaacaaataataataatgcatattttattttatataataaataaagtacaagcattttattttatatttttattaaaatattgagtgagtggaactatgctttgcatgcattagagtcaccatctttttcagatgttgaaagaatactttttttagagggaaaggaaatatgttttaaaggacacaaagttccttgtttggttaattgatgacaaagttcttgtttgggtaaatttctttggaagtttttgtaatagattcctttaaaatttaaatggtagatttagtagattattaatctgtttcggcaatctgaaaaaaaatttagtctatttttttgtattattgtatacgtttatgtaagaccacttataaatttttaaaaaattcggaattgtttacaata

SEQ ID NO: 220455 - DNA, 1717 bp, Cannabis indica
agaagcatctctccacaccaccaatgttggccaaaccaatcgccgaaaagacattgtacatttatttgaccatctcagaaaatgttataagtgatgcattggtgcgagaagatggaaagaactagcaacatgttaaatatgcaagcatacccatttactgggggcagagtcgaggtatcctttgctcgaaaaactcgcacttagcctggtacatgcatctaaaaaattacgaccagattttcaggctcatcctaccaaagttctcacatatcagcctttgtggtaagtattgcccaagcctgatgcattaagaaggttaataaaatggtcgatcaagttgggacaatttgaaataacctaccattcgagggtctccatcaaaggtcaggctttatttgacttcctagtggaatgaatagactcaggagaagactccagaacaggaaatgataataaaacatggaaattatttattgatggagcttacggggtaggagtaataatggtatcaattgagaatttcaagtttcattatgcactaagattccaatttgatgcttcaaataacgaggcagagtatgaagctttggtggctggattacagatcccgaaaactttaaaagtgaagtatgtccaatgttttaatgatttgtagctagtcgtaaaccaaattttgggagaataccaggtaaaagacacaaggatggccaaatgtctagagaaaatttgaaaaaacttggagaagtttgattattttaaaattgaacaagtttcaagagagtgaaactctaatgcagatgccttggcaaaattggcatcacattttgacttggataaatgaattttgttctagtggaggtgttaagcgacccaagtatatgtgaaactaaaaaacaagagatagagatgatagatgcgagccctacatggatgacccctattgtcaaatacttgctagatggagagcttccaatagacaaaactgaagcacaaaaactcatgtacacaatatcgagttacacattagttgatggaaaaatatacaaaagaggatattccatgccattactgcgatgtgtgctacctatagaagctaatgaaattataaaagagattcaggaaggcttttgcgaagaccatgcaggatggcagagtttatctaagaaaataattcgccagggttattattggtcgaccatcaacaaggacacacataaatttgttaaaaggtgtgacaagtgccaacagttctcgcatatactaagaatacctcctaccgaactaagaatgatgacctcgccatacctatttgcaatatggggaataaacctgattggatccttacaaccaaggcaaagtggtgcaaaatacgttatagtcgcagttgatttctttacaaagtggacagaattcaaacatttggtgtccatcacatgcaaaaaaaattcttgattttgtaattaagaacattattcactgagttctgtgaaaggaataaaattattaaaagtttcccatatgtatcaagaccacaggcttatggaaaagtcgaggctgtcaataaaaccttaaaggaaactataagaaaaaaagttagactcagctaaaggaagatgggttgacgagctaccacaagtgctctgggcccatagaacaacaaaaaaataacaactaaacatacttcattttcactagtatttggctcaaaagcaatgtt

SEQ ID NO: 220456 - DNA, 2641 bp, Cannabis indica
gtgattctgagagtatccaagaagacgggcttcctcagcaattttccaaaaaaatgccagcctaccagaccttccaattgcttcaacagaaaaacaagattcaaagcccaatttagttttcattcggtccaccacttccttagagcaaagagtttcacacaaaaatacaaatttgggtttcttttgacaacaaatgtctactaggaattgttgggcccgtgggttcccaagcccacggaaattccaacttagtgtattcatgatgattggtgggcctggacaccagcacccaccttttgaacgttttttgagctgccctcaacatttggggtatttatcaaagtgacaaaaccacttgtatcaaccggcccactagaattagcaccaggcccaatggataaagaatccattctctttctcttaccttctgatatttcaaattccaagtcagaagcaaatttaataccattttccttcaagataacaattgtcccttcattcacggtgggattagaagccgaatccatttggtgagttgtcttctttgattcaggcagaaattgggagggagaattaatgttgaatgcttcgggcaccccactatcagcctgagacgccatcttccccgatcgcagccacggtgaggtggtaaggaaattctgccttcgattaggagccttcatccacattccatagggcttcacaatcttatctgctggtgtatagtagagtttaggacaaaaattctctgagtgtccgagcaatccacagataaagcaaaatgtggggactttctcatatttgaaatttgcataaaaataggaatcgttccctctgcgtcgaaatttcattctccgtttcagtgggtgagtaatattgatccgcaccctcactctgaaatactccctccaaacgcccgtgaagttgttcgggtcagactccaaatactcaccaatgtatcgccctgcctcaagaacagctttctctgttcgaaatccagattggagatcatatatttgcaaccacatatcaagtgtattcagcataacattcttaggattattctccggtttcaagcgttcaattattagttgtttcctgtcataagtccatggactaccgttgataactctttgtatgtcgatttcgtggtaaaattgaaagagaattcggttctgctctaaaatcttcacatacatgccttttccgggcttccaaagatctgccattatgttttggaagataaggaaatccgaaactttccctgtcaatagtcttcctatcaaacaccaacgatcatctaaatcaggttccctttcatcatcatcgtcgtcttcaaaaataacctttgtttcttcttcgtcctccaggcacatatcagcccatttcatttgtagatcaccatcatttttactgctagacgccatgaagtagcaatgaaacagtaccaaaaaagcaataccaaaaaacaacaaaaggacaatcttacacactcaaaagagagcgacacacacaaattgagttaatttagtttttatttagcttttaattacaagtattttattagtaatatccgttattaaaacaaattctgacctttctcattctcttttattttttgtgtctctgccacccataacgacatggcaaaacaagttatatattggctgatgaagtaatcactagctgcagaccactcaacccatcataaccagccttcgcatctgtacattgtccagcgaagcccgacgaagttctggcgtaggcaaaagttctgataacaatcacccttcacacttgttcctttttcttaacatatctctctttttatctattcttatttagggttttctctttctttcgattatgctagattgtgtctcaatctttaaatctccacatgtcgtatgatctttattgtaattttgtagttgataaactttgcttgtaattagttattgctttttcttatttatgtgatggtcaatctcaaatttattagttttatttttctttttttcatgtgagttttttttctcttattgtcttactttatgttgtgagattttattgaaacgaaatgtttgtctctatattatcatgtatatatatacatatatattattgatagatgaagaaatcaagctttgtagtttctgcaaccgattatgctatagactttggatgctcagattattacatctaagtttgtttttcattgaagttggaagatgaaaattctacagagctgaggagtttgttataggcaagcccatgtttcaacagactaattctctatgtttcacataaaggtagactttgtttaaactctataatgatactttcaagttacttttagattgtatttaactgatactattaggaagcttttgctcaatatagagatagtctatatcaataaaatccgtagtataatggctcttcataaaagtatctatgcatgtgataaattttttagtatatatatatatatactaggtgaatgtacgtgccgagtcacgtattgctagttttatttaagattttggtctttttaagattttgaatgtattttatttttaaagattacaaattttttgtttgaaaaaattaaatatttatatttgaaatattatttaat

SEQ ID NO: 220457 - DNA, 1473 bp, Cannabis indica
tatatgacgatttataatattattatggcatgcattatttgtttttaaaaattctaaagttaaaggggtgccaatgtgtaataaaaaagttaaaggggtgaaatataaattttctaaagaacactaatgaaaattatacaaaatacactataattaatttatcaataaaaaaattgggatcagccaagccctcctcgccattgccatagattcgttcgtccttatgtgcaatcaaatgtttaaattttattttcgatataataaattatttttatttcttaaaagcaagtagaataatggtataaaaaaatttgaagttatagtttttctaagtgaaaaaaatagacattcctactaatagctacaaaaaaaaatatgcttttgctatataatttttgtgaacttataattaatttggttgtactatgattaattagttaattataacttgtactatataaatacttacaatgcctctacaatttcgactactctgtttctttcctttaatatgaacattgccgatcatttcagtatttgaagatagtcttcctatatagaaaattagaaaggttaattagatagagagatatataaataaatcatgtttatcccaacaaacaaaaaacacacacatagagtagagcacatttattaaatcaagactaattaattactatgtgttttaggcaacccctttgttattttattttattttaattaattaaagtaaaatgcatttttcatcatgcgcctataaaaaattttacttttagttactataaaatttgtgattaaaattaaaaaagttgtgactaattataaattgtcattcttatgttgtgattaaaaagttatagttaaaagaattaattagtcacaaaaatcaaaatacttgttgtaactaaattagtgacaaaataatatgtttagtcacaagtaacttttttgttgtgactaaaagtcatatttagtcacaaacttttttgttgtaactaaagtcaattctttttttttttttttttttttttttttgtatttgtttgtaagccaagagtgtttcgaggccttggctttcgatatggatcaaaatgtgttaggcctcgcggttctttcatcttgtcgggctgttacctcacggtcttgactctcacattagtatgatattgtctgctttagttctagactttcacggttttgtttttgagcacatttccaaaaggcttcatactaatggaaaaggtataacacttatatctaaaataactcttattatatattcttttaatgtgggacttggattgataccccaacaaaatggaactagacgactcttgccaagtacctttgggatatggaatggcaacaagctttttatgggtaaagtaggtgaattgtatctacttaaaaaggtccaaattttgtggtctcatgagcttaagcaagagatgagttagtattagaaaaaactca

SEQ ID NO: 220458 - DNA, 3432 bp, Cannabis indica
catataatcacaattaccttcccctatgttgacatcattgtaattgtgaataactatatgttctgaatttaatagaaattgtatatttaaccataaacatgaaaaatacatgtaaacataaatgatttctaatcttctattgataacaaataagattatattgaaatgagttttatttagggcctaaaatcccaacattgtgctccacctatcctctgtctttggcatacgtggacatgccgcgtcagttggacaaaattttggataacattgctccccaagtccctattcgaacatctggttggatagagactttctagctctcgtcttgtctgcagtagtctctattgagcagccttatccagccaagttttagcttttgcatgtcatgcttttggatctttgatcttctctctctatatatgtctcatcttcttttcttgggcatctcttctttgtacctgccattaacaagtttcaatctttttaagcttttagaaactttttaattctcatgttagtttgcaatctctttggtatattgatcctcatgaaagttttggaatgtgtaatgtgtgactttttgatagaaaggattcgatttcggccttcgctatgattcttgactctttgagtcataaagaatacgaggcacatattcgagttttgagagaaaaacacacattgggattcaaaacttaccttggccagtctgggaggtcttgcttgagacctggccgaccctaaggtttaatcatgaagttggccaactttggggttttaccctataaagcttgcctggtcatgcttgggtttggtgaccctggccagtttttggctgagtcattggaccctagtcgaccctttcaaggattgagaacattagtcggcatgggcctttgttccaagtgggtagcagttttctatcctgttgtgacttcggtaagaatttggctttgtagacatatacaaccttagcctcatacgtggtttccttaaatactctttatgaagcttaatgacaagtctattatagtcgaatattcaacttaagactcaatatggcttggatcttataaggaactctaccttagccgtagtccagtacgtggcccctacaggagctctgtccggttcttttctggctatgtggttcttgcagggccttggccccatgcatgtgaactgatttcatatccagccttagggcttttcatgttcttgctttggcctatagaccctctgtttttgaacattactattatttagccttaaagccatctatgacggacatatgattgtcctggctatcttcttatggccttaacatgtaagggtccgaatttactatgtcaagccatagtatgcctgcacgacttagaggcaagtttcgtatcgctgtcagaatatacccttgcctttccaactagaagcttcaacttttggaaatattttaccaggatctagatttactaacaagcatgttgaattaacatcctaaatatgaatatctctaaaataataaaattaaacacataagagtttagaaaaccttacattggttgcagcagaatataatgactcctttcgctcagatttctagcccttgttccattctatcgcagagtattaaggctcgagtatgaagaacaatgaaggaggcttgaaaactgtatagaaggtttctctcatctactagttgttagagaatgcactactaaaaaattggacaatctcggcacctctatatcggcggttccatgtgtaaccgccgagattggtatctatatcggcgatcacacacggaaccgccgagattgattaaatttttttttttaaaaaaataaaaaattgttttatggggacccaatctcggcggctccctcgtgaactgccgagatagggcataccatatctcggcgattcacgtgggacccgccgagattgggtccaaattaaaaaaatgaataaatagcatttttgccccccgaactttttaccctaccaaatttttccctctaatatatactgcttgttacgaagagtcctcaaattataacgaatgtagaaatgtagtccttccgttcacttctgtttaattttgtcgtttattgacttacttatatggcagtattattttaaataaaaaatgatgtggcaagacatgtggatattaattttaggtgatgtggatattttaatgtaacttaaatatttttcttttgtttatttacattaatgaattaaaacaacaaattaaataaaattattctaaaaagataactataaacactcaaaccctagctgccctttcctatttcctctctcttcttcacgcagcaatccctctctcttcttcacgccttcttcacgcacggttgtgttcttcaacctgctgatttttttttttgcagaaaaaaaaaattggatagttaaaatctaggctccaagcatgacgatcttcacgcctgtgttcttcccttttaattttttaatgtcttcatcatcttattcttatgaaagtgaagatagatctatgaatatgtatgaatggagaccaccggagtgtaaatgtggtttagaatgtgttgaacggacttctttgtacagaagataatccaaggtttgtttaattttttttttttggtaatattttagtatgaaaatttgttaatgggtttttgtttggttttaacagagtaatgttcaaattgggtgtcgttttttaaaatgcattgacccaccaactccaaggaatgatataaatttggttaaaaggctagagatgattgagaagaatgtaatggcactggaaaatcatgttgaaaaatctgatgaagaaattagaagattgaaaaatctgatgaagaaattagaagattgaagaaatatttcaaatttggcatatatgttgttcttgcaattttgttgtgttcttatttttattagttttgttaaatattctttttttaatattgtactcttgacaaactagaatgatgtaattttttttgtttgatacattgttgttgttgagattaattctggtttttgggtgagatttttaatctttaaaatttatgaaagactaacctatatgtatgtgtatatcaaagatgaattgtgaactttgcaataaatttattaagaataacaccaattaaaatctgatgttatttagaaacccaaaaaaaaaattcaataaagaattacttattttcatatggaactagagagtgagaaataaacaagaaataaaatgaatactttttactattctgttagtgtatttgacatgaaatttcattaatttctgacatataaatatcaattacatctcaaaatatcaaaacaaactgaatcctccatgataaacctctatgataaaattgtacttaaaaatagatgttcatgttaccacatgacaatttt

SEQ ID NO: 220459 - DNA, 4909 bp, Cannabis indica
cacaacctattaataaaagtcaatgtgaaacataatattgtaataaatagtactatacaatactatacaatacactatgccaaacattgtctaaatgtcatatattgtcgccaaggcaagtagtacacttagaaattgttactcgctacatttcatgtgtcaaaaataatcaacttcttccttttgtctatactttttagtcagtaatctaattttaaagtttgtatgatgccatgccatcagtgtgatatttcctctgagatacccacttacatcaaattgggtcaactaattttcaagtgttttaacatttaaacataattgaatccatttcaacatttaagatcctcttccatttgaaatgatcttgataattgcattaaccttaattacattttggctttaaaaattacaatttctcatgtgatgactaacattcacacgtaaaacaagaatcttgcttggccttgagtttttcctcaattttcttaggagtacttgttaataaaattgtgacaccatgagttttagatcatagaacttgaaatccatatattgagaaataagcgatttcatagtaccttttgcttttagaattaagatgtgttatcgtgttatttatgaaaaggtttatagtggtgaataccaatacaacatgattattaatcatgtcaatatcccaaacacgaacataatacaatttcatagtaggccatatgacaagatttcttaacaggtcacaataagacatttaatgaacgtgtcgtgtgaataaaacatttaataaacgacatggcacaataagacatttaataggtgtgtcgatataaaactgacatgtttaacacacgattaaacaaaacacaaattaacataattatataaagataaatattactcatacaattcatagttttaatataatttttaataaagagaatgagaagattgattatgactcgaaaattaaatgtgttacttaagctcatttgtttcgggtcattttttagttgcgttgccgtgttttgtgagtaatcaccaacctaattctttagaatgtaatttaagcatttgttgatgaaataatggtgccaaagtcgatcttatttttaagttttagggttgcagatagagataatttcgatcaagagtagtgaatataaagaacaaaatgacacaatattgtaaccacgagaatgtgcaattaaaagaacagaatgattaacaaacataaaaagagattagagatgcttatttatttatttatttttatagggattagagatgcttaagtgagaaacattttccgaattctctatttcaaccctttgttgagattgcctgagtttcaccacaagcaaatgatatattttgttttcttttgttcttagatacattgattatgaacccatcaattcctcgagatgaaattaacctatttcacgatgacgatgacggtacaaagacaatagacacaccatcacaactaacgcagaagaaattcaatgatttcatcaaagaaagaagggacagtctcgggatgaaaattgagtataatcactatggccgtcaagaaattgaaaaaggagcgggaacggagatagagagtttcattgatgtgtcgacacgtagacatgtgcctttaaactacaacaaatggaaggatgttccatataaacacaaatacattgtttggaaggaaatccaggttaatttcaagattaaaatacttttctccagtaatatgttcattaaataagtggttaaacatatttcagtagtgctgtatttcttctcacaaagaggcggtcctaagttaaaatgtttcttccaaatgttacaaccaatttcactaaataaaacttgttatatgataatatgccaacctatgcagtcattattagacgtaaacttaaccacgaagaagaaagtcttgaaggaagccggggagcaatggaggaattggaagaccaacctcactagagatttgatcgataagtacaaagacgttgcttctgaacttcttacctatccacccgagtcatacgcaaagtggataaaccttgaagattggcaagggtttgttgccaagagattaaccgccgcatgggagacgacaactatgaggaaacaacaacaagaacgacaagcgatgaatatggtaaaaggagagttacttgatgatcatcaagagagaattgtaagtattttaacttcagttaaatttttgatgagttcaattaataatattgtatggagaatgattatatgtctactttgttttttttataatactttgaagcctaagatatcaacgttcaccaaatcagctagcattcaagaactgaaggagaggcttcaacaacaggaacaaaagttaaatgatttggccaagttacttaaataaagcgagttggtattatatattgtgctttaggtaatatatttatttatatatatatatatatatatattattttttttctaacaaaggattcttgttttaacataacttttagttagtttctgagattaataaatttaagaaaattagcagcaaagctattttttttaaagtaaatatagaaattttattaatttgtcaaattgcctaaatacaagactgtaactcaagagaaatatcacccctgttgagcactcgatttgaaaaagaacaggatgctctaacaagtctatgtgcaactatattagtttaataaaaaaataagaaaatattgtttaaagatgtaaaaaattacgacaatcttctataataactctaaaagaagaaagaatagtaatgaattttgaatagctttattgctaccaagtaatttgattccaatttcactttctgtcatagttgagaatagtaatgagttttgaatagcttgtattgctaccaagtaatttgattccagtttcactttttgccatagttaagtttaatccagcttagcgttttttttatactaattgctttagctaaattcaaaacgcctataatagtaaaattgttcaacttagtcatcactagttccccttgaaagtcttgagcgactatgccataactaaatacaacccgatcaaggaaaatggcgacattaagtctttactgcacattacgccggtaggtcctgatttataatgatcgagtaagtttgaaagcatagtgtcatagcgaagtatagttattcgagcgatccaccgagtagtaattttttttctacctaattggaccgtaagatcattctgaaatacccctaattagaagaggcatccaagatttaccgcacattgcgtcggtaggtcctgatctataacgatcgagtaagtttgaaagcatagcgtcatagagaggtacaattatttgagcgatctaccgagcagcaagtttctgctacctaataggatcgtaggattgtttcgaaataccccttaagtaggagaggcgtctaagatttgttgcacattgcgcctgtaagtcttgatctataacgatcgaataagtttgaaagcatagcatcatagcaatccaaatgtttatttaagcgatccaccaagtactaagtttttgctacctaatctataacgatcgagtaagtttgaaagcttagcgtcacagcaaagtacagtaatttgagcaatccatcgagtagcaagtttctgctacctaatcggattgtaggatcattctaaaataccccctaattaggagaggcatccaaagatttactacacattgtgccgttaggtcctgatctataacaatcgagtaagtttgaaaacataacgtcatagcaaagtacagttatttgagcgatccaccgagtagcaagtttctgctacctaatcggaccgtaagattattctgaaatacctcttaattagggtaggcgtccaaaatttactgctcattgcgccgataggtcttgatatataatgataaagtaagtttgaaagcatagcatcatagcgaagtacagttatttgagtgatctacctagactagcaagtttctactacctaatcagaccgtaggattgttctgaaatatcccctacttaggaaagacatccaagatttattgcacattacgccggtaggtcctagtctataatgatcaagtttgaaagcatcgcgtcatagcgatccaaatgtttatttatgcgatccaccgagtagcaagtttttgctacctaatcggatcgtaggatcgttctgaaataccctgcaattaggaaaggcgtccaagatttactacacattgcgccagtaggtcttgatctataatgatcaagtaagtttgaaagcatagcatcatagcgaagtttagttatttgagtgatctactgagtaacaagtttctaccacctaattggaccgtaggatcattctaaaatatcccctaattaggcatccaagatttactgcacattatgacggtaggttctgatctataatgattgagtaagtttgaaagtatagcgtcatagcaaagtatagttatttgagcgatctactgagtaacaattttttgctacctaataggaccgtagaattattttgaaataccccaaaaggagaggcatccaagatttactgcacattgcgtcggtaggtcctgatctataacgatcgagtaatttgaaagcatagtgtcataaagaggtacagttatttgagcgatccaccgagtagcttgtttttgctacctaataggaccgtaggattgttctaaaataccccctaattaggagaggcgtccaagatttactgtgaattgtaccggtagcacctgatctataatgatcgagtaaatttgaaagcatagcgtcatagcgatctaaaaattcagcgatccatcgaataataagtttgaaaattttaattttgatagaatttaaaa

SEQ ID NO: 220460 - DNA, 2881 bp, Cannabis indica
attttaaaattttcaatccaatccaatccgcgtaagtgcgaatattcgcattttgcagattggattgaattggaccgtacgaattggattggatcgaatagtttgtgaacacccctgcacaccactcacctccacagccttctgcttttcattatatactacttcgacacaatagaaaataaagaatgtataatctcaattacccttttgaatattgctcatattattcaacatgttcgagtccactacactttcgggtgtggtgtaacgtatagctagactagaagtagaaggggaccccatctttcacaagttttttttttcttttttatttgttttaaatatttgagagtcaagggacaatgataattccaaagccatattttaagaaaaagtatagtattatagtagttagataattagaattaaaataataatctacaatttaattaagatatttttttattagggatacaactatatttagaattaaagaatacgcatcaaataatctgctccacttacatcgtttgacaaaaatactaaaataatatcagatgaaaaaaattaaaacatcacaattaaccttaagaataactatattctgtttcatgtactatttcgaaaatataatagtaacaacggttgcataggttcattcaaactcataatttgagcacccaattattgtgtaaggtacgtaatttcaatattaatatttcgttcagttgcagagaacttgctattactaacaactttaaagtagggcttggggccatcgtctcgaataaggagggggtacggtgtgctcggctcggcagcatccccactctctgctattttcaagcctcaatggcggaagcagaactgccttactcaaaggcttgttcttatgccttcgtttaggctatacacatcttacagttttcttattgtctttgatttttgagaaatgaaaagaggtcattatattaagcgtgtttggtttgctcttttttctctagtatttttattgtaagattattaataatgatattgcctatttcttagccagacttactagatgaatcaaaggtttggttgccggattttttcttccgattttccaaagtgaatctttgtattgattttttcatctttgagccctatttaatagaaatatttattttcttttaaataaaataaaagtaaaaataaaaaaaataattacttgcaatttagttgttgactcatgagttagatttatgactagttggtttgcaatattggtttgtacgtgcagtattattatatatagaactatttaggtatgttatatggttcatcatagcactataaatatagcttcaaagtaacctttagatcacaacattttgagtagaagattgagagtaataatggatcaaaattcatcacatgaaaaagaaggttatagtactgaaagtaaacctcatgctgtatgcattccttatccaagtcaaagccacatcaaggcaatgcttaaatttgcaaagctacttcacagcaagggtttctacataacctttgtcaacactgagttcaaccataatcggttcctcaagaactcctccaccttttcctccatgccgaacttccggtttgaggcgattcccgatggccttccagtgtcagatcaagcacaagatgcaacacaggacattctttctcttagtgattccactagaaagaactttttgggcccattccttgagctcctcaaaaaacttgcaaaccaaaccaaaagtaatagtagcaaggatgatgttcctcctcgtgtgagttgcattattagtgatggagtcatgagttttgctattaaggcagctaaacagcttcgacttcctgtggttctgctcttcacagttgctgcatgcactgttatgggcctcgccaactaccgccctttacttgacaaaggaattgtaccactaaaaggtgatgagtctgaattttatatatagcatgtgaaaatctcaaaaacgtcttgataattctaatatatataattaagtttgatcaatatatggcttcttttttttatttatttattaatgacttttactttaattaatggagatggagatcttcggataatgtggaatttcaaagctacgaaaacctatcttgatttgtaataatatatatatttgttgtgtgtggcagatgagaatgagttaaatgattttctagacacaagtatggaatggattccgggaataaaaggtctccgatttcgagatctaccaacattttgtaggatcactgattccaatgatattatgtttaattggatgatagaggcaattgagatggcttcagaagcttcagctgttgttattcagacatttgaagcattggaaccacatgttttggatgttctttcttcaactacttcacttccaaaaatatatccaattggaccactccaacctctactcgatcactatccacaacattctctacacactgtcacctacagtctttggaaggaagaaactgagtgtataaaatggcttagtactcaaaagcctaactcagtcatttatgtcaattttggaagtattacggttctgacagagcaagaagttactgaaattggctggggtctcgcaaatagcaatgttcctttcctgtgggtgattaggccagacttaattgttggggaagctaagctaccatctgaaattgtggaccaaaccaaagagagaagcctcatcattagttgggctccacaggaggatgtgttaagccacccctccacaggaggatttttaacacattgtggttggaattcagtaatagagagcttgactagtggggtgcctatgatttgttacccatactttgctgaccaacaaac

SEQ ID NO: 220461 - DNA, 1501 bp, Cannabis indica
tgtggcagtctgagataaagcacgatactccgcttctgttgatgatcttgccacagccttttgttttttggagcaccaagtgactaggttccctcctaaataaacacagtatccggtagtcgatttcctgtcgtcgatggagccagcccaatcggcgtcactgaagcattcaatggaccattgttgtgctggtttgaagatgaggccttggccgatagtaccttttagatatcgcagtagtcttttacacacatgccagtggcgttgagttggtttgtgcataaattggctcaacttattaactgtgaatgcaatatcggggcgactgagtgtgaggtattgcaatccgccaataacacttcgataaaatgatggttggtcaaacggtttgctatcatcgatgcttaacttgacaccttgagagattggtgttgggcttgatttacactgcagcatattggttctttttagaagatcagtcgtgtatttggcttgggagagatgtattccataggcccctcgagtgatctcaaaaccgaggaagtagttgatggagccgagagttttgagagagaagaactgctgcagttgctgaatgatggagtgtactttaccggcgtgactgccagtgaggaggatgtcgtcgacatagaccagtaaatatagttcgactccggatgtacggtagtaaaagagagatggatcggagatggaatgttgaaacccaagggcgagaagtacttgtgtgagccggtcaaaccaagcacgcggagcttgacggaggccgtaaagggccttgtttagcttgcaaacgtggttaggatgagcggagtcgatgtagccaaggggttgtgacatatagacagtttcggagagggttccattaaggaaagcgttgtcaatgtcgacttgttggatgtcccacttgttggtggcagcaagggtaagtataacccggatggtggagcttttgacaacgggactaaatgtttcaaagaaatcgatcccgggttgttgttggaatcccttggcaacaagacgcgctttcaagcgttggaccgtgccatccgcatttaacttgatgcgaaagagccaccgattgtcgatgacgctcatgttgggagtccgaggaacaagagtccaagtgttgttccgtttaagagcaaaatattctgtatccatagcactcttccaccttggattttttaaagcagcagccacattgtttggttcaaattctgtcaaaaaggcaagaggtgaaggagagaaggcagtgaacacacgaggcttgtgaatgccggctttggcccgtgtgatcataggatgagagggatgtggtggggctggaggagggatggttgagtgactaggtgatgaagttgatatgttgggtgagatgggaggacaaacctgtggtgggagagttgggtaggatggagtagtgtatggtgtagagggactgttgggggacatgggctggtgtgatgtagtcaaaggagtc

SEQ ID NO: 220462 - DNA, 4259 bp, Cannabis indica
caggttattgagggaagcagcagtggcactccaagttcttgcagaagtgattcgatccaagaaatttcagatgcaacatgtgcaagtgcacgatactctgactcagtactcgatcttgagacgacggcttgttttttcgaggaccaagatacaagtgtttctccaaggtatacacagtaaccggcaactgatctacgatcatcaggacacgaggcccaatcagcatcagaaaaaccacttatgttcagtttgttgcagcagcttatatgaagaccttgtgtttttgttccttgcaagtatctcagtactctcttcacaccactccaatgtgtacttgtaggggtttgtaagaattggcttagcttgtttacggcgtaggcaatgtcgggtctcgtgtgacaaaggtactgcaatgcacctactgtactcctgtaagccgtgggattatgcatagcttcaccatcatttactgacattggtttcccagccgtgattggggtaggacacggcttcaatgtggtcatgttggttctcctcaagatgtcctctatgtattttgtttgtgtaagatagagccctgtgttgtctcgaaaaacctctatgccgagaaaatgatgtaatggaccaaggtccttcagagtaaaatgcttgtttagattgtcaataaaactcttcattttgtttggattatttcctgtcacaatgatatcatccacatatataagaaccaaaatgataatctgttcagacttgtagaaaaacaaagaggtgtcggctttagagttctgaaatttccagcttagcagtgtctgtttgagtttatcaaaccaagctcggggagcttgttttaaaccgtaaagtgacttgttcaacttacacacatagttttccttccctggttcctcaaaacctggtggttgcaccatgaaaacatcctcctcgaggactccgttaagaaaggcattatttatgtctaactgtctgatatcccaaccgcgtgaagtagcaagagtatagcactattcggacagtagatgccttaattacagggctaaaagtttcaccataatcaatgccgggtctttgatgaaaccccttagcaaccaagcgagctttaaatcgctgaaaactaccatcagcattccatttaattcgatatacccacttattgccaacaagattttgtaacagagaaggagggacaagaatccatgtattattggcttttaaagcagctatttcactgtccatagctgcagaccagccaggatgtcaaaatgcttcttcaagattttgaggttcggttaaatctggcattttagtgctgctgagaaatgttttaggcttgaaaattcctgatttggctctagtgatcatggggtgagagatgggcaaaggttggtctagtgatgtatatggtggtgaggtatcgggttggtcttgttcatggccagaggcaaaatcaagtaactcattggtagcaggaagagtgttttcttcatgacctgaactataaggagacacaacatttggagaatgataagagtgagaggagtgagttgatacctggggagaaccatgagcagaaggagagtccatatcagggagtgctgtcgagctggcagaatggcgagaagatgatggagttggagctgtttgaggagacaaaaagggtaagacagaccatgttgaactgtgaacaactacgggttgtggatttttgtagttgttaagaaaacctgtgtgaaagggaaattctaattcattaaaaacaacatttctagagatgtaaatcctgccatttgagcttaaacacttgtatcctttgtgagaatcactatatcccaaattgacacacttcaaggaatggaattgaaatttatgtgaccggtatggccttatgcaagggaaacacgatgaaccaaaggtttttaagaagttgtaatcaggttgttttccatatatgacttcatatggtgatttgttaccaagtacagctgtaggtaatctattaattagatacacggctgtagcaaaagcatcacaccagtattttaagggcattcccgcttgagccaagagggtaagaaccatttcaacaatatggcgatgttttctctcagctctcccattttggggagaagtgtgaggacaaggatgattaaactcaatgccttgagagcgaaccaaagagacaaagggctgatattcaccaccactatcagaccttagactcttgattttcctttcgaatttattttcaaccaaagctttaaagtgaacaaaggcatcaagtgcatcagacttaaattttagaggatacagccatgtgaaacggctgtgatcatctaaaaaatgaatgtaaaatctgtgattaacattagaagaaatgggagccggaccccacaaatcagtgtgtatgagatccaagacagatttagcacgattttgagacaatttatatggcagagagtgagcttttccaaattggcaagcatcacagaaactttgcatttcattcttagaaagttttacattagttgactctaaaacttgatttaaaacacgagacgatggatggcctaacctcctatgccaaacatcaattttggaaagaaaagacttgtcagattgtgactgattaacatgtttctcagccacatctgttacattagacagaagacacaaatttgacacactactagcagacttggatttggtaaaacttaacacattcgattgaccttgtggttgaattagttgatatagcccatctctaagcactccttgaagaagaactctccttgtttgcttgtccttcaccaaacaatgattggaataaaactcaattagtatatcattatcttgggtaagtttagagacactaattaagtttttggcaatttgtgggacatgtagcatttctttcagcagtaaaatatcaccagatttagtatgtaaataaccactaccaacatgagcaattttgagcttgttaccattgcccacagtgacagaatccttaccaccatagtcttgtttttggttcagatttgaagcctcggaggtgatgtgattgcttgcaccactgtccgcaaaccaagcatcactgtccacgatttcaggggttgcaaggaatgcattgtggttgttgctgttgcctggtttgttgtttccttgagcatttggatcggttcccatgaagttttcgtcaaatctgttgtagcaaacagccgcggagtgcccgtatttgccacagacttggcaagtgggtcgtggtccactagatcttcctcgtcctctagttcttccagtgtttccacgatttcccgagaacctaccaccacctccatagctttgattctgagagtgatagccaccacggcctcttccagcagtaggagtgtttccagagtttcctttggaggccatgttagcttgaggaggtgtgtgtcctgctttggttccagtcgagagagtttgaagcctctcaatcttgctatcgaagctaagcaagatatcttgcagctcttgccaagttgtactggttctggcctcgatttggacaacgattgacagatattcagcatctaaacctgaaagaacattagcaacaaggtgagtttcaggatatggatctccggcaagggctaagacatctgcccagttcttcttttgtctgaggtattctcccattggtgttgatcccttcctgacagtttggatcaaagtccttgtatcatccatcttggacttagagtaggctccatataagctttctagagcataccacagttcagcagctgaagtggatcccattacttcagttgctatgccttcgatcattgaactgtacaaccatcccatgagcaactgatcgttgatgatccagttttcgaactcagggtttgtctgaacttcactcttcgtcacttctccttctgcagccgtctcgactgtaatgaactcaaggggaaggtgaccatggagtctatgacctcggacaatggtggagaccatggtcttccacagggtatagttgtttcgatctagttttagtgagaagggttgatttagggtggtaatgagaggttggttgactcgagaggcagaggcatccgtgtttgtgccgtatactgcagaagcatttcctgtgcttgcagcaggagcaggggagttgtttccagtagggttttcaggtgtagccatggcgagggccttgtagctctgataccaacttaaattttagagtagtaaag

SEQ ID NO: 220463 - DNA, 1585 bp, Cannabis indica
gtggaacaactaaaaaaaatcgtaaaataacagtgaaaacttaacacagtacataatataaaacttacacagtgattttgaaaaaaaatacagtacttttgaaaaaaattctgccccacacaataaaattgtcaaaaaattgaaaatttctatatgtggtgtaaaaacccctaataattaaagttgtgtgggaaaaaatctatttaaaatattataaactcctagctctgtctctgctgtatacttggcaaattactcatattgcaactacgaaaaagaggagaaatggtcatctaataagtggggttattgggcttttttttttccttcttggaaagggagtggttggttgggccttgttgcaacctaaacttggaggttggtgacattttctagttactactttgtacttactactatacagggcctaagggataaatagacgaaaaatgttgtattgacataattatatattagaataataacataatttttttttagtaaaatttacatttttaagtttaaagattttttttatataaaatttacacaatactaaaaaaaaaaaaaaaaaaaaaaaaaataacatataaataaacaaaaaattaataagagtacaacaataaaaaaaaaaaaaaaatcaaaagaatcgtattttctgtaaataaaattataaaaatatttaaaattttgtacaactgttttttttataataatttttcttattatttttgtatatttgtgaaataatcccttatatatttgataaaaaattgcaattttaaatttattcgttggatctcattttgacaatattgctatattacaatggaaggactactttctttatacaataaaatttgtatctaagaatagatttgatatcaaacaaattatattctaattgagaaaagttataattagatagagttacaccagaaaaaataaatttaaactcaaaaaggtttaaatgtagcaacaataatttttttttataaaagtatactttcaaaatacgggacttaaaacaagaataatttaaaaaacaaaaacaacaaaaaaaaattacaaaaataaagtatgtacggaattttcattatttttacaatttttttggtgtatttttatgttgtattcttgttattttattgttaatttttgttatttgtgaattattttttttatgtgttttggatgtttgttgttattttgttgtattttgttgttacttttatatgattttcttgttttttttgtagaatactgtaaaaatataagaaaaaaaatttctgaacgcaaaacagtaaagttttttacaaaaattggtgtctcatgtaattatccccttaaaaaaatgtataataaattacaatttagagcttattcttatttataactagcccaaattgagagttaatttttgaggaaattacactctataccctttttatattgccctcttttatttttaccctcttttttaaagtctatcatttttacctctttttttaaatattgtaccaattttgcccctgtcacttcaagatactctccatgtgactctctgttagggtattttgggtac

SEQ ID NO: 220464 - DNA, 1696 bp, Cannabis indica
gttttatgaggcattcttaattgaggtaataaatttatgcatggatttagttgtgcatgtacttagtgtagatgttaaactgacttagatgaatgattttctattatttttattggtgtattaaactttgattgttgttaatgaagtatattttttcaaataaaatagttaaaactatgaagttctaatcttacatcctaaaaaatgacattttcaaatgggcataaagttgttgtatttttgtaaaaaaaataaatataattttcacccatcaaacaaactgtgaaattatagagttttaatcctcctttgtgaaaggaaaaaaaaaagtaatgtagtaattattgaaaatatgacttttcttttgtattctttcatttttttaaaagagaaatatgctaaaaggcaccagtggtacctagcactcccctatgtgtcaatatcgctattagtccaactaagtcaaaattatatactaacgtgactatgagtcacaaacagtgacacttaggatttttgctatgttggagcataattatcatataaaaaaaatattagttatcctatctattttaaagaaaaactataatcacctttaataagtttattttagttgcaggacgtttttactattattatattaaaaaaattaacgaaaattcagctcaaatgtgttattttgtaccttttagaaaataaagggtctgaattgttattaacaaaataaaaacttcaatcaataacttttacaaaacacaagatctaatatggtatttgcacaataccaaaactcttatttggcaataaaagtattaaaaacattattttatttttttttcaatactataattaccccaacatttcttacattcgatcgagaaatttacagttaaaataacttaaattttgtttacttatagataaatactaaaatattttattttttgtggtaaaaatacgaagatgttaaaattatttttgttttgccattttgaattttatagtgattttatattaaaaaagctaaaatatattttaaaatataaaagtaatatatattttataacacatctaagtttgaaatatatatattacatatgaacttatttaaatttaattatttgaatattaaaaactaataataataataaataagttaaaaaaaaaaaaaaaaaaaaaaaatcagtgtgaagaatcgaccaaacaaagaaaattattacactgggttaaaaaaaattattttttaattaaacaagttataattagatatttgcaagtatttttttttaaaaaaaaaaaaagcgtatttcattaatagaataagttaaacctcacagtcattacataataagtttaacataatggtaaatagcggaatatcactaaataacttgtgggtaattgcccatttagccacattatgggcaacaaaattacaagttttggtaatatgagagaaaatacaactcaaaaataaagaagagtgactattacaaaaagagacatagttttcaataacctaatgagactccttcccattgagagtattgatgactaccctcgagtcgctcttcacgatgacaaacttggcatcaaaatccaaagcaacagaattagccaaacagcacgccgccggtttcccacaaagagcatcagaaaagttaagacaagttgtatgaactcgaaccacctcgcc

SEQ ID NO: 220465 - DNA, 4375 bp, Cannabis indica
taaaaggcagtaaaatggtattttgggaaattctaaattcccgacctatcccgaaattctcaatgtctaaataaaccgtcccactgtactaaaatactaaattgtgattttactgaaccatacaccgttccatgttgccgggcactgaaaatgtaaaattatgaaatttcactatatgacataaaaaatgcattcgaaattcaaatataacaacagaaataattatttaaatatctataaataattttcataattaaaccttaattatctgctaatttcccaattaaactaagcggtctttacatggcgtatgagaaaagtcaacatctgcaagcacccatgagggttgacgttcgctttaggctttcctagtgcatatttgaggtgcccctcaaaacaagtctccctacgagacccttctgggtctgggagggacatttcttataccgctctacggaagcaagtgctgaggcaaataggcttttgcatatctctttaacctggatgattctcgacggggggagacctttcagtgactgagcatctttaagggactctaaatcataaagcattaatcgagccttttccattgaaatccacgtgtcaggtcgtgcatgaaacgagataatatttagccctaagctttcaagatgcaatgcggtccggaagcttgcagcccctctcaaattttttgtgatcatggcacgtgggggtatctgagattgcttcatattccaagacttgacgccaattaatgagtcactggccataggcattattagcatggcatgtgggtagtatcttaaatgcaattgttggcattatatgagcgtgcgggtgtgtttctcgagtggggttacagtgacagttaagtgattgagatgacccttcttttaatgagggcattactcgaggcatgtaatgatgaacgttaagtataagggcttaaaattaaatgctaactcatcaactccccgactgttagattagagaatacttcttaaataaaaaataattagagccattcattttaaacagtaaaggcttcaaccagtgtataagctagtttcaagagttcgctcatcttcttttcaacaacttcaacctttgaaagtctttctgctttctttgaactaaagcttagaagtcttgatacactctaccccaaattcgatggagacttcgattgtcgaaccttccacgactgggcaataggggaagcattgcatacctgggcctgtcagcatgatattcttctctaacccgtcccactatccagtaagtatctcaatgccctattgacttttatgcaacttcatgtctaagatagaaatgtttagttgaagctgggtttgatacgtaatatatattggatttattgaacactttttcatagaaacacattattaggattgaactgcgtgtgaatttctgtatcttgatcatgtcagcctcattcaaatgggttgagcacggtcatgctatatttttgaacatgctctcatacttgcatggcttcgagattgggattggataaccgtcatactggtctattcctttcatttttggacaagggtacatcaaaggtggatccttttgggagggatacctgatccttttgcatgcacccatttaggagtttgtttttgtttgtcaagtaaacttcccgtccttaaaactttgaattagttcatccatcctgtgctgattatgcttgcaggtacctctcaaagtcaaaatgctaggccctgtgaaggagagcgattcgacaagtttctgaaatggaggtgattccttgggaaagaggaaaaggtaggatatcgatcctcaacgagccaataatcctaccccatttaatctgtcaccatctactcaacaactacactagcaataccaatggtagcaccaataaccataaaagctttagcaccaaccatttcaaccacaatgccaacagcctacctccctgcccaaaatcccttttgtaggcttcaaattccatacaagggttattcccttggattttactactatgcagaggacaagggaggtcgaacatgccctaaggaggcggcactagaaagaaaggaggattttgtgagtgcaagcgagcaagctttctactgtgaagagggtgaaacctctgaaggcctatatgccattgttccccctgggccaatggtggagatcaaggctttagaaaagcagatggcacctaaggtggggagagaaactgcattctttgcagccgaactttttgaccaggtggccagcagtgcatccatgttacccttggagacatgggtgacttgcagtagcactcatgtgttcacccttgcccacactgctaaaaaacaagtagtgggggtaaactttgacctttatgttctttttctcactgttgtgtacttgtatttttatttcctcaagttttgttcatgggttaggcagccttgatggaaaagagggttgttaatgaagtaggcgcccttgtcacagaactcgggcaggcaaaatccaaaaatcaacaactgcatggggccaacaagggtctggtggatcaaaacaaagttttaaggagagatctcaaagacctaaataaggaaaaagagttcttggaggtcaactatggccagcaagctcttctcctacaaggcgttcacataatcaatggtcattgaaaggaaaccatagagagattgcgtaggggaactcacttcagtcgtccagcaacactcaaaggtttagggcttaagtagtcttttgaggcaatgaactccttcagacccttcttcactcattcttccttctttttgctttatctttgattttgcgaaaataattttactaatgccctaactacggggacatttataatatcctcacagtattcatttggcttttatgcttactttatttccaaccttagtgcttgcttcttactcgatagattaacttttaggatttggtgaagtgtttggttccaacgaccaacacttcagtgactgctttgttgaaccctttaaagcatacaatactatgtgttctttcccagagggattgcaaactgcattcccaaattgctacaggagttatagagcttactccccatttgtgattcttccagttaattacctcagacaggatattacagcaagtttctattttttggattagtgagagaaggaggaccaagtgtgcgacaaagccctagccaggttctttttagggagacatggttgtgtttgtgttgatgttcaaaccatccttccttgatccaaggtgacaaggctgattcatcattcaaatagattttcctgagttcgtgatgagagagctgctggaccatggagggcttccaggcatgcttctattttcccacttccagcgagaaaaattgtcagtgttgtcaacagactagggagactgtaacagtgttcgagtagtgttcccttctcaaggagcacatttgaaaatgcattggctatgccttttgtgagaaccaaattggacatgcaacatgtttcaagcggttcctccttctaggaaggagggttaaagacatgctaaaatccaaactatggcttctctcccaagactaaaggtgaaaactaaattggtcatgcaatatacttcaagaggttcctccttccaggaacgagggttgaagacgtactagaatccaaataacattttgaccgacaggtggccatttttacaaaataaaattcaaagtatgcataattacaaaagcaattaagacatgaatataaaagcaatgagtagggcactcgtacgttttttaggatagttaagtacgaccccaagtgatctaggaagtttagacgtctccaaattcatgatcacttatttaaaacatagcttgtgcgggaaacaaatgcgtgaattcttgtgcgaattttttctttttcattttattgttcccaccgttttacattaaaaagaaagtttacaaaaatgtcacatataattgtagaggaacatcagaaccagatacccccaacctattgataataacaacataaatggtatgcatttcaggccctaggaatctttgatccatccattctcttaagttgaaatgttccctctcctataaagtcactcaatccagaatattccactacgaagtcagttagggcttgagctttgattgaaatgctcgactgatattggatgtcgaactggctaagttccatttcccacttaaacagcctaccggatgcctatgacttttgatgtaatgatcgctttagtaatttggattagtaaaggcaattagcactaatttctgttattttataattatttatgaatttattttattgtggactccaatatttagaaataaata

SEQ ID NO: 220466 - DNA, 2684 bp, Cannabis indica
tctctgccttttttcctattgaacgagtggactatttcctgagcgatcacattattatcctatatattcctcctgggcacaaaggcggcttgggtgggacagataagctttggtaacagtggtttgatcctgttagcaatgatcttggagataaccttatacaccacattgcaaagagagatcggacgaaagtgattaggtctcttcgagttctggactttgggaattaggacaatattagtagcattgactcctttatgaatacgcccagtttggaagaagtctaaaaccgcttcgcagaagtcactctcaactgattcccaatagtgtttacagaaaagaacagacattccatctggtctcggagctttggtactactcatggcaaaaagagtagccctaatttcctcaagggagggccttctaataagctcagcttggtcgtccgttgacaaacaatcccggactaaatcgttacaattaagatcgattccattctccgtaccagagaaaattccttggaagaactccatgaattcattcccaataagctcccttttggtgatccacatattgtctttattgaggatgctctcaatggcatttcttctacctttgatacaggcggaaaggaagaagaatttagaacatttgtccccttccttcagccaagaaaccctagccctttgtttctaatacacctctttcctcacccgggcctcatttagagaatttcgcaaggctctttcagtcgcccactctctagatcccactagcaaactctgaatgagatctagtcttcattccagatcacggattaatgtatcaagttttccaaactgtgacctattccaatgcataagagcaaccccagtagctccaatcttcttgaagatcctagccggggcccaggggaaactaaccgacttccacgcagaatcaaccactaatctgctatgctcatccctagtccaggcttcctcaaacataaagcttcttctcattttctcccccagaccatcagaaaatagacacaacggacagtgatccaagttggaggtctggaaagagcagaggacagccttcgggaaatgtctaacccaagcaccattaattagacctttgtccagcgcagacttaacatggttggacccagaacgatggttatcccaggtcaacatgtctccctggatgggcatagtaataagacccctggcattaaccaaacttgagatgattggaataaactggtctctgcctttggaccctactcgttcagaatcacttagtacaaagtcggtgtcacccaagacaagccacgggctaccaaacctatcccctatcttcatgatcttctcccaaaaagtttttttagcatgaaaatacgggggaccataaacacaggacaggagccaaggatgcgactggggatccgaaaacacaataccagagatgtggttttgggagcaagcaatacactcaaactcaaacccaattttccaagctaagataataccacccgcaataccaacagctagaacaataatatgaaaataaaaatgaagggagtgaagagtacataccaaagaagtagcatcaactttgagctcggtcataaaaataaaatctggagagcgcgactgaatcagggacttcaactcacgaactgtagaggtctgccctaaccctctacagttccaagcaatacctctcatggctcctgcggaggagtagtagtctcctccacaggggtatgagaatgggcagacccaaaagatccagactcctccacaacgaaagtgcgctccattggcctagatgagatcacattcttccctttagtactccactgatccgggccaatgaagtcgttattggataaagagatatcctttgagggctcgtcctctgcaacattagtagcattagctctttcctccgagtcccaggggaagtctcgaatagcccagggatgtgggcgaagaagcttccagggtcgtgaacaaagggatgcagaggccccatcaaactttcgttttttgagcggagaagttcttgcattagtctcagaagtaggtggaagtctaatgtcaccccaaatggctttaatctcctgtaagtccaaacttccaaaattcttgagctcttgtaaaagattatcttgagcttgaaaaaaattagacaaagctaatttttcatcatggtgaaaattaacctcttaaccacaaatagagctctcattggaaatagtcttggctggcccatcacccaaaataccattattaatgttactttcaactaggcccttttcattagcaatcggcccattagaatcaagtgggcccacgaccagaccaatttccctctcgcccagctgcttcatcaaaagaggggtggtcccacatgctgaaggagagatctcaggaagctcatttggcccgtttctcttacacgattcactattattattgaacaccttgctgtttatattagtaattggaaccggcccagtagaagaaagagccggcccaatatcaaccccatgaagctcatctccatcacccaacacgttaaccaaggtcaatggttggtcaacaatattcaaattaagtttaggatcggcctggcacccctttttcaactcatcttctccaacaccacccttattacccagaatagcaaaa

SEQ ID NO: 220467 - DNA, 1631 bp, Cannabis indica
atttttaattgtatcactttaaaataacatagaaaaagactagcataaaatttagtatacatgactcgtatgtagctttttttttagtatagctatatatattgaggtaattgtaattaactttaaaacaagagaaagactacaaacagtattccagttacaaagctaatgaagagaattaaactcttcaaactaattcttatctaatcgcaatgcatctctagtataattatgggtacttccattatcattctcggaatattataaagaggtactactaatatatattgtttgttctaaattaatatatattttaataactgttataaacattcatcatctcatattgaatggtttctaatagcgatactgtttgataaatgacttagaaaaaaaatattgttagataaatgttattggcaatgtaaaatatataggtattgactagctcttttatcggcagtggtggacctagaatttaaagtgaggggtgcgtaattttttttttttgtaaaaggagggagggcataaataaatttaaaaataaaaatataaagtgtagttagtgggatttgaatttttaccctctaacatattagcatctaccttaaccattacaccaagcttactattatatctataaatttaattttttaatacaaatatatgttgtaattaattaaaatgcatatacatttttttccgatttttttttcggggaagacgactgcccccctcgctacaatgtgggtccgcccctgtttatgggttaatgtcatttaggctactatgttctgttaattagtttcgactatttaaaaacaaattagacattgtatttgttaaaaaaaaaacgtaaatagaattctgatagttatttcattgcaaatatatttttttaatatttctaaaatgctctagtttgaattaagttaataaatttgtaaggttttgatagtctctggtcatcgctccaatattgagttacatttgaaagagacaaacatgttcgttgatgttggctacatatgttaagcataacaaacattttattcttaagggtaattgtattttgattggcaatttttgatgcggttagacatgtgatgagtacacatttgttgacttattcttaattatattaatgaattatattgatttcttaaaatttgtatagtttgatgtgttttctctaagtgtgtaggtttgtgtttaaaagataattttgtgatggactgagatctttaagccaatttttgacaatattatcattttctcaaagagcttatgaaactcaaaatgatagaactcgttcccagtttttgaaaacatgttaagttatctcatttggagtccggatgcgaaagttatgcatgatttaatgagcaaggtcgaagcagtaaaagagcgacgaaaaatgacatgtggcactatagcgtcgctcctgaaaaaaagataaaccaaagaaaaaaaaaagataattttagcacgtgggtgatatcgggaaatcatgtatggcgctatagcgttgtgtctttggcactatagcgtcatacgtatatttttgaatttaaatcctaattctaaatggattctgtttagtgagatttctgaaaactaaataaatatag

SEQ ID NO: 220468 - DNA, 1932 bp, Cannabis indica
tggctaaaattgactttagatgaaaatcatcaatttttgaagcatgaatcgtgtctgttggattattttcaagtaatctgtgaaaacaatcgcacttgacttgaggacaaatttttgatagaattttgatatgattatgagacatgaattaggagcttaaaaatttctttcaaatataagttgaatcgcgttaattggataaatattgagtaagttatgaccattttactaaaggtagttcagcaactaatagccaggttgacacttagcacccaggttgacatcttgcgcccgggttgacatcttgcactaggttgacattctgatgttaacttggtgactgtgtaagtggaaaaacgtgttggacttctatttttttatgccttagtgatatattaagattacttagtttatttctttcttcaatctggtgaattctttcactagttctcagtgatgttacttttctgcaaaatcgggtagccttaaaacattcgatttgtggctaatttgctcatattctactttgtaaaaaaggtgaaatataatttttttgaattttacttgtcaatagtcgtagttgtcgtttactatggaaaaatagtcaaatggtcgagacaaaactgcaatcagataagcatacagggcaccaggctatatgtcaacttgggcgttgggtgctcctcgggaagcttcctgatgctcattttgatacttctatggaattctagattgcgaacgaggtctcctacccaattttaaccaaaataaaaagaatgtccatagtagaatttgtgtttgaagagcagaaatatgcgaattaggttgtatgtcaacctgcacacagggcccatcaaccacgtcaacctaggcgttggggccctgttttagccctcatatgttcttgtttgcttctcgagaactcgtgtatctttgttgtttttgaaaacaaaaaagttccttgaacacttttcagaaaaaaatacttggaactagcctaggttgagaaaacgtaaacttgggcgttgggaccaggcaccaggtcaacctaggctctaggtcccagttttgacaaccagatgcttctgtttgattctcaaaaatacttgtgtcttaatttgtgatgaaaacggtgaatattcctggaagagttctcacgaaaaatgtttggaaatggcctaggttaataatatgtcaacttaggtgctaggtctcagttttgatccccatatgactccatttgtttcccaaaagtgccagtgtcttagttgttgatgaaaacacggagtatgtctagaagaattcttctgaaaatggcccagggacaatatgtcaacctggacgctaggatctagtaccaagtcaacttgggcgcagtgtcccagttttggcctccatgtctaacattttcttttctgaaagcacttgtttcctcattttagatgaagacaaataaaattctcagcatacatcttgagtgaggtggttggaagctccccagattgacaacatgtcaacttgagcactaggtgcattaccaggtgacctaggcactaggtgcctatgtgctctaaatgggttgtgttctgattctgatcgagtgcctctaacatgttcgtaacaggtgttattcatatctaagtacaaagtttgagccatttgcactaagacaggcctgaaaactaaaaccctagctaggatttcaacctgggggctaggtgaaaccctaggggcgcccaggttgacttttatgaggccgtttcaaccctttttcaattctcaagcttcaaacttggattcttcttgacttcttagttcagaatactcaaggttggtgagtcagaaacaatttggctggatccaaacacccattttggagttcctagagtcaactttggcgtagggctagggaccctcccaggtcgactgcta

SEQ ID NO: 220469 - DNA, 4881 bp, Cannabis indica
ttgtagcataaaatgtcaaatttcccttttaattatactttttcccgaactttttctttttattttactattcataactacccaaggaaaaaataaaaaataaaaaaaccttgaatatgctcttttgtttatggaacctacattcggagtaatacacataaaataatggtcgcgaaaacgtaaggacgcagaaaaatgcctattaaaagttaaaataaagttatccacaatgtcaaatgataataaggtgtgtcatatatgaggatattgttgattatggttacaagttttatcttacggaaagttagttgttacttcagaaagaagttacaggaagcttggtgttcatctagaaagctttgttcgtaaagttgtggtcgaatccagatggttcttttagataacttgtccttcgtaaggatagactttctggatatcttgtcatcagtctgaagacatatttccagatagcatgttgtcagtctcgaactcccgcccgaagggagtgcttgtattcatctgcatagtctcatctagattgactcttctagattaattatttgtactaaaagcgcatttctgaagctagtgtggaatatgttgttggccctgacttggagagaatttaaggtggcattaagtagcaacggtagaatcgaagctaattttggcaataatgataatctataaatagttatcacctttgtaatccattggagaattagacaattaaacaacttcagtaaaaattgtgattgtgcaaggttagagtgtgacccttaaaatagggaagttgttaatattttccctctatttttgtgggttgttaaggcccaatttgtggtctggcttgttgtccacgtatgaaagctacacaccaaaatcatgtcaggccaaaggctggttgtccatgcacctacagagtgcaggctagctgaccatgtgatgtccagaagttggtcagcttatgctggccatagggcctgcaaggggtggccagccagcccccttgaggtggctactttgtcacttcgtcatcctgcccgagtacttggacctctcgttggttaaagtactgagtagatggcttggcctttttattggcgagttgtactcccacgtggcactgatgttggccacgtaggcatgccacgttaggtggcctaaaatagggataacatttcccccaagtcccagtgcaaacatctatgcggatagggacttttcaacttagttgggactggtgtagccttaactggaaaaatcttgcagcatatttagcctttgaaatatttgttattgactttctgatcaccttcttagcagtacgttaaccgcatttttatttgcatgctctttagttacacactgcatggcaagtaaaaacgaggtcccacaggagatatataagcttatgggagggaaaccactcttcacttccacatttcaatctctctctagaaaaagttactattgaaagatcctccttctctctagaagccaacgcccataatgcttcaactcttgggatttttacaccattttaaggattcaagcttcccatcttctccatcaaatgtttctagtagtgggtaagctttctaatcccattattcacttgtttagttaattttgccatggttgtatgaagcttttcttcgctttgaatattttctgattctcacgttaaattgtaatctttttggtattttgatcatcatgctagtcttaggatgtataatgtgtgatttcctgatgaaaaatatctgattttgaccttcattgtgattcttgactctttgagtcacgaagaacatgaagaacgtgtttgagtttttgaaaaacacacatttagatctaaaacacacactggtcgcccataagggtcctgttcaagacatggccgaccatgggtctttctcatggaagttggccagccatagggggtaccccaaaagtttgtcagccaatgcctaagcttagggtccctggccggcccttggctgggtcatggaaccttggtcggccctctctaagcttgggaaccttggccagcgaaggccaaggttccaagcggggggccaagtttttgtccttttttgacctcagcaagggttttgtgaaggcattgtaggcatatacaactgtaatctcatacgtggctcccttgggaactttgtataggacttgatggtgagtctattatagtcaaatgtacaacttaagacttgccatttatctaagtaggtatacttgagacgatacttcgttgatacccaagtacccttgggtacaattggccagagttctgtctgttaaactttgagaatttaggaaaaaaaaacaatatcatcagtcatctactcaatacttcagctgacgggaggtccgagtacccacccctaaccgaccctatggctagcagacattgtagggctgaccagaccaacctacacttggcaggtgcatggccgaccatcctgtacctggcaagcctttggtgcatagccttcatccggggatagcaagctaagttgtaatttgggcttcaacaactcatgaaaataggggaaaatatcagttacttccctatttttgagggataattaacccattaaatgtttattatttaattatgtaaataaggatttattttcctattttaaaggatattagtggttaatcttaatgtaagctctactatataagaaacactagcctaaccctaattctctaagttctaagtctctaagctctcaagctctacgtttgaaactcaaactccctcttctcttctctctcacatgccttatgcactctctctcacttgagattcgctaacttgattctcaaattgtaatcttaagagagccactccagattccacaacccttgtaatttgagtggtattgtctttggtattaatacaactaaaaggggagtagatcattactcactaactaagggggtcgaacctctataaaatcttgtgtctcttttaattttttgttcttattgtgtaacacgtggaaatcaacagtaataaatacgactctgatgtcggttggccaaatctgaggtcaacaactggttctccaacacgtggctgtttaggctttctttcttctacaactagaactacatcagatttttcatattgtaaggctcaggcatacttttctccagcttttcttgagtctctagcaaggtggggacctccaatgataacctgaagatgttcgtccgctggtagaggcattaactgattctgggtgttatctgtttgggcgaccctttgttcttggttggtcttgacatatttttgtaagtgtgtattatttttcctaatgagaaagtctatttctcacttcaagttattgcattcatttgtgtcgtgatcgtagtcttcatgaaaatgacataacttggtggtgtcctgtttgcgcatgtccttctcatgggagaggttttttctgtatggcaccataaactaggtggttgcatagattgtttctatgtcttctattaggatagtaaatgcagtgaacttagaggcattttctcgaggatgttgttcggagttgtcacctaacatgcctttctttccatttccctgcctgttgccattgtttgacctctttccacctttgtttgaactattgtgattttgggaattctggtctagctcaatggatgtattggctgcattggtgtgttgttgagttttcttttgtctaactatatccacgcgtcgtactgcttctttgagctttataaatccatctactcggtccaagaattctgccattcatcccacagtcagcctttttatgtttttccactactacaaaattgagttttagtgacaccttttagtgacacacacaaaagtgtgggtcactaaaaaatcaggtataagtttcagtgacacacacaaaatgtctccgaaatttcaatgttagtgtctcacaatctgagtcactaaatatatgaggtgtcactaaagagtaatttttataatgttatattattttctttaaaaaaaataatattaaactatagtgacgtgaaaagtgcgattggataaatatttccaaacacgctaggagtgtcactatatcataacaattaaaaacaaaatcagagcgtcactatatatatcagcacaattaatatatatgaaaaataaatgaattttaagaataaaaaaataataaaagatataaaaggacttttttttaaaaggtatataagggttatttagaaaccctaatttctctatcttatttttctcttccgcctcttcttcttctctctttaatatattgcattcatctcatagctaggccggacgggcgtctccggcgttgtaatgccgaaacagccaccaccagtagacgtagcacccgccgaaacactgttcctttcttggttgttcgtgttctgccctctgcgaagccagacggaacctctcgtctccctctactccatcgacgacttctcagcctccaaatgcctatggtctcctttcctctcccttaatatatttttttgggttaaaatctctccccctatctttgattttttcaagtgtattgtgtttgaaggtctttgtggatctagttgttcgaacttcgtctgtggtctatggtggtggggtttgttgttttcgtcgtttgaaggctctggttcctggtttacggtggcaggtttcatgggtctcgatgtttgaatgtcgacgagtctgggctcgtggtctatggtggtcgcgtttgtaattttttttggttcagatttttaattttttttctagatgtgttagatttgtatttaactgatctggaatttttgtgcatgtataagttgaactttgttataaaa

SEQ ID NO: 220470 - DNA, 2136 bp, Cannabis indica
atcttaattccaaatgacctcttaaatcttataactaataatatactttattttataataaaagttacaactttccccaattgaatgggtgagtaggttggtaccatcaaatctaaagttgaatatatttatttatatccaattattacaataccatctaatactatagttatttatcttattttatacaacattatgtatcaccaaattggcattttccaactatgacgagtcatccacgatgatacaaaagaggtaacatatcttaatgatatttcttctttttatgatctaaatatgtagtggtgcattattggtgttcattgattcatatgtatatatgactatgaagttattttctcccatttaatgggttcttgtttctaataacatgggaagttgaatctagctgtttgtcagtgagtaaaacagtaccaattcaattgacacatcatcattattattattattattattttaaatgaataaatcaatttggtacactagactagtatagtaacgtaagaaagaaagagtaatcaattttgaagataaaagtgtcaaatgtgtagaaattaataattgtcataattttgtggtaagtgtactattctcatatatctctatcttcttaaatgtcatgttatttgaaatcattcaatatttataaattatatgtgtgtgagtagatagatataattagatattgttgtcataactttatttttctttttgtattttattatggaatattcaatgcatatataaaataaagatatattaatcattcattacgtacgtactctaattctaaaatgttacagaactaatccacttatgtcatatatataaatccattttgtatatatgtatgctatcatcattcattggatcacagtagaatacagaaaagtctttacatttttagtccattcaaaactggttttagtcttctagagatgaaggaggaaatttaaactattttatttatttattttgaaaggggaggaattttcttcaaggttgaggcaaaagaaattttttattgtaattattaatataatttcattcttctaattagatattatgttatatatattaattaattatttgaagtagcatgaggtattaggtatgaggtaatgttttaataagaatagtaaaatcttttacgactatgtttggtatgagatttttctattgttatggaaatacgattaatctcttgtgaggttaatcttaaatactttcaaaaatgtgggttttaaatttcaccttcaatcttaatacaatgaattaaatatattaatattttaaattgtagattcttgcgttcaaccaaaacaatgcaatttaattaatagttatctaactattgcataactaaataccattataagtttctagacaattatattttttgttttattattttaattaatcaaattattttgaacaaatctcatatcaaatactcatgtaatgtaatgctggaaggtggactatcttgaatcactgttttaatttgtatgaaaacatcatataaatattgatttagaaactagaaattgaaagaatgattatacatgatcgataagaatgtagtagtccttgtcgtcggttgcattataaatgctaggttttaaattaaaaccatataggtgaacaataattaataagacttttgtggatgaatttgaagaattagtaacacaacataatatatctaacctatgtgaggaaattgtgacaaccaataatgacccattaatgattcgtttatagaagattaaaatcaaataatagataggaagagaagaaaaaaaagtcaagaatttaaaatttatacaaaaacttataaatctctacatgtgaatctatctttcccaataaaaaataaaataaaattcttattcagaatatgctttgaagttaagcaaaaaaaaaaattgacaagcttaaatcaaaattaaaatagaaatgaatattagcgtgtaaatctgattatatttttatttaacaaaattaaatatgttttctttataacctattatttgaatcctaaaaattttaatttaattttatttatttaagtagattttgatggtggtcctttgtatttttttttattttata

SEQ ID NO: 220471 - DNA, 2553 bp, Cannabis indica
aaaataaaatttaaataaatttctaaacagattttctaacaaaatttatggatcttcttgggcaacggtcccgacctccttactccgaacatgtttaaaagtcactatttttaaataactatctcctcatgagtttaaacttgtaaaaatatgcttaaaatagaaatttagacaacactacttccacgcgtcttatatcttctcaatcgaatagcgaaaatatcatcaaaccaaaatttattctgtatgctttgagtcgaatagatcttctagtttcttgaaaatagttacactcgcataattcatgttgaaagatttacagtgtatggttcaaactcctagccaataatttttcatgcatctccaaagcaaatttttagtcacaactttaatagtatatatccatagttgtggttatccaaatcccttcatttttgtctccattttcaacttagaaaatgtgttaagacttagacattatattaaaagtaaccaaatcatgccaacactaacttaaacatattgtgttcaatatatttaacaagatctcatagaatcaagcttaagctttgaatttacatatctttcataaaaataaaagtaacccaacttgtaaataatgaaattgaagaaagtctaaaaatggacatacttactcaaaagcaagagagaaataatttttaagcgagttgcaagtgaaaggcgttggaaacttgagcaaaagagtaatcgcttacccttatataaaaagataatgatgtgtgtagagacagtatcagcgatgaatttataaattttgttcactgtgggcaaaaattcaaaatttatatttaaaaagagcatgaacattaaaataatactaaattgcaaaaatatataagggtgtaaatgtcaaaaatctaacataaaaaaaaaacaactcaatcgaaataatacatattaacaattaacatttagtgtgggcttaagcgttccataggccatctccaatgcacttctaaaaattcaaatatactcgtgtttgacactaaaaccattctaattatcattttaactaaattgtaaatattatcatatataaacaatgagatattgtagattacactttttttaagtttttaatattaaaataatgtgtttataattaaatttttgtatttttatatgtattgtaacttgagatagtttaataaaatagtataataataaagaatgtttcttagtgtgaattttagtgttatgattggaattgaaaaaattgcttataccattggggttgcctttagactgtaagtaggtgtgctaatgtttttacaagtaaaatttatagggtataatatttcaataattgtgactcttttttttttgagaatcattgaataattgtgacttttaattttaaacacatgaaatctatgctctttcccaaagttgtcccaactcattgaattattattacttctctcaatagtttggtagagaaacaaagtgaaatgaaattaattttgggtgaggaaaatgaaataaaatataaaaatgagatttgttttttttttttttagagaaaggaattcattcattcaaagataaaatacttgggaatcacaatcggggacccctccctaaattcaaaatcaaggaaattaacattagttctagcagattttgctaaggcatccgcctcaacattatcctgtctatgtaagtgagtaaaattgcaccaagaaaagttttccaacaaactccatatctgaaaggctactgcccttgatttccagcagggtggcatcagtcggtttctgagagccttgatcagcagaagagcgtcagatgcaataacaatagaactgaagccagcttgaatccccaatcgaatagcccaaaggacggcaagggcctcagcttccatagcagaaccagcggccacctttcgtgcagaccacaaccacttgttgctccttctatccagagttcccacagcaaggccagcaacaccctccttccatgatgcatccgtgaccatgaatccctgagttgaattaggaaatcgccaaacctcatccttggaattcatcaccatagtatcctcctgagttgtaacaccgagacttgagagtaagtcttccattctctgcaacattttacgtctaacacaaaggatatcaaccacctggcttttgaaaatgaccccgttccttatagaccagacagtttcgaagagacttcccacaaaggttaagaagcgccacctttcttccccaatgcaaagatctcccaattcacgaacaatatcagcaagagtcatattcatatcgatccgtactccgactgggaaagggcccgaaaaccataaggctcgggccaacgggcaatcccaaaagagatgcttcgttgattcaactgcattatcacaaaggacacaatccttttcattgagaaagacaagcttttccctaaccgaaaggctccctcccaacactctccagagtatcatagacacccttggatgaactttactatcccagattaacttccaaattctgtctccttggt

SEQ ID NO: 220472 - DNA, 5800 bp, Cannabis indica
cagcctttcctattccttattcccctattcctttatttgttccttttgctgtctcttttgtatactattatgggggacaacattgatgtctcacgtggtccaacttcggtcggcatagaaccttctcttgaaaatcctgaagtcattatgaacattgacgactcccaacaaccttccaacgatatcaatgagggagttaatgctgatgaggctgaggaagggtttgttgagccgcctcccaaagataataatgtcaaaaccaatgaggatcttgaggccttgcgtaacaacttcttgtagtcaatgaccattgatttggagccagctttcgagctcacgactgagattgtccgcacgggagtgctagtcaattttttcgacgtcaagggagtttcaagatctaaacttaaagaaatcctcagtcagatatggaagttaaaaggatattggaagttcaagacattgaaacccagtgtttggggtattttctttgataaagaggaagattgtgcggaggtgcttcagaatagaccgtggatcataaatcggaagctactcatcatcaaagaatggccagaggatggagattggtacaatgcggatatgcgtaaagccattttctgggttatggtatccgtgttaccaactccatatcttaatggtgtcaactctcgtactttggcagcaaaggcgggtcgtttcattcggagtgatttagcagaccagagaactgttatcagaagaggtttcttgaagttccaagttgaagtagatacttcccaccagttagtttctgggtttttccttgacataaaaagaggaaggaaagaatggattcaattccgctactttaactaccaaagttatgttacaactgcggttatcttggtcatgacaagaaaatatattttcgatcgacagctatggcgtttcctcccataggagctgctgttccagcctatgggccttggatgaaggctgagatggctgtctatagctgtttcaataccagaaatcaactggactatttcagagaaattaatggccggtcttcttctccggcaaaggtacctccgactattacttcgaactccaaagcaatgggaaagagaccagtccaagaaagccccagaaagcagtgtctgcaccaatctccttgctctaaacctccaaggaaagtagtcaggatcaggagcaatgaaccaggttcttctttaggcaaatatttgaaagttgtaaacaaagatgcccctaacccgttggataaaagacctggatgctctaatatagttccacgggcttcaagacaggatggaagaggaagaaaggccagatcaatttcacctagagccttgcgtaatcaccaacaaggtaattctcgtacaacctcagacaatgacatattaaatagcttttcatctagaccccctccaaatgaggctgataatggtgttatcacaaccattatggccaatattgggcccacttataaccaaatggtggcaaagcctcatgctgaattgtgtcaatctagacaaccccacaaacaccctgagcccactcatttcccttggcccatttatgctgaggaaattgggttggctgaggaacttatggggctggccaaagtagacaagtttgaacctactcctactttgttccaggacccaagtgatgtatctgaattagtgcaccactggccacaacccaggaaaagaaaagcaagcctaaccttaataccatatgttcaacacttacccgagaattctggtgatttcaatactgaccttcctgaactccatgccttctcttattctcctgactcttctttcaaaatgggctcgggtgcttctacatcatctctgaagaatgataaaagaagaaagaaaggatcgagatccaagttatcaacatccaacaaaggcaagaaaccgatagggtcctctggtgaagaaggagagacttacaggaatctaatcaactctctgaatttggtggaagtgcatgttgagagatctcaaaattttctattgggcgaggaggcggcccttatcaagcccccacccgccccatgaagtgcctttcatggaattgtcggggcctcgcaagagacccgacaccccgagctcttgcggcttgggtgaaaatatacaaggtggattgtatttttttgatggaaacaaaagttaacagcagtaagatggagtctctagctcgaattttaggcttttcgaaagttgtttgtgtagatgcatctggtctggcagggggctcttgtttaatgtggaatatcaatattgatttggtgattaattactttgctgatggtttctatgatgctactatctgggactatcaaactcaatctcattggaaattgtttgcggtatatggcactccttattccagtgttaaggaggtcttttggaagtctttggaagaggaatgttctcaatgtactctgccgtgagttcttttgggtgacttgaattgtattcgtggtcaagagaaaagtctgggggccgttttagtgactcctgctgaaactaaatggctgaataattttatgctcaatactggtggggtcgatctgcgttttcttggaaataaatatacttggcaaaacaaaagattcaatggaggtctcattagggaaagattagatagagcagttttctcttctgactggattttgtcttacgagaatgctggcactcgcaatctgcctatatccatctcagatcatgctcctatcatttttgattctcatctgtttgcagtgagaggttatattccatttcgattcttctaagcttggtcttgggaggagtcttgtaaaagggagattattaaagcctgggtttattctgatagtaatgccacggcctctttcattcgcaatataaacagttcaaagaaggctctttaaaggtggaaggagactggccaaatcactaatgaatacgacattcagaagttggaaaaaagactgtagtggattcaacgtcaacctatctccgaaaccttaaaagctgaagaagccagtgttcttttgcaaattcaaattgcttggtcaaagcttgagtgtatgtggagacaaagatcaagagaattatggctttcattgggggatagaaacacaagatttttccatgcaacgactgttataaggaaaagacggaatagcatttgggcgattaaagacaaagaaggaaggatatggagggggaggaaacacattggtggtatcatcaatagttacttccaggaactattttcttcctctcgacctagtattgatgaatctctggaaagcttgtttgttaactggattgatgatcagtcaaatgagcttatctccaaaactcctacagacgaggaaatcaaggaagctgtcttctgcttacatcctttaaaggccctggggccggatggtttctcggggtgtttcttccgaaagtattgggatgttgtgggaacaagtttgtgtgctacagtcaaggaattcttccagacaggtgtaatggatcctcttcttaataacacatttatgccttataccgaaagtggattttccccttagagtggatcaattccgcccgatcagcttatgcaacttctcttataaagtcattgcaaagatcctatcaaatagactcagaccttttatgaatgacttaatatcccctcttcaatcagccttcatccctggtagatggatagcagagtcttcaattctcactcaggagatcattcacaagattcagcataagagaggcaacggggggcttatggctctaaagcttgatatgcataaagcctatgataagatggaatggactttcttggagaaagttcttgtggcgaatggttttaatgacagaagttgcaagctcttgatggcctgtgttacaagcgtctcttatgcggtgcttctcaatggttgtcctcttaagaaattgtatcctcagagaggtcttcgtcaaggagatcctctctctccttttctgtttcttctttgccaagaggtcctttcgaaacttatatctaaggctgaggttcaaggttccgttcacggcatcaagattgcacaatctgcagctccggtctctcatctcatgtttgcagatgatacaattctcttctctcgtgcaaatccctccgaagcaaagaaattgatggatttgtctttcaatttatgaagaatggtcagggcaatcgtgtagcaaaccaaaatctggtgttcttttttcaaagaatttaagcaatggcaggaagaacaatatccttggtattctcaacattgagcaagtaaggggagaggaaagacatttaggcaatccgtttgtgttcaagagaaggaaaaaagaggattatttgagattaaaggaaagcatgttgaagaaattagaagggtggaagatgaaacttatctcttatgctggaaggctaatgttgatcaagtcagtaacatccgccatgcctgtttatgctatgtctacatccaaagttcctttagctagttgccgtgaatttgatgcattgatgaggaagttctggtggtctggaggggtggataaggatcggtttctcgctttaaaggcttgggagaagatttgtcaaccgaaagcagttggtggtttgggcctaagaaggtgtgaagacatgaataaagcattgctaaccaagttggcttggagtttggcaacaaaagaagacaagccgtgggtcacttgtctgttaaagaaatactgcaaatttgaatccttttgggaggtgaagagtaagtctagtgattcgtatctttggaaatgtattttggatacaaggtcaacaatctctaagggttcaatatcggttgctgcaactggggcttcaattaatttttggcatcaaccatggatcccatggatggaattacaagaatttgtgactctaatgcatgatttaaggagtagaggttacaccatcagaactttagcagatgtttccttgggcaacgagtggaatccggagttgattttacaaatctttggcacagaattgggaaatcgcatcctcactataccaagaattccttctccattccaagaccaggtgttttggaaacatactcagaatggctacttctctgtaaaggcagcttataatgtggaccaatcttggaggttcgaacctgtcaaagaaatttggaagtggatttggggaaatggcattcatcctagaaactctgttcttctttggaggattctaaatgatgctattccaaccaaaagtcgactgcacttcttgcctgacaaagtttgcgacttgtgtgatgctggtattgagaatcctttgcacctgttttgtaggtgtaacttttctaggtccatatggtttggaggcagtaagcacattaggataggggacatcctaggagaatcattatcggaagtcttggaaaatctgatgcttcactgtaatgacttaccacatggagggaatagagtcgagttacttaattatattggttgtgttttctctgcaatttggcatcagcggaacgaattctacattaaaaatgtttctgtcaatcctgagatggccttggcaaaggctgaaaaggatttcatggatatgaagatggtgcctcagatcaacaagggaggtcaggagttgggaattcaatccgagggaggcttggctagtgaagagacttacccttcaatcaactcttctgcgagacatgtcctatttacggatgcttcatggataggaggggacacaggtattgtagctattgcagtggatatggctg

SEQ ID NO: 220473 - DNA, 1366 bp, Cannabis indica
caacaaatatatgatgccaattacaaggaaaaagaaaaaaaatattatatatttatatactttatagatagtgaggcatttgatgatgggaacataaatgtaatctattacaattattttttttttggataaaattatagtacttaataattactcttaaaaaaataaaacaaaatgacttttgttagggccatttcatctgtaaatttgtttgtttttccttttctttttcttttttgggcttagtggggataggtctggtctagtggtctgtgtaggggtaaagttggggtgtgcactttgcagggtcagattctctgttcttttttctgttttctggtttgaaattgaaatttttgttgtatacaattatagtttgtgaaattgatttgggcaccctctggtttgttctttaatccacatttaagttccccgtattaacatttttataatattaaattttgttcataagtcatttaatctagaattaatcattattgttatttactttctaacacccttttttaattgaattgtttatttattattgaacagagtccttcaatcaagctgttaagtgagttaggtgatttgtcacaagtacaacaactctatgtataaccattgaaaaacaaaaaactcctctattagagaccagtttgattgggtaaattttgtattatcattatcataaaatatagacgtaccaaaatatgttagacacgataatacgataatacgactcaaaataatttgcatgaaataatgagtttggatcttccttaaataggtttgggtcgttttcgattgacacactttattaaacggataattttcggattaaataataacatgtatcttatccattttttttacacagtgacgtggtagaagaatcaggtgacacatgtcctgcatttcttgtgtctggcggaggagaatgtcccggacagactctatatggtgcatcagcatgtataacctttgattactcgagcgggatgaaagataaatcatccggacatgtataagtctggcttgccgaactacttatcaggagctaattacttcagaatgatcttgtgaagtccagacacgaaggcaatccctacgatcgtgggattaaatcagagaaatatggcaacctgttctaatttcctatttcgtgtctcataattatgtaataaatgtaatttcctattttatacattgtaagcaaaatggaaaccttttctcatgcattaaggccctataaatagtgactttgcctcactgtgaaggggatcgaaagaattgcttcagaaagagagatctaagagaattactcagagatttattgtaagagctttaagagagaaaaacactt

SEQ ID NO: 220474 - DNA, 3290 bp, Cannabis indica
taggaagcatgcaagtgaggacaacctaattgtggagttcttttgtgataggctaccagaaaataaggtgtaccttgttgatatagtgagacaccctgacatgtggggaatcactaataaaccctataacctatataagaagagtaagaggctgaagtgaagagaccttctttttgacttactggacggctccaagaacaccatatcccttgcttcatcttttccttgagtccaccatactttgtcgacactaaaacctcatacaccattgatatacttccatttttctactttgttggttcattgttcccaagaaccttataaacacgaactttgatcaaatttatgaatattgagtctcccatgagtcctttcttcaaagttctcaattaagatttcacatagaaatctcttgagaatataactctggtgtgtcagatcaaatcaataaaaataaaagtaggcattgtctcatttccattgcgacatggggggtgaaatattataaatctctggtgtccactttatttattgcaattttatttagtcgaatcaattcatcgtagttctctttatttttacgatcttcttagatcagttgacaaaaaatcacatcaatagtttggtgctttcattgagagcgttgcgatgaaagttttgttgttttccctttgaaaaactcactaaatttacctttctaacaacaatggtgttgagttccagaagaactaattttgaggaagatgtcaaaatcctaaggggagaagttaattagtcccttagtgaaggaacctttgtccctccacaaccacatggagaggagacttcttaacaccaagaaaagtgtcccatgccacctatgcctaaagatgagggacaagtccaagactgtgaaagtttctcatctccattaagggagcgcccacgagtcaggtccatacctgtgcatgaagtattcctaaagaatgagacattgcgtgcccagttggcagaaagcttacgtcgcaacaaagagctccaagagcaagcaccaaaaggcgtggggaccaaactcctccactaagagagccttctccccctaagagaagaagaggccgcctatcaaaagagcatgccaccatggcacatcaggggattcaattccatgatgaccttggaagtaccaatccaccaaggagaggggaccaacaagctttgccaaacatttgagtatgtacaagacatgcacatacaacccatgcacgattgcatgaatatggccatgacgctctggcccacgatggaggtacccataaccagacaaacaaagccaatgatgcaacccaacattagagtatgtcctcgacacactcatgccactcatgccaatcatgcacaattgcatggagatagccgacatggtaaaccaaatttgtctccaaggccactccttagaaacttgggcgtggacagagaagaaaaaagacaaccctctaattcaaagagaaagagaagacgtcccatgggtaattgtgccacatattaccccatgaggaagcaagcaagatccaatccacataatttacataattttcctcctctatgaggaattatgaaatatcttcgtgaaaaaaataatacacctccacctttgggtaacaacctccttcgaggtgacatgggagcttgtgccaacaacgatgcacatcatgcattggataatcaaaactgtgccacacatgatggtcctgacccatcccctagaccagctcatgttccgtgtaatataagggtcgacgtcgaggaagaaggggagaaccctcatcaagaaaggaaacaacatactcaagaggcaagttacccttcaaggtcacaagctaccctcacatattcccaactcggggcacacaaaattctttaataattcttccttgaagatagcgacgacaccaactcgctaaataactctataagtatttatgacgacatccaaccttggtcctatcaagtacattccactaatcgtcaataccaaggggaaagaccaagtaaaaatatatacaggggcatctccaaagagaagatccccatttaacacatccttattttagtaaccgcaccaacatccctctttttcaaggaaccaatgttggtaaccgcgccaacatccttcttttccaagaaatcaatcctcatgttggtaaccgcgccaacattcctccttttcaaggagccaatccacatgatggtaaccattccaacaatcctcctctctctgtaagagttgattgtggtataccaaatggtaactctcgcataacaatgcttaaagaacaactccaacaacttttgaataacaataaaatgaaggagcatgaatctgatgaagagatagagcccttcatgccttatatcttggcattcccttaccctctagagtttgaattgctagcgaactacgaccaagtatgataggaccactgactctggggtccatataaatgatttcaatactcttatgcaagcacatcaagtggctagagatttgagatgtgttttattccctgctaccttatctagagttgcattctcgtggttcaaaaagtttaaaaggcactccatagtgtcatgggtccaactctcagatgctttcaaaaaggagttccaagtcgcgagaacccgcaagcttgaatgttcttccttggccaacgtgagacaatttctaggagaaagtttgaaggcctacatcaaccatttcaacatcaaagctactaaaactcgtggcattgatgatagtgcaagactgatggcactagtggcaggtatcacccatggtttcgtattttggaacaaccttcaaagcaagagtccacacaccattaaaaaatttatgaagcaggcacaaaaatacatcaatatttaagaggtaaggatagcaaaaaacctccctctccaatccttgcagcccactcaaaccacatttgcactaccagaacttactaatgccaatatggttgctaattctttaaacaacagcaaaagagaaggcatagatggggagaaagtcccaagaagagtaggagtgatggcccttatcaccctatgtatttgacctacaccgagttgacaaaacccaagaggccatccatgtgcgaatgagcattgagttccattccgagttcctaaatctatgaagcatgatcgagccaagagagatgcctcaagatattatcaataccataaagacatcgatcacacaacaaatgagtgctaaaacctcaaagatgaaattgagactctagtccataatg

SEQ ID NO: 220475 - DNA, 32306 bp, Cannabis indica
tttttcggtatgccgtcggcactaatagccgatgaaagaagatataataggtagccacatgtttcccatattcaactcttttttgggaaacctgagtgcaggagatcaaaaatgaagaacgttagtcagttaccagagaatgttcaagccctgatacagaaaagaaagaacttccaagcaggcggacaaatgcaaagagcctcgccaggaagggagctgggactagtgaatgcaataagtgagtccggaaggagaaagagattctcactgcccgaaggtataatgtgcgcctatacaagggacatgaggcttgttcttttgatctgtttactcatagggtttactgcttggtgggcatatattccggcggaggtaacgccccgggtttgtatgaaacctgactcagtagatacactgaaagcagtagccgaggcgagaaccggcgctttgcaaaagatgagagaggcagaggcttgtctcggagaaagagatgccccctcttttttgctttgtattgaataccagggaggatcaatcacctgaataaaccttacctttgctcccagtcggggtagatgtctaaccaggaagagatatacatggcagctagctgagaccccgaatgaatctcctgcgcctgtagattcaagattgcttgttcaacctagttgctcaacctagagagattcgaatagtattgaatggggggagaacccagctaatagtcctggatgccttgcctatcctacagaagactaatccacattagcagtggggtggaaatgttgaattgttaagtggttttatgaaacgatgcaagaattcgcccctatcacgtaaggctcgcccttatagcttccgcgatgaagtgggaacccatttgtggcaccggggggatagagtttttagctgatttgaatattaattcaagggtatggtttacatattcatacatagaagatgctcctgcttcgatcgaaaagattcgttcattaagtaagtaagtcgcaacacattcctaagttgatgggtgagaggcaaagcaggagcccggagcatgtgccagtgagggaataatggagcaagcaataggaaatggcgcgggcaccgccactaagactgaatgaatgcgggcaaaagcgatgactttcttgattcatttcttttttatatacgacatgaggtcttccctgttagtcactggttcaactcaaccattactcctttcagtgatgactattcgctattccccgaacaactcgatgaatagggaactaagcagtcgaccattcaccgcatctcgaattcgagaccaaaaacatctggcgatcgacaacaaagcgccttctttttctttccaacctgccgaaaacttgaacggaatcgaggtttcttggcagctccttctttcaacctcaaaaggttttgattgacccgtagacataggcaattggggcttttagcacccttttccttctgtttggtgaatcaaccttggcattacctaaactaaatatccaattcatagagtcaaattactccgcggattcattggctccctttcctaacctcgcaatgaacgaaatgagacgtttgcttgcttcaccgacaacaaacaggcccactagggtcttggattgggtatgggataggaggcctatacatccactttcatagctggcattgcatagcaggtttgttactggaatagctgctgtattactttgtattgtctcttagcaacaccttatcaagtagttgttcttttaagctttcccttgtgacttctttcttctctacaaatggtagagccacaggtcagtagagcaggtatatcgttttcatagcaggttcattgctggtatagcagttgtatggcttttctagctgctttatatataggaggagaacactttctagctatagagcagttgtatggctttcatagcgtttagtagttgtagggataggtagctgcaagtagtgcttgaatgggaagagttttttgagttgttctttcaagaaggagtgcttgaaacatagctagcccttcttaaggcaagagtgcttgaagagagagctaccaaaaggaggagcagtatacgcaaggtctaagccaaccatagttgttctcctcggtaccccctccctcttcttcttcctctgtaatagccgcctcgctagcgaagggtcttccaagccctgcgcgagctgcgtgcttagcactgaattaatagcaccacttctaccacttgcatagcatatcggtagtagctacaagacaaaaaactaactcaagaacgcaagagaagtgctttttaaaaggtagagctacaagaaagcatctactgagctaaccatctaatctaagcagtagcatctcgcttggaagacccgcaagaggaaagagcatctatctacacagttagctgcccctactttggggctaggttggctcctgggctaaagcaaccgtacaacaggcgatctctttcagatcctcgcagcatggaatgttatttccgcttcctctgggctatggaatggaagaattggttcagcatcaaccccgggattctttccccgactacaaaaatagaaagccttgcctgcttctaatttggtttggcattctaaggagcaacttccccgtaggctcgattcggttccatcctataccttctatcctaggtcttatcattcggaatcgcattctatcacactggtggtacttcttgttgaattaaaagattggattagtctttctgtacccacccgctacccctgtttgagagtgattaaatatcaataggggagcctcctaataaggaagttgcttcttggaaaagccttttcactgccaagcctttatcttatttggtcgggcaagaatccatctcggtttaagaattcacccaattgggacatccattcagaacctgaaaccattaccaacgaaaaaaaaggtgttataaataaaggggcttcgaaagaactctttcaagaggaaggatgcagcgagcgagcctgttaagctgcgattgagcctaagtctttccaaaaagaaaagggtaactttattctttttctttttatacctttctcatcgaaaatttacaacaactgaaacttcaactgatgcccacgccaaacgagataactcagttggcttaggattcgtaatgatctggaacatcggttccagtcttctttcccgacccgattccttccttggctgtcatttgcatataactagctaatgctgctgggaatgcccttggcggattctatcttctcttggtggagtaacttgcaaccagtgctttagggctctctccacacggggcgtcagtcgtgaatcctatatatgcctatatgatgatatggaaggggattgtcaagtggaaaaagacccttcgattcgccttgaccggatcacatagcgttagcggggcggtaaacttcgcagcaggagcagtcttttactttactacggataaaccgcgttcacgtggtcgaatagaacttgctgctcgctcaacgcgcgttaagtactcctctatcgtgcttgtggagcctttttgagttgagcaacgcaggaacgaagtgaattcggtcttattcctgcctttcctttcattctcgagaggtcttgacgatacccttctgtaaacctgcctaagcccagtcacaggatcatatgagaacgtcatgcagatgctcaggttgccgtaggctggctggtaaaagagaaccggtaagtagaatgacctactccgccgttactgacttttctttctctctcttaggctgtgttggtcaagctaacgcttcccttgtgttgaagtcccgaaggcggcatatcttgggggggcgaataggcttagtcgtcttcttgttagcttaatggctgtgacgaaagagctggcaacatttccttcgattcagcaaaccacaacacttgatcttgtctgcttgcaccgttcaactacgttcactcactccttccggtaggattcttttataaacattgaggaggtaagagccctatcaacctaattcaacgatgcacgtgaaaactagaatcgaatccttccttaatcaactacaagtacaggaaaggtctctcgagcctcttttaatgcattccttattgctctatccatagagataagacaaagagacaattcaaggtcttacgcaacgaatgattcaacactaggataactagagaaacaaaaaaatcctatccgagaggcaaggtagtttacttgcttacttgttagagtaaggtcttgaagagcctccgctcttggctagcatccagactgccttagttagctacatatctctgggttaaacatccagaaagtcatgctgttacatcgagctatcaaccaagaagcttcgaagtcctttttactatcccagtacatgaaggctcaagagaagtcataaagagaagacttacccccctttatcctcagctcctcgtttagaaaccacatacatctaatcctagcctatctgttcttgcttcctctaatcctgcccgctatcccaactacaaagagaaagaagacggctactctctaattagttaattagttattatctgtcctagctggatataaagtcgttacatccagctcatagaggacgcaatgactcagactagctacctatgcctttcctttctacatgagggagacagataaaagcaagaaggctaggtccccactaaaaaaagtttcttaaggcttcttgccaatagtgagaaacacctcgcttatctatcttgagaaagaggatatatagaaagaaaactcgatcaatgttttccgtctttgtctgctataaccttcaaggaagacaagcggaagatgcaaaaaggcaggacagatgagttgacgatgcatctttgcgtctttttgtctggatctatatatagaaagaagctcgaatgcgttataactccttctccttctatcctagtcaagctaaggcgaagctttgaatggctcctgcctagcttccttctttctagtgattagagtcttctgtttgcagttttgaatcttgctatggctatgagttccttttgtgtcttttcccttctctaataagccatacgactgtgctatgaggaaggcacttctaatgcttcctccttactttatctcttctagtatttaagtatttcacccaataataattgtttttgcgtcatctttttattccccttcttacgcttataccctctttgatatgtacctcaggtaaagaggaattggagaaggttttcatttcttcctttcaatggttccttcttgtctctagtactgtaatatgagggatagctctaataggataaatgagaagtctaagtcatattacatctataagatagataaagaggtctgatgccacctcccccgttttacatcgcactgatcttcttcctctgcagctcttgcttccttccccgaagctcttcaatgccttcattcccgtacgaatggaccaggggtcatagcacttgatggctatctatcctttttccaaccggcttagctgtgtcccttcgactcccctagctgttccctgtcaactggacctttcaaacgagaacttcttttcaccgggaggcggaggcgattggagtgggctacacgtcaactgctgcctggattgcatatcttccccatgggctaataggaatgctgggagcttggcccgcgattgaaagcattggaaaaaagggatggattgagtgcgggcggttcgagatccttacatacggatatacgagtagggttcatagctctatgttagctgattgacacgaagagagacggtttttgggatagatcaggttggaccttcggatttccaagagtagctagctggccccgagcttctgttccattcccactttattccggcgactcctctgtttccatctcattctctggtcacgtaagggaagccgcgtctctcaaagcacctagcttagatgatgaagcaagtgatcaaatgaagtaaaggtgtgttcgaatcctttccatcatgaagaaataagtggctcgactcccaggctaagctcccccggaacctgtagcgggcttcaaaaagaacgatagaaagctctgacaaagccattcagaggaaatcgggcaagcaagctaccgcactacggcgggaaacaagcaaacgtaggcagcaaagcaaagaaattccggccttaacccaacctcttctaaactacattcaattaggttaggcaggcggtagaaaaagctgcttgcaaacggctgctgaatttcttattgagaggctgactcacctaactagacccttacgttttgaagcccgattcgtttcctttctggggtattcaagtatgcatactacgggcgaagcttccaagccccttgaaaaatgggaaagggcacaagaccggcaacagctgctactaactcaccggagaagcgcgacgctaaggccttaaataagcacggtcaggaattctcaaacaagggaagcgttagcttgacttttatgcttccctacgtggaaaatgaatcaaaccagttctccctcgacctgcaggtattctaaatggttattgtttatgctcgtatagcataaaaatgattcggagggccatgataaattcactttgtaccttcgcttcgtcatcaaagcctcttcgctactccgaactctacacctatttagttctgtcttgtactctctctatttgcttttctagtgctacttttcttgttttttccggtattaagtaagtagtaaataagtgaagtggtgaattggccattggaaaggaggaatagggcttatttcacgtatatttagttattcgacttttattcttttgtaaggcaaacctttatgtcaaagcaacggttctctctaaccttctcttactcgccttacttgaaacctgtccatttttccttcgtatctataatctaaaaacttcttacctctgtgccttctgtacttctcggctcaagcaagagccacagtgactggaacaacaggcttgaagaccaacatcagtcaagcaagcaatttgaatagggattatgaacaggcccttaccttggccttacccgttcgattgattgttctaaagtcgaagtcgtttcgttaagtcgaattgaaaggtaggttttgtcagtgattaaatggaaagggggagtggttcgggcccactcttgaacttttaggctaattaaaagccgaaacaaaggcaaaatatcggcatgtaactgagaaagatgggattcggtcaacaaacaaaggaaattaaaacactcccttctttcttttctgtcgacaatgatgaaaaccagatcgaactctaaaggaaagcctttgacttcattgttcaagagcttgaacatgggttgagttcatacattttgaatgctttcctattcaagacatactaccaattcctttgaagctactaccactaccgaagctggcttgcttgttttggttaccggttggggttttgaaaccagagaaagaaagaagatccggttggacttgctagcgatgggagattagtcaccggaagacttgctccttcaaaataaggtggctaagacgggtggcctattccaatagctggcagacgggctattacgcctattccaacatattccgattgtgatacaattccattgcccgctcctattcatgttcgtgcttacttgtatgcgtcaataaagaaggactcctatccggggtctgaaactcggtctgcttgctcctacaaaagctcatacggggtgtctcctattcctctcccgatacgagttatttcctgaccgttccctcgtgcttgtttcaggaagcatttcggtcactccagtaagtatatagattatttgacagacgacaaagagtgatttaccgacgaaaagaggtcaagccgataggacctactcgaacaatcgccctactcgatcaagccgattagcaagtcgaccaactcgttcacgttcattcgacctactcttaagataagactgttccccctttagcttctttagtcaattctaatagctcactcttagttgaccgttccgctggggcttccactcaaagaggaagccctgcgctgcactccagtgttgaatttcttgatcgacgaaacgagttattgccatttcatttttacggaggaaacgaacagactttagttgacggaaaggaaatgtatattgatacgttcaatcgagtcccgttctctattcctattgctttgggtggtcgtgctgttgccggtttagggtgctctggctaatatgactatgttgcttcctcttactggtcatcatacctattagtagagcgaggggagtgggaaaaggacatacgagtacgcgaagggaagagagttgggacggagacgaatccaagccaatgaggttacgaacgagttggagagcctgttgacggtgactttgagtgctattcccgctccagtggagattgctttctcgatgggaattggtaatacttggtcttggtctttgaggaagcggtggcaaaggatgggtggagattagggtatagtcaggatattccactagaaaggtaaacccatttagagttcgttttcaaaagtggtttggctttgcattcaaggctttttacggaaagagaaatcgtcttgcttatgtgcttcttcatcggattgagtgtgtggtagctgcttctgaccgaatcgctctttgtttcaccaaatatttctattctagattattttatattatatataaagttcacattcttcaggaagtcgcgattttatttcgttagtgtaactggaaaaacgtagataaggagctaaggaaacaaagcgcccctctctaccaacatgaagctcgttgctaggatcgaccgaatgtaataacgtaaacgaattgtacactaaaaatttttttttttcaatttttgagttgcttctaatgaaagcagatatatagaaagtgtgcagtgggagatctttataggtagccaggctgctttacttaactcgactcaagctttacttagcccatcaactcccatgtctttcttggttggaccaacccaaccggcgatttccgacaagtctttcttcatttttagagcaagaagcggaactacaaaaaagcttcctttatctttatggataaccaattcattttcaaatatagttgggagactttccccaagaaatgggtaaaaaaaatggaaagatcagaacatgggaatagatctgataccaatacggactacccatttcaattgttgtgctttcttaaattgcatacctatacaagggttcaagtttcgatcgatatttgtggagtggattatccctctcgaaaacgaagatttgaagtgatctataatttactgagtactcggtataactcacgcattcgtgtacaaaccagtgcagacgaagtaacacgaatatctccggtagtcagtctatttccatcagccggccggtgggagcgagaagtttgggatatgtttggtgtttcttccatcaatcatccggatctacgccgtatatcaacagattatggtttcgagggtcatccattacgaaaagaccttcctctgagtggatatgtggaagtacgctatgatgatccagagaaacgtgtggtttctgaacccattgagatgacccaagaatttcgctatttcgattttgctagtccttgggaacagcatagcgacggataattggataattcaatcagaataggtccagtccaggggacaaatcaataggaaatgctatttgctttggttgaaggccataaatagagtgaaatgaaagagtttcgcgggaattgtcttgatcgtcggatatcattgagaaataggaagaagtgttatcgaacgatttcctgcaattcttcccagtatggaatgagtaaagaatcaagctacaagtctcgatctatacaaaacgcactgggtttttgtctttctttcggtttcattgatagcagaagagccttactctataggggcgctagcgctttactaatataatagaaaggaaaggggcctgaaaaacgaacgtaataggctgctactctaggcgcgcttcgctttttcaagctccgccccttattgaaaacggcctgcgctaacgcgccttctattttttagtaaagcaacctttcgcgctaggcgctcacgctttttgtctgggtggaagctggcggcagggcttgcaacaccggatacacggaattgggatctctctcgcatgcaactatttctatcgggaaagcctcgcttattcaaagggctgattatttagttccctttttttttgctcataagtaagtgagcgttggtaggagcggcgggatgatgagtatataaatcaataaagaccaaaaaaagaagaaatggcaagagaaatttgatatcgatggaggaaataacgatgtggaaaacagggcagggattctctacaatgaccatcgtagaccaattgaaagggatgtagcgcagcttggtagcgcctttgttttgggtacaaaatcgggttccaatcctacctattacttctcctctgggcagtaacgagggatccattgagatcgattcaaattgaggacataaaaaagctttcatttaatgaaactatatgcatgcaagatgtagtgggggtacaaaaagaatccttttctttacagtcgttatctactgtgataagaaagcgctcttagttcagttcggtagaacgtgggtctccaaaacccgatgtcgtaggttcaaatcctacagagcgtgattccgttcttgttaggtctaattacaatgaaagaacttcactaacttgaacagcaacctgaatttgacctcctgcggattaaagaaaggaggaagtaaaaaaaagagacctattaccagtgtgatttctcgatgaggtgcaacaaaggaagatctaggtgaggttgagtgctttcttccatcgaccggagctctttggattgatcacttgtcaaggacagcccggaattcccgctgactgtccagcaacggagccatagacagtaagtcatatcatcgggcaactccatcgacgacaaggtctcatgggtcttggtcgggggcttcgacgacctatagagaacggggtggctctcaaactgaaacacatgtggtagggtctctctttgtgtgcataccaacccgagttggatcaatgaggatggtgtgatctgacctctcaatcgtgggtttccccatcccctcgcctttgtctttcctttcggcagagaagaagacggaaaaacagaaggggatattggttttagaaactcaaaggaggacgggcatgacagagtttggcaagaataaaaccttccttttcgaagactacgagctgtccaccttcattacctaaaatgaagaaaaatcaccccggtcaagcgcaatctgagatccctcttcgatagacatgaaccaggtgcgttagcctttctgttttgtcagctgatcctacgagctttcatagaaagcctatatattatagcgcgtacaaggacaagtggtgggaaatcttctctgcgctctttgacctaccatagatccttagtggtggaccgatcgacccttccattcaagccctatcgtcaaagccaactctctaaaagggctcttttggtgcaatgagagaggtactttcacatcagtgggttccaaacctcaagcagtagggcgacaatcctgagcttcgtcaataggcgtccaatcctgggaaaaaaggttcggtgagggggggcggtgccgcggaatgcgtcgcgcttggtgatgcagtacaccgagcgccacccccggttgtgcatgcggtactccgtcaccgagccgtagatccacccgatcccgccctcgtaccattcccttctgctgctatagcctccatggagaaggttggcagaacacaattcctgctgctagaaagaaagaaaatagatgaagtgaaccgatctatttataaggtataaggtgttggacttacgactcttgaacttgaaggtgggattgtaccagtcgactgaacgatgggaggataaatcctttgaagggcgcctatttactaacctattttattgggcttgcttggctttctcttagcttcccttcacttgtcccatatacttagagcaagagggttcgggtgagcaatgaatccactcgcgcttacttacttactttagtggtagttcgagctcgcttctagtacccttactgctactgcttgagtaagctctctctcccgagcctgctgaaaaactacaggcgtaggcttttcttagagctgagaaactacagggcgcgcttcttcattcatccatttaggcccgactaggaacacgtggatccagggaacctggctcgggaacagcttcttactagtaggggctaatcaaacaaagtaaagagagtccaatctctgaaaaagagcttagtctctccataccatagtagtatactagtagaaggcgtaggttatgacttgatccaatagagtcagaacacctttctatctaaaagaaatggtgctcgatgaaacgatccagattccacactatgctgtgggctggggagagagctgctctgcgaagctgggcgttcagtgttcttatggaggaaccctactagaaagagaatagaaagggccttcaaaaaagagcgagggagtgatgggctactttagtctatatgttgctcgtgagccgccaagtaccagtctcgcaacagtactggcgcaaaaggatcggtccttcacttgctgatcgttcgcgagtcgaactcgctctcttgccacgcctttcactcactcgcttgagtcggactcaatcactctttttgtttggaggatcattcgttcttcactctcttaatatttccatattacccgcagggagcgcagcaaccaaggtgcatattatcatatagaaacaagcgaagcgtagcgattcgtactaccggaaaagtttcgctaaccggcaggcaatagagtccccgccgataggcgcaagcgtagcgaatcacatagataagcccctacctgccagcgcgcggatagatagggcgggcgaagcgcgaaggggatggatgtctgagcggttgaaagagtcggtcttgaaaaccgaagtattgataggaataccgggggttcgaatccctctccatccgcgaagtcataagttctctcttgcgttatctatagataagaacgaatcggatccactcgactgaatagatggaatgggtagcttgtgttatgatgtagacggaggttcttgtgttatgatttagttaggactttgtctccctttcgttatcttccgctccccttgtataggttggggaagggccgggtggattacctttgggagctaagtcgaagatctcggtggtcttgtgagtggttgataaactacgattgcagttttctttaggaagtcccatagctgtgaggcttaacagacaaagaaaacggtggatacttccactagttgggtagaaggtgacgaccctaatgaatcgactatgaaggcggctgttagctacatcagcgctcaaattccttcatcgttattgccctggcttcgatgatcaacccctggcacatttaggttttgatcttcggccatcctggtcctcaggacccaacacaatattattcttatatatttcctttattataaaagatgcaaaaggtgttgatacgtcctatccacatagaaagcttaccctcttccacacattaccggcggatgctagaaccgctatcactttggctgcaggaggggaatggttaagtgaaactctcgacgtcttgtttggtaaacgggatgtttaccccagcgccgtagtcttgcctaaccgttcggtcggagatgcctttgtatggtatagcaagctgtttagctacttgtatcgatttgccacagtgtggttagatacaatgcgctggcagcctcagcttggcaggatgggaatgaaggtcgagggagcagggaagaaaaggttattccctattggctcacccttgtatcaggccttggtacggcctatacatgattgggccatgacggttttggcaaggttcaaaatggaaggtacctctaaccagacccaaccgttgcagtacctgaaaggaaagaaaaaaggattttcttttgatctcaaggctgctaccgattcctttcctgttatcctgacgtcctgtatgattgcagggttgttcggtattgaatcaatccttaactttgttcggtcacttcagaagtcatataaaatacctaattctattgagttgattccatctcctttactttttttacattcagtagaagcttgcaggtgtcccttctcttcgatcctgcaataggcagctaccctcatggaactaaataacactactctcatccctctcccgaggtagctactatatgtattcgtgcttcttaagtcgatgttgacctgtatataagtcagatgttggaaggcttgcagaccataatatgaatactctttaagtcaaggaataccccttttagtctttattatagtatagctgagtagctaagagcttctggtaatttaaaaacgtaggggtcgagttgttttgcgttaatggggctttgaggggcgcgtcttctgtttcccttatcaagcaagccacacctaatcgcccttgaatcttggcggtctcggtgtccagtccccctatttattagtaaagcttttcagtcagctggtaaaagaacttcttagaaaaaatgcctgcaagtaggtgtattctgagaactacacgagctcttttgacagaaaagcggaaacgtccttcgtcctccactcgccgaagactatggggatctgggatttgagaacactgactgacggcactcaattgacgggacttcgaggcaggtatttgacggtatacctataccgacggaacgaaggcacgagcccctactaataatcgaaggggacggagaccacagcttgatgcgagtacgaactgaactataccacaaggctataagcgtcgagagcccaggtcaaggagcgaagccactcgaacgaatgtgagaggagcgaaaggagactcgagcagaaatacaagtttcctatatcgaaagcgaaagcaccctttacctaggcctaggccagggaatcagaaaccaactctgcttgagtcatcagaggagtgaaaccatttgttgactctcgagcttcacgcaaacacgcgtcggtgcgatgtaaaacacatcacatccgcaagggattgggattgctgtgggaattcactaatggttgtgaatgttttcaatgatttaccaataaaaaccggtttataacaacaacaactgagatgccaggtgcggctcagagaagaggatcatgacatatgatgctgtagcagcagccgtagcacggggaacccaaaagaggctattcctctctcggtacagctcattttagaaggcagacagaggttgccctagagagggcgacgagtttgggtacctctgtgggcggataggctatagcggacctatcggcctacaataggatagaagatagaggttttgaaccctttacggacatagctgcaattgacactgtagttgaagttctcggtccgggcaaacgttttttctaagcacacccaaatattacgagacgttcttagtccaacgacaagactaagaacgtcttcggtcatggtgcccatcattaaacttttgagtagtcggtctgttcattctaataaagtactcagggttcattatctcacctttgtcatcagtctcaagaaactcctttggttctttggaagttccatcaacgaaactgagaagatcttgtgcttcaataaacgacattatcttaggtttccatagtaggtagttcgtctgtgtcaattttatggataataaatttgcgatggacgggatactcactaagtggctgaggagaaggatacagcggtggacaagcgccaaagagaaaacacgtaacaaggtattcagaccacacttcacacgaaccaactgaacgtttcccaagagctagtgctctgataccatgaaagagttgaaaatactttgagcagattgggtgaaggatgtgtatatcaatgtgagagatcctctgtttaaatagaatacaaggccccttgggcgttacacatggagtaattaaatgagagttacataagtaataaaagttattattagctcctatctttctagagacatatggaaaatggcccaatccttgagtctgttttcctttaatggatcaggtggggggggagaaggctcgagagaccagcccatagggttttccctacggctaccttgttgcgaacgaaaacccggatcgcggcggaccaagtcaaagatcaagtgcgcgttcatgtaagactcccacttagctgcattactatgttttcgtacaaagtggagcaggttttttagggagtccacatccgcactaggttaataaaaaaggaatccttctgtctcatgtgctgcttcgagaaagtcgaagtccccccaccctcttgagctaaatcgaccgaaaaagcccatacctttacaataccgctcgcagtatttcttgaggagtagggcaaaagctttacgaattttctttcatagacgttatctttccgaatcattgttgttcggaacgccgggctcgggtgagaggataagcaaccgaaggattcgttatcgaatcccacggggaggggattaccgaatctggatggagagaaaggaaggaagaagcaacttttgattaaaggatttaccggaaatgttgttctgattaaagatggatccggcccggaaatggaattattcagaaaccctccatccatcaaagcagcaaaaccctgaacctccatcccattcctctatccaaaacctccgtctgcctagttgttcttcgtcaccggattcccttctctagtcggattcgagaaaagagaaggacacatttgggatggttcaccgaaccgcgaaggaaggaaaggtctctcgagcctcttctacctctgagacggaaataaggagagacggcaaacaaaggaaggtgcaaacctttttttccttcccggatccactctcggtaagtcgaggggcctacccggggttgaatagcctacacctccctcttttaataaggtcttctccgggcccgacctcttttccggctaaggaaaggtctctcgagcctcgaggtgacgaacaactttgatggagattatcccaaaccgacacctgcgatctcatttgaaaatctcctcttttcgggcgggtggatgcattcctttgatagggaaacaaactactttgagagagacagcctatttattttcaatcgatcgcgggtgtcggaaaaaggagtacttccagaaggaaaagagaagcgggtgggcgggaataagaagtgcgataagcagtgggtacgttaactccctcgtttgatcaaacaatttatcctgatggaggagcaactggtctattccccgtaatcactagcattacatacgagttgcttcgtcctttatcaattttcagtcctttgctcctataagaaattgcgtatataagaaaaggtctgtacctataggatatggatatagttataggaaatcccctaagatttcacatagtacttttgctttttcaaaaaatcttctttctttttcttctcggctggttctgaacgctggttgatattacaatacgtcagttagttaacattcgatccccctggaacactaaaagaatttcgctttcctgaaaaaaggaaacttacggaagcatctatctctatcacgcacttcaatccgcacataagacgattcctctttctatactcaattacgtaatagtccagctagctcgtctgtgtctggcagtttaagccttggcccagctgcttcttttcaatccaggagctgcatgataagaaagctctcgatctcggctagcttcagttagttaaatagaccctcgtactgcaactatgccaagcaaaatcttggttccaatgctgcggagacaggtgttgctgatcgaactaatctactttagggattcacctaaagcttttaataggaaagctcgttccaccccttcgacaaattctttcgcagcagcttgaactgaaccggggctatcaacgtgaacgagagaaaaaccccattactcgatcaggggatctaagccacagctctattcccgactcgaaatccataaaggactttaagggagaacagctctctctatctcagctgctttccctactaccggcacaagagggactttttctcttcaaacaaacctctctctgatctccaaccccattttgtcccgatactggaagccgcgtttgaagatgagtggatcgggaatctaacccagcgaagaaaacgcctacaactaagtcaggcgcactagcgcaccaagcaagaaaacggcgggctagctcgtgcaatcaacgaaaaaacccttcgccttagtaagctaagcaagcctggttctccgggcactacggtaggacgtggatcgatcatgacgagaatggacttctccgtaatgtaatagaagagtcacagtccagttccccgggctttctcccttctcgaccagacgaaggagatatgaattccattcaggcgggtaagggcttggcttgaccctgtgttctctcctggtcgggtcggaggcgaagactagcaaagttcatcattcagtggtggggtgctcatagaaaagaaggcgtcgcccaacgagtggcagattttgatggagtctcgctttgatgctggggagatccatagatctggatagagtctcgctcatagatagaggaagagtacgcgcgctagcgcgctacggcttacgcaggtgatcggatcagatagcccttcgggcaaccaaccaaacccggcacatcaaattccgatcaacaacttggaggtatggctgagtggcttaaggcattggtttgctaaatcgacatacaagaaagattgtatcatgggttcgaatcccatttcctccggcacggaagtggaacaggcgggcgaaattacgtgagagaaagaacctcttggtggagtcccccggaggacagaatagcactacttagttactaggagcggagagcccgttgcgcgttgtttttgtttgaccgacctatcttctttctataagcaagctccctccggccgtccagtcccaggggtcggttcttgagcatgttgggagattaggcggcgaaagagctgctcgaaagcttgacgaacaagcgaaaaagccctaactattttcttagtaaagggcttttcccttactagtcaagtggtaaggtagggcgctattcgatgaagaaaacagactttaggaaagtggttcaggtagctcagctggttagagcaaaggactgaaaatccttgtgtcagtggttcgaatccacttctaaacgggcgaagggtctttagacacgtaaccgggagcgagccggatttcaaaatgaaagtcaaagaggaagccaaaaagccaactagtgcaggaggcacattttataaaaaaagcggttgaaacctcggattggttctcgcgtccctgtgcccaaaaggatgggcgagttcggttcaagtgttcatcgatcgggtggatctatatgctccgggggggggggtgagacgaggtgtagcgcagtctggtcagcgcatctgttttgggtacagagggccataggttcgaatcctgtcaccttgatgtggcgaatacaaaaaaaatgaatgtcggagaaataggaaagagaaatgactctaaggaaccaacgattctctcttcttaaacaaaattttttattatctgtcagtcgcatcgggtctgaccctcagttgaaaagagctatgaaacacatctgagaccctgatttccttgggactatgcttttgtttctgtatcttctttgtcaacaattaggattccctattttcaattcatacttgggaaagtaggaggtcatttggcaacgagagtggcttcgtttttgagggggctggtggtcatcgcggtgggtttggtccttggagcgttcttcaatacccaagacacactccccaccgggagtatgatgttgccggcaagagcttctggcccgttggtgaaccaagcttcttttcccgccccacaggatctaattgtgatccctgaggaaagccaagacgcgctccctgggtgagcagcccaggatgggtgccgctccagcccagacaaatcctcttccctcatataatcctgccggttcatgaggagctgtgccgccagcgaatccagcgggttccccgggcgccgggccctccgacccctatccctatcaaccaaatcaagaagagggaatggaggggttcttaaccattttttcccgcatatattcacgcttattttttcaaaaaaaaaaccgagcgcaactttccatccgaggcgaaaagcaggactttgattaacctcaaccgatatatccgctgctattatccgctcttaggttgttgctctttgagttctctctttctttatgggtctttccaggcggttagatcaagataggacagataagaatggtattagatgggtgtcttctcgataagaagaaggacttctagtagtgaaataggagtcagtgctcaactagtccggagactatagctcagtcgaacttctaatccagccacgaaactgtaaaaatagaactcaaatagataattcaagtgggcaaggtaagctcagtctcaggcgaaggaagcttttaggccgttaatctttcttttcatcgatgggagttagcgatgaatcaaagaagttgtcagtgaagaagttatctaaaacaggaaagtaaatccaataagtccagttctgtaggccgaatctaataaggtaggcgaacctggcaagtagttaacaggctcattttccgttctatgcccgttcctgattctaagcccgttctttcagcgagctacaagagagggtctatttggtcactatgcctgtgggtggaaaaaccctcctgattcaatcccggtagatacatcttttgtttcaagtcataccagactagccgacctaccttgtgtctctgtatttccctaagccaacttatacaaaaaagaatgaagcaaggatagtcgtagactacttgccctatctcttaaagcttcactagcgaaaactgttaactctttcatttctacgaccaaccgagagtccctgtgctatggctcacacccggaataaggttttttttcttgatctgctttagccgttgtttaaagccttgttgagctttaaagtacttattgcaaccgcggttacagaaataagaaacttctctttgactgaagcacttgaacttcactttccaacttgttgggagtaggggctttcactggaactgaaactctattttctgttcaactcggcttccttaacttaaagactttgagggtttgtagggctttacactcgcgctacccgaaaggaactagaagtaaccttttctctaagctaagccgcaaagaaactggaaaaagataaataagaaaattccttccggttgtaggagtcaatttctagaatccgtagcaggtcgttgttttcctcatttctttaagccgaaaggtctaatactgaggtttcctatcaagccaaggaagtggattcccggtacgaaacgatagctattcttcctttgctttgctaccgccctccgaaagaaagaagttaatccgtagtaaccacagaaagggaaactatttgaacaagggcaagcgaaccagaaaaagcatttgaacaactcgcctctatttaagttcatttcttcttcactcgattcctattctttttttcttttgcaacctcggctcaaagaactgggtcacggaactctctgcccttcgccccttggcttggctgatttcaaatacaactatgtggtctattgagacttctaaagagacaactactcggtctataccataccctactctttagactgagactcgccaacttaaccaatggcttagagggcgaaggacaagaaaggaaattggtcacttacaagaactaaactctttcccttccggctctgctttcttccgagagtcccctttctttcttttgttctctcccacttgtgaaagaggtgcttcatgccattcaactctttctcgtcaacctataaccaagtaagtttcattcacttcttgaccaaagctctatcctggttcaactaactttctttctctcttctttcttctagaggaattgagtcgttcttttcggtttaagttcgttactgtaccctggtctcactccgaccacgtactatccgagacctctgtctatcccgacatggatagaaattcatagttaggttagacagcctggtaaccccgacaagtggggggctccgaactttccttatcatactattccgccagactattctatttcattcaatctccattcaaaaccgtctatattcccggaacccataatctgacgattctttcatatgattttttttcgtgaattcgacatcagtgatccactaccatcctttcagctttccattccaaaagggaatagttggcatgtggtccgtccttagaaatacccgggaatcccccttcttgttcttcgagctcaacaggtcatgcttctttctcagttgcgcgattcctaactattagaccctagatcagaggatgtaggtgagtctgattgttctgacttctactgttgtaagttgtcttaaggcgcctttccagttccagcccaataggggaactctccggtgaggaggatcccatttagaagaaggaagaaaaacctacgtatcctttcgccgggagctagggaaaaagatcagtccaagctaggatccgctctcggaagtcaaacttctcctctgcagctaggtcagttcgggctacgatccttcgagcagggcagttcatgagctgctatctccgaccgaggttaggtcttcttttgctctgctgctgttattcttcctccaacctacaggccaaggcttctcgaagtcaagtacatcaaaggtaggggaagaaagggtcatctcatgatggactcaatatctattatcttgccactcacttccctttctccaaatctttcgtttcaagcgaaaatatactaaaaaaagtcataagagaatagacatataaacaagtaaacccggcccaagaagaatgtaccgaaacatcatacatatcagactgaaagcttcgtctaccctttctcttgtgaaaatttctgtattgatagacctgtgtgacactagccaatcaattcattcaatcgacgaactggtcgggatgataaccagagatttttcctgttcttggagctcaatcactaaggcaggctgctttccgagtctccccatttccgtattttaaaaaatggggatcccccctctctatcccctgctagctggataaggtgggttgttttctcatagtctccatttcgagatggtggatcgggctaatcagactggagctgtctggaatggaaaggagggatgcttaagaattcctttggtagtaggtatggggcacgcttctttcaggggacaagctacctgaggcaagtagctagttgactgtaggtttagatagagcacgctagcatagattctaactaattttctatctccggtcttggtcttcttcttgctaggcgagtgggctttggtggatccgatccaccaataaaggggtgcccccctgcttggggggttgttgtaaatcactaggagggataagaatgtatgagctgttagctctttttgcctagtagcagtagcgctaagctgtcttctctttgtaaaggggagagctggatggcgaacggggtctttctttgggaattcttaaacagtttaagaactagcagggattttagcttacctagggttccctgccattgatctagttcttgggatgaaatgactattcagccaaggtatgtaataattctcactagtactcgagcctgatgaaagaagaaagagccctaaacagagaggcagcattgctagtgaatgattttgtctttttagggaaaggtggaattcaaaataagatgagcagcgtatagtccgccggggatttgggaacgcagggaagtgtacttgactctggaagtgctgctagtcgaaatctactttgtccccaattcttcgcctacaaaggcttagcctaattggtgaattgttcgtcactctgaactgaagactttcttctgtggtgttcccactatctggacttgtgtactttcagccgttcaggtccgagaacggtacaaacgtacaaagaaagtggggtacactgtgaagcttactgtttttggtctccatgaaagggaatatagagagaaattgtatatacctgttgagcgaaatatcttgtccggggaaagaaaaaactgctcagctccagtgactttaaaaagcggaggcgcccgaatcactcctttttccttccgagagaatccactaacccaataccccaaagcgctttcctctgaagtcaacttcctcagaaagcaatctaccttcctatgctgaatcaatcgttcagtgatcgctacacttgattggggcaggctacccacactgttttggctaacaacccatcttcttgctgttcctcattacctactcaaacacgaagaattggaaggaggatcgggaaccagctaaggcaccgtagcgtggcataactgacaggttatgttctatcatccgagtccctcattgagctgttgctccccgggaacacgaagattatacatcaaccccttactataaccagtctcatctctctgctctaggagtcaagattaggattatttaccccgatcgtgtgtaacaagagatagactcattacacaccggagtttgaagctcctgacggaatggattttccgcttcttcctcacgttgaagcagggaaatcctagcccttgaaagcaagcagcccacttcggactcgctcacaggagaagcacgtacctttatatccttcgagaagactaagcggtgagctcttacttagagagagttgggtagagtcaatagctctaagatcacatcggattggtccggctagatctttgtgaaaaaaagcaaagtgctttctccttcacttcaatgggtaaagaaagaccggttgacaccgcttttcaaagattgattgttagcagcaagcaaccttgccttttccctttgattacagtctctcaactctcactgtaggaggcttcgctccctgctgaatcagtcagtgaatcaatagtggatatcgaagagttcgagtagtggatctcgaggtgttcaatctggtcgtggtgtgtctgatggttgagctccgcctttgatctgcgactcccttgccccgagcgctgggagaattggctcacccgggtaccactgttcgttttttctttttactacgtgacagctggatcggttcgtgcggagcaaagccctactttggttggagagaaatccttcagttgcgctattctattggtgtctgaataggaggaacatgataaactattgcctgcccctaactatagaagcttgttgccactgtcctatcaaagaatgagagatagagttcagttcccaggtaacctcaaccgatatatccgacctcacacacttggttggaaggcccgcctgttcgtcttctaccctatcctatggtgtctattgccagatgaaagagtcctgagagcaggacatctgctcatcagtggtcaacatttaggaagcggtcttcttcccgaacagcggaaggaagaccgctggccggctagctcttccaccctagacgggccattgctcgggggaagcgggcccttctcagccccatagccaccgttccgaaagtttgaggaactcttctattatggaaacgggggtttaaacctgagtacagagccgcagagctgacggaggaggcttttgcgcggctcaaagcggcgctcgtctcaacccgccgagatccgctgcaagaacgcaatgagccggcgccgagtgccccgaatgatgcactaaaacgggggattgggggacctaggaagcggaaagccaacagggctaatccgaaccgtgagggcctcacgaagattgtacagacagtgttacaatctctcgacaaggacaagggaaggggctaacttattaaattttcatttaataaacgagctgaagatcaaaatgtttattattatatatttaaggcctcctgtcttactttcttccttgccctcttgagtaatgggaagcgggctagtccccgaaaatgcccgttcgcttgtcgttggggagaaaaatttctaactcttttccggtatgccgctccgcttcttcggcagttacgcgatgagagcctctgcacctccttttcttcagcagttccatgacaaaggcttccacgccgtactttctttgggccaaggatatgcttcttcaagccaagcgtggtttaaatgaaagtcaagaaaatcctcttttatcaaatcgtctgtgctcacgaatcgattgtggaagcaacatgaaaatgaaattacattgattgtaattatagtaacagtcaacacagtagctgtaagtagttttccaatcgctatgaagttctaattatgctacttaagctatatgcttaacacatgcaagtcgaaccttgttctcttggaaacgattttagatttcgtattgaaaacagagctcttttatcgcggaattctccattttattaagattaattgaattatggaattttctcccagagcagcggaactaacgactctattagaaagtcgaatttccaacttttacacgaattttcaagtggatgagatcggtcgagtggtctcagttggagatgggattgcacgtgtttatggattgaacgagattcaagctggggaaatggttgaatttgcgagcggtgtgaaaggaatagccttgaatcttgagaatgagaatgtagggattgttgtctttggtagtgatactgctattaaagaaggagatcttgtcaagcgcactggatctattgtcgatgttcctgcgggaaaggctatgctagggcgtgtggtcgacgcgttgggagtacctattgatggaagaggggctctaagcgatcacgagcgaagacgtgtcgaagtgaaagcccctgggattattgaacgtaaatctgtgcacgagcctatgcaaacagggttaaaagcggtagatagcctggttcctataggccgtggtcaacgagaacttataatcggggaccgacaaactggaaaaacagctatagctatcgataccatattaaaccaaaagcaaatgaactcaagggccacctctgagagtgagacattgtattgtgtctatgtagcgattggacagaaacgctcaactgtggcacaattagttcaaattctttcagaagcgaatgctttggaatattctattcttgtagcagccaccgcttcggatcctgctcctctgcaatttctggccccatattctgggtgtgccatgggggaatatttccgcgataatggaatgcacgcattaataatctatgatgatcttagtaaacaggcggtggcatatcgacaaatgtcattattgttacgccgaccaccaggccgtgaggctttcccaggcgatgttttctatttacattcccgtctcttagaaagagccgctaaacgatcggaccagacaggtgcaggtagcttgaccgccttacccgtcattgaaacacaagccggagacgtatcggcctatattcctaccaatgtaatctccattactgatggacaaatctgtttggaaacagagctcttttatcgcggaattagacctgctattaacgtcggcttatctgtcagtcgcgtcgggtctgccgctcagttgaaagctatgaaacaagtctgcggtagtttaaaactggaattagcacaatatcgcgaagtggccgcctttgctcaatttgggtcagaccttgatgctgcgactcaggcattactcaatagaggtgcaaggcttacagaagtactgaaacaaccacaatatgcaccacttccaattgaaaaacaaattctagtcatttatgcagctgtcaatggattctgtgatcgaatgccactagacagaatttctcaatatgagaaagccattctaagtagtgtaaaacctgaattactacaatcccttttagaaaaaggtgggttaactaacgaaagaaagatggaactagatgcattcttaaaagaaaacgctttgccttacctatgatgagatgagtcaaattctaaataatcgaaataaaagccccgttctctttgtctccgggcttttcaaaagcgttttactccgcattcttccattggtaggaagaatgttgttgttgcttttggtaacttctttgatccccttttacctcatacgaggaaatccaattttcccgtattcaagccgaagacctattcgaggtcaaggttgatataatcaaaattatggcgggcctcttacaccagactactttcactatatatacaggacaggaactggtttaacaaaatgagtcgagaactacatagatctgaaaccttcttccttggtctgggagataggttatgcaggcgtacaactgttcctaggttgtattcgatcacgaatgggtaaagaatcgattagtagtagtatgcctgatattgccagaagaccttttcttctttctctttgaaattggaagaggttcttgattaaaaactaaaagtttcttaggcctgggcaattcctttgatgaggtacatacctcagtccaagacggacgcggagctctcacctgggtaacaatctcgcgtgggtaagaagaaagcgtcaaagccattcaaaaaggcgcactaaagtcaagagcatatttatacagtgtgataggctaggacattcaatatattagcatctcaataactgagtggaagtggctttgtgagtacctaatacgcatattttgtaaggttaagagtgataacacagggcttttcaagctggagaatcaaaatggctgtcagccaagaaataagcccctttttttaaggcctagcattttatttcccaagatggaaaatagaataagtaaaggcaatatgttgggtaattaatattgcatctttgcagtcttgtaggatatttagtactctttctgcttctgtgggacatttagttcttttcctgtggctaagcagttcttttgtttgtagcttcttatgctagaatagaaaagtttttctttttttgagtctaatgaccaaacaaaaaaagggtttatggggttcccttctccagttgttccgcgaccaattcagggctaataggtaggctgagaaaaggcccgttgtagttgggttccagatgggtcgcatgttcatatcagacgtcagtggccccccggtcaaagtagtaggcgccctccgcttttccagtactataactatatagtaggactaaacctatactatagtaggataaatagtgggtttccctttctttagtggtggccacgtctcttgaatatataggacttggatttattggatataatctaaaggttctcatatctcgaaaaaatgaaaataacatatagctcccataaaagcctatcaaaagaaggaaaaccaccccagttgggtctcagctttccttccgttcttctatagtgggcaccaaaacctatcatttattggagtggagggcgcagcttcccatcctcattccgaaacaaagggagtaaggccacttgtgacctatcttattggtccaacccctactttaagaggaaagcacaaatccccttttcgtttagccgatatctcttgaagtatttgttttgaaaagcctgcggtcgtcaggcctttgatatatcatttatctagtgatcgagaaatgcaactcgatcagggtcgagccaattattgtaatgcttcactcacagctacaagactttattggtccggttcgaatcccttctgccttaaatagttcgtacgcatctttttctttgccttttgtgcagtagggtctttagacacttgagttgctgcacccctggtatgatatatactcgattactcatacttgattgcttgatatatccatgccagtagggagggaaatacttaattggcttcgagccgcccttctctttttgaatatggaattccggcggggcatatttctttataaaagaaagccctatttttgttagctgttagcgcgcagtagcccatctcatgatacggagagagccatttgatatgagtaacaattagtttcctttcaccgggcgtgtggcattaagagccccttgggatccttcctcatcaagagaagagatccactcatgcatagcttcgactaagaataataatacaagggagtcctctttttcgaagtcgccctaggttccgatccaccatcggtgagacccctcttgcttaagtactggttcccttcactaaaagaaagaactcgttgagacttggtccattgttaggagaacctcgtctctccctctctcacctcaaggtatggtttgggccctgtggtggtgcagaactaactcgataagatcaataagattcaagatccattgaatcctcccgtagagtagactaccgacctttattagccaacctcttcgattgatcaagttgagacaagcaaactatgtatggcttgggggttagatacgagggacttcagaagactacacctaagcggaaactggcacctgagaaattccaactcctgctgacatattatttacccggcgggtaatagggagaaggacttcgactgagactcttgaaacatcaagtgcgcgtcctatcaaactatacctgtcgcactataacttttgctggggtgggttccggagctgaccacgacgtattaagtcaccaccaaaagggcttattgtgcatctccctttaggcgcaagaggcgccagcaaagcattctttaatgaatgcaagtgggatgctgtccatctcaagcacgagccgagctgcctcacgactgactttcaggctcgggctcatcagacaccaagtccttagtcgcagctcacaggtacgtaggtccgtccatccgttcccttcccactgccatttcccgctttcctaccagccacttcatgattgtttcagaggggagcatctacaacccataaagaaagatcttgattcccccgctaagttgcttgttataccgttcgggcccaatacccattcttcactcacttcagagagggttaacaagcttcttagtgcaaggagaaaagaaggatctattctctcttcctgcgctagccgtagctccctagatacactaattcagtttctgaggccgctaaaggttctataaactgcagagagttttcttccccccccccgtcagagctggagggaggccctcgcctacggtgttatagctactgttccggggatggggataaggagagggggtatagaaagaccattacaatatcgttatcttatctttcaaacttcctaaaaggctttgctttataaaagcccttataggtctttttaagtcttcctcctttcgctcctctcacattcgttcgaataaaaacctgcccctttcctctttagggctcctactgctgcccggttcttttgtcattttgaatcggaacaggcacaacccagttcatccgattactacagggattaacccaatccgaaatatgaaccggaaaagaaaagacctattgaaccgatcacaggaataccagttacagtacctatccgccaaagaggaatcctgcctgtagtatcggccatttaccccacttccctccacatttcatcaagtggtcatgctagagacataagcagtcatggagaattatgagatgatatccttgataagagaattcctactattattttactattctcttttcttctcttaattgaagaaataattggaaaataaaacagcaagtaaaaaaaggagtaataaccccccagtggagagactggtacgattca

SEQ ID NO: 220476 - DNA, 3590 bp, Cannabis indica
acccccaagcttccagaatgatgcgtatggtggaagcttgtttcactccttcaatatggacatgtggggatgaaggataatatcatgactttttaggtgttactcaattgcaaatgctgacttctgtctttgattgtagtacatcctcatgtcaatggcatgatggtggaagggcacgaccatcaaggagttgctttccaaaaacggttatattttgatggttgttcacttttctggcacaaaaattgaaaaatggcatcttaatcattgatttatgccttgatttcgtagagcattaattgtggagacgcacgtggatcgttgaacttcctagatgttggatggaacttgtgtttctggagattgtattgtggatcatccatcctttttattgttggaggaatttagacaacaccaaataaaataatatatttaaaatttaaacaaggttatgcaatgactctacccagaatggcgagtatttaaattatggatacacagacgtactggaaatataaataacacaaagagaatataatggttcagtcaggtcatggtctgcttagtccactgttgcaagggttgttctgtcttgtccatttcatattggatcactgctttatatacaaagcaagtgtcctttgaatacacagagattgatttaattatcaatccgttagtacattgaatataacatttaaatcaataaaaacataaatagaataaacgaagaaaagtttcgacccaattcactaaatacagcaacgtatgcaaccttcatggtacgagttgtctgttcatattctcgcatagctcgcaggctcaagatgcacacaggactaatcatgtctaggatgtctgcgcctctctgagtcacatatatggacatttggtaacaggttgataacttaggacatgcgagtccttatctggttatcaaggacgttcgattatccagactagctcgctgagtacagaatcgatctttattacttcacaagaagatctttatagttctcgcatatatctcggtatgtgcaagtctaacgctcgagcttcggttctgcttcgtgcgatctataggaatgcgactagactctgtcaaggtcacatcatcttgctgagtctggttcaggcaaggtttacactcaagaggtctgctgttgacatctcaaccctcctcgaggagattttagtccacaagtcatttttatgggagcctggtctcgagtttctaggtggagaattctcactataacacatgcccctagttttgaaatcgatagctatgtcacgagggaaactataagcaagaggtaggtgaaaggttgtcacgagatggtcacctttggttgtctaattgagggtttcgaaaagacggttgtaatcattatttttaacccatttggggtgccacgttatcgaaactgttcagagtccgtacaggtgtggttatggataaccggttgattgggagaccttaggcattcccttgccacgtgtcttcatccctattaatgagggataatggtatttaaaccccctgatcgaaatgatccttcattctttttcctctcatgtttatttttctccactatcttctccgatttttgaattctcaaaaatctcctttacattttaccctaacttttctttgtcaaaaaagaagttaaaagcgcttgatatctatagaatcgttcaaagaagatttgcattttcaaggttagtgaaaatttctgcaactgcttccttttcttttgagagttaggatatatgtgttgaaattgatttgccttttgaaaaaatatgaatttctttgggaaattaatacttgaaacttgaataatcacgagtttcaggaagaacaccttgatgttcgcatatttctcgttgagtatttcgaatactcacgagttttgtgatgaacatctcgaatactctcatacaattctgaatatctagaaattatataatctgtacaactagctattttaacccaattagaaattaaatattcttagggtttattttctagcctttagattatatgtgcttttattatgaaaattttctgagtcttttaaatggtggatgtgccatagcaacttaattttcatgcacaccttcgcatgttccttgggttacagtgacccacccaaccatttgagacatgcagccagctttaacttttcttgcttcatagtcgcatattgggactaaccaggttcttcgaaatggtgggggtgtcccattaactcaatggtcatgcgagggatgcatgacccttggaattatgggaaacccccagccatttcttgaggtacacagttagttgtatacgtgcgacttatactttttgaggattgtctgaattgtcaaaatagtgggtgtgtctcactaccttaattcttaggtaacgacttgatcgtcatgctattgagatacacccagccatttcttgagatttcttgctaatcctttatattttcaaaattttatgcaggtgatggcactttattattctcggactttcaccacactaaaaagatcttctatctttctaatgagcgacctatcgaatagctaaatgctcgactctagaggtggggctttcgctgattagttggagaagagcgacaacttcaaacccaccttgatttctaaggaagaaaaccctgctacctgggctcgtcagggttttctatctatcgatgagatatataggatggttcaggaactcgctgaactagtaaaagttgaaatttgcaatagtgaatctacggtgtcagcccaagactatctcgttcactcgagacaagcccctgacatcgaggtcgaagaaatgggggaagacttcgacgtacctgattgcaagtttaaggaggagggagatgctgagggaagtgagacaaattcagttgataacactgaactgacgaaccattttcatgcgaagatctgatctcgcgagtcacaaaatcagacctacatacatttgcacggttgaatttggttcgaatagggactttacggctttcagcatctcaatggcctcaccttccatttactaaccctgcgattatccccacgcaagacatggtggtcttgattccttttctgcgatgcggggtaacactgcctttcatctgtttgtaaaagctatcctcagacattacgatgtttccctcttccaactaactctaaatagttatcgcataattctagggttttatgcgatatacatgaaatatgttgaaggggaaccaacaatggaggactttagctatttctataacataaagtgtaaagaccgcttagctttaattttgaaattagcagataattagggtttaattatgaaaattatttaatggtattgaattaattatttatgatgattgaattcagaatgcatttttatgttgcatatagaaatttcataattttgcatattttggtgcccggcaatattggaacgcggtgtatggctattaaaatcacatcttagtatttttagtttaacggggcgatagtttagacattgggaatgtcaggaatagtcggaattttagaattttcccaaaataccc

SEQ ID NO: 220477 - DNA, 3533 bp, Cannabis indica
gtaaaacccagcttaataagtaaggcccaaagtgtagctccaatcccgagattgataagtacacagttttatgattaatttaccaaaaatacctgctaaataaattttgttgatatataaccacttttatcaccacatttcccaaactaccattacttattttataacacaactatttttctcaaactcacgaccaccatcgccaccacctcctcctccaccggccaccaaggctctgccacaaccactactgccccttctcctcaaccaccagcgttgtctgcctccaccattgccacctgaagctgtgattttcttggtgagttctgaatttctctctttctccctccccaacccaagtagtttatctcaaggaatatgtgtggatatatatatatatatatatgtttgtatgtatgaagatcaattcagccattgttgtttgttgttcttgtgtatgttgtattgtgccatattatacctaaactaaaatgcagtctagttgtttgttgaaatgtttattacatatgaagctctcttgtataatgttaatcatgtaaactatgatgataatgatgatggtgatgattcttggctctgtttgaaattatgatctgcacaatctcatttgggattactctagtgttttactgaactagtctgattaatcatttctttttcttttttgttttatctaaatgattgttttttgtttactttgttttgggtcagcaataagaaataagtgattaaattttgatccgttgtgtccaaagaaatatatttggacttgatgcaagtggagtggggttcaggagagtgagttaagaaaaactgtataagaaccctgacatggaggtgttcgtggtatgatttgtatgagtacatgctagtcagatactactcacctagcatgcacctcaactctgatttcatttagcaaacaactatattttggttataatttccttttgggttcattcttgttttatgggtttccctctatgtaatgcaattgctgttggtttgtttgtgcttgttgtgatgtaccccaacaactacggaggcttcaatgatttagtttatcaacaaaatgttaggctaagcagcttgagttgagattgatggtggaaacattatagaggaattattctcttagtctaatgtttagagaagtaattaagctgctaatgcacgtttcaatcatttgttttgtatttatcaaaagtcagtgaaaagtgtatttagtgagctgatagaataaatgtttagagatgtgttgtttgatattgatggtggaaacattatagagggtgtaattcattttatgatatatatataatagtggtcttctctctttttggttctactttataactacttaaaagtctaattttgtttttcttcctaaagttgtttatatttcaaaccagcttgtttacactctggaaggaggcttctttccctatatacatatttgattttattgcagaaatgaaatcaagaatattgtatgtgattttttcacaactcgatatatctcttctaaatgatgtttgctgtctttacatagatccaactactctcaaaggatttacgtgtggtggccttcttcctcttttttatgtttttctttatgcggcagtgatgaatgcacaacggtgatgggccttgctgggctaggacaaagtggacgagtggctggtgtgagcagatgtggttgacaatgacacagaccaattcatgaaactggttgttcgtttttaccactcttttaaaaatgtcaaagagacgagtgtttgggctattggaagaccagggcttgtgcatgattgcccatttctggctgatgaattatttggaagagttttggatgaatgcccagatatcaaaacactcaagaaactccatgccaagatattttttgaccagtatcttcatcagaacccatcactaggtattaagcttatgagggcttatgcagccaatggggaaataaggattacccgccacatatttgatggaattcctgtgaagaatgttgtcttctttaatgtcatgattagaagctatgtaaacaattatcggtatgatgatggtcttcttgtttttaaaacaatgtccagttatggattcataccggataattacacatacccttgtgtcttaaaggcatgttcagcatcccaaaatttgtgggttgggttgcaaattcatgctgctgttgtgaaaattggacttgatttaaatttgtttgttgggaacggcctagtttctatgtatgggaaatgtgataagttattggaggcacgacaagttcttgatgagatgccgagaagagatgttgtttcttggaactcaatggttgcagggtatgctcagaatgcaaggtttgatgatgcattggaaatttgtcgggaaatggaattgctgaggcaaagacctgatgttggaacaatggctagtctattgccagccataactaacacatcatcctacaatgtctcatacattaaaaggatgtttgataatttggttaagaaaagtttggtttcgtggaatgttatgataacagttttcgtaagtaactcaatgcctggtgaagcagttgatctatttctacagatggaggattgtgaaatagagcctgatgcagtcacaattgctagtattcttcctgcttgtggggatctttcagctctgttgctcggtaggcgtcttcatcgatatgttgacatgaagaaatttcggccaaatttactattggagaatgctatattagacatgtatgctaagtgtggctgtttagaagaagcaagtgaagtatttaacagtatgaagtttcaggatgttgtatcatggacttcactgatttcagcatatggtaggaatggacaaggtagtgaagctgtggcactctttgctaaaatgcaggatttgggtatgagtccagattccgttgctttcgtgtctgttctgtcagcttgcagccatgctggattgctagatgagggaaagtactactttaagttgatgactgacaagtatcaaatagttccaaggctagaacactattcgtgcatggtcgatttattaggacgagctgggagagttcacgacgcttataattttgtcaaagagatgccaacagagcctaacgaaagagtttggggggctttgctgagtgcttgcagagtgtactcaaacatggaaattggacttgttgctgctgataaactctttcaaatggctccacaacaagcgggttactatgttttgttatccaacatttacgcgaaagctgaaaggtggcaagaagtgactagagttagatcaattatgaaaagtagaggaatcaagaaaactcctggggtcagtaatgttgagctcaatcataaaatttatacttttctagctggtgatagatcacatccaaagtccaaggagttatatgaagagttagatgtattggtggggaaaatgaaagagatgggttatgttcctgagactgattctgctcttcatgatgtaga

SEQ ID NO: 220478 - DNA, 1506 bp, Cannabis indica
gaaaggaaggatcccaaagaatccacttttgtttagttgttgaatctcattactaatgaaattaaaataaaatatggatcgatcagaagccaccatgcacaggttcaatttctatcgttagtctataagtatttatattttatttaattatttattaactaacgacgagatttattatcattttttgcatatgcacggaaatttaaatgaattattgatgtaatcgaattgaattaatatcataaataacaatatttgacaaatcgatgcatcgttagaaattgaatagtataacaaggaggatcttttatccataccgaattcaaaagtaaatatttgatacaattacgataaaaaattactttgctctcttgttatttctattttttattcttttccacccattattttcgataacctaccaccctctttgtacaatcatttgatgaagtattatctagtaacaaatttagcacaatatttatcgaatcattagagaaacattttatgaaaaaaataaaaaaatatagtcttacatcacaaatttagtactacattggcgatcctcttagctatgtttttggttttgttaacgcagattttcgttaaccaaatttgagcctcacaatagtgattcacacagaaacaataaaagctgtaaaaataaaaatatgaacacagggttttctatgtggttttgcagttacaattctgcatagtccacgagtcaatcttatacagatttctgattgttttcgggcctcgctaacgggatgaagttataggaagcctttccgtaacgagacagacaccttacttacttgatctcaagccgatccgactataacacttagtttgtacactaagggctttcgcaattgatatatgtcgcttttgtcttcctacatgtactgtccttgatgcctctctattcacattcagcaacatatagtttctcgctaatatactaagcaccagtttgtatattgattcctcgcccaagaccttacagtctgcaggttacaaatatactctgacactcacgtaattaatgagttattccatataaagtgattgcatcgatccgtattccctttatcttgacacatgtcctccactgagatggcagccaaattttgggcataacaattgccccttaaaaagttcatttttagtaaaaagtgctttttaataattacaaacggcatcttcgtcaaaatctcttcttggaaaaaacgcgtcctttgattctggcggttgtacggtttcgagggtcataatgaatcgtcccttcatattctgccccactcccgatcgttagatttcccaatcctcagctttcttgtcattggactctgtgtataaaaaggcggctcaagcttgtcatttttcacaaacctctggctttttagtgagatccattttcagaatggatcatctctttcttgctagaatgtccctcctgagttcgcaagttcactcccccaaactcataataccaggatg

SEQ ID NO: 220479 - DNA, 2196 bp, Cannabis indica
aacactttttcaggttaagcttcatattgtacttttttaatatctcaaagcactccgcgaggtcagttgtgtgatctccactctttatcgactttaccaacatatcatcgacgtagacttccatgtttctttcaatttgtctcacaaacaaagcccactctagactaagcaagtgagtcgcacatgggattgtggaatggagagtgcgtgtcacaaggacgtgtggaggaagtgggggacaaggtgttgcactgtgggatccgcatgcaaaaagaatgtggagcttccatgtggcagtgtgtggagaaatttgatcgtgttttgggcctcttggttggacttctaagatagtagtaattctttcaaaaatactaaatcttcataattttgggccatatatttgccattctttatttctgcattttttatttcataaattctatcttttacttcaagtcaatataaaattagattcaaacaaaatatttctataaaattcatcgcataactagttcttatcttctctagtgtgcttgtaaatctctctaagatttggcattgtgttttatcttattagagagagtttctttatattccaagattatatattttttgtattgaggtgagagtggcaccagtattgaaaaacaacccggttataggtcaagttggcaccggtattgaaaataacatggttaggagagattgacacttcaacaatccggtgagattgaaagtccttagaagaaaactttgtgtgaggtttgggaaaaaccttagtgtagaattaccctgttgtaagggtcaatcaagcccgttaacttgactcgatagttaaactcaaaattaggtctatagctttgaagacaaaggatgtaggttaattagttttaccgaactttgtaaaaatcgagagtttacaatttttatccctaactctttacatttcaagtttaatatttgtttatacttgtgtttagctatgtaatcgccctgaatttgaatatatgcataaattgttttttgagatttttaaattttcgattcacctccttcgaaacatatatttggctaataatatttgtagtaatatgttacttattttacaaatgtttttttttccaatgtgatgaccaattactacaatatttttttcttacttatgttgtagtaactagttaaccatatgtacagtaatggttactcattttcatatattttatttacagatgagataacaaattaccactaagaacatttatgctacagtacctagctacccatatttataatatttaaatattcactttttgtacattccttattgatttaataaccaattactattacaatatcaattgaatttatgttatagtaactggttacccatatttatatatactagataatacttataacaaaatcactaatttttaaattaaattacaaaaattaattatatcacataactaattaaaattaataaaaataaatcagttatatattaaccaaattaaagattaacacataaaaaataattacatgaaataaccaaatcaaaaactaaaatttggaacctagttatgtaaaataagaaaaaccaaaaatgaaatacagaaactaattacctaatacaatcaactaaaaaattcaaataaagacataaaaacactagcattagctgatgtaaaagtgtttttttctttaagatacaatagagagacaatgaaagagcactccatcaacttctgtataacaaatttattttacagtttctttaaactttgcagtacatctagcgagagaataaagcttctgtaaactttttttaatatttatctttcacctttttttttctaaaagtaataatattttgtttctatttcttactttatgtctttattattattattttaatgaataaaaagttttgaatatcatatttaatgatatggagagaaaaaagtagtaaggttgatatatggagaaatgtaaaaaaattgatgtgaaattaaaaaaaaaaataaataaatagaattttagtgatgtattttaaaaatgaatagaagagctattaagagtgctctaagactcctagagaataaaaagataaaataaaccacaacaaaatgatcaaaaaggaaagagaaatgcaaaatgtaactcgtgataaaaaactaagtaacaataaaacta

SEQ ID NO: 220480 - DNA, 2063 bp, Cannabis indica
agtgtattaatgatgctttcacacacattcttctctatgtgcatcacatccaaattgtgacaaacatataactctttccaataaggtaactcaaaaaagattgattgtttttttcacccttcttgagcatcactactcctttttcttttctttgacttggattaaccccatacatttgcaaaatttttgagatgttcaaaaattgtgttcccattcattatcttgtcaccttgtttaatgccacatcattgtaaaaaaggcccgacgtacgaggctatagaagttactttcaattcaaaaaaattggcctcaaattgcattgtaggcttttggggtagtttaggtttgcaagctttggaagggaccataagttagaaatctaaagtacttgacaataaagcaacgttaacgaagggtaaaaacaaaagtgtgtccaaagggtatttagtaagatgaaaaggcttgggccatgaggcttttcgtagacaagaatgtttaccctcaaagtgttcatggattcttacatcattttttcctcaagttttattttgaggatttcaagatttggtttaaaggataaagcaaaagaaaaatgaatttcatgatctaaaaactttaagttttcaagttcaaagtcagacagattcatttttcctcttttgaaaaaaggagaaatgtatcaaaaaaaaacttcacataatttgaaatacaaaaactcgtagttacaaaggtcctaaaaatcactaaaagcctaagttaactcaaactagatttaaaaaccttattaaaatcataggttcaagaaacaaaacatatcataagatagacataaagggaataagaaagcataccatgatgaaagattgatgatggattggatgaagttttccctagagctctacgaatctaggagtcaggaatgaagcatttcttggattttaaaaaaatggttgtagagattcaaagaaatagcaaagagacaaaaagggcatacacagagaattaaaattggaaatttcaatttctacacctcttctttttttagacgaaaatagtagaactggtgataaaaataaaaaatgctagtcatataacaattttgtaagcaccgttcgattaaagagaaattaaatcaagggtgattaacttatagatcagttgaaaagacaagtatttattgtaaaagctcgtgattatctttctattaggaagacaaaaactgtcgaaaacccaagaagcttacttggtacactagaaataaataatgcaacccccaaaaaataatgatgattaaaaagtatttttcaaaaatttaaaaagaaaaatactttgtagggagaaattgttatgctcatattcaagcattaaatatggacatgacacgtggacataagcctcggaaattatgggaacctataaacgtgaagaatgtgatagttttctcacctcgagatatgctacaattaatgatgcatttgtctcgcgatgtattataatatggctatcaaataaaagtgataatattataaatacaatgattaacaagacaacatcataagttcatctcagacttaatcgaaataaatgagacatgtatagaatatgaagggatgagccactagatagggtagataacgagttctgtaggagcttgcaacttatcgatctacatactcatgaatatattgaaagactaagggatatgagcaaaagaggattcatctcgaaaagctcataaacaacgtgagaggattaactctaaggagcaaaatagatacaatcctaagggttatcttaagacttgtcttagacaacaaaagtaaagaaaatacctcaactagcgtctcgcaaaattcgcgtagtcattcctaacattattgaagaatgtgaggcatattctgggtatgttatctcgaccatgaaaatgtttttaggtaaggataaaaagtggttatagcagttaatttatttattctacatgttgtaaatatgaaacatgggcatgtttcctaagcaggtgttgtcaagcccgcttagttaatttggaaattagcagttgttta

SEQ ID NO: 220481 - DNA, 1799 bp, Cannabis indica
gaaattagagtttcattaaataattttagttgtataaccaaaaactacataaggggtaactaaatcccatattcactttatgatctttgaattcgtgttacgacatggctttagtcaaggagttttcccttgactccttgatctactcttggctgtattagcctctaattcttgtggtgattctttggtaggtcttcacctttcaaataagttaacgaatctacctctatttaagtatgtatacatactgcctctttcttctctcctatgtccttatggtggatgtggaggacaaccagatcggttaggcagttcattgtttgtattttcattatttctttgagacgtatgttgtccccttgcttgcgtttaccgcgaatttgtggcaccctgagtcaggagacctcgtccatcaacaggaaagtcccttgtttccctttgttgttgctcttgggtgagtgggattatttagctcatgttcttcgatgttgggtccttgtgcccttcttgttcgtgaaccgcagggccttccttactgtcatcgtgcaagttgctcttcctgcactaggagtgcatcattttgagtcactctggctgtagcgatggcccgttccaactcctcatttctttgaatggattcttcaagccatcgatggagttatccatctgaatcccttctcttaagaatttcttcctcggggtcacttctctcggagttcctctcaataggaccccttccttggttggtccgagttagtgccccctaggctcttttcctggtcgacgtgttatcacttctttcatgaccgactcgtcacattgagtattttccatgatgtaatgaaataaatgagagatgtgtttcgagtttttttacaaaggctctcaagtgaaagcagtaaactgttaattctgatttttgttaacaataaatgaggccttgtaaataaaagttaactttttataattaataaatatatatatggaacactaaaagtttttacgtggctttgtagttaaaatttacgtactccacgagtcattattatttttgaatatttttttggttatgtatatggattatagaggaataactatgagtatttatttaattctcacagggttttccttcccaaaatgatcgatctcttttcccttaggttcttataggggtttttactatgacagttattctttttgatcttaaaaagataatcgttcatgaaacgtagactatccccacatttcatgtgttacaaaatgtggataaaatgaattaactgttgataaccgtcttttgatcttatcttgaagtagtcttttgttgccgaggtagcccattccaagtatggctcgtatctttcaacggtgttcaaggatagttttttgcattttacgagatgttagttaagatatttattctcgctatagcctttccaaggcagctcttagacttagtcttttgagattttgaaataagttgcattttgcttatttcccttaatctttcaacaaactcatgagtatgtgggtcaatgagttggaagtacttaaagatatcattatctaccctttccagcgatacaatttcaatctgttacacctgagaaggcttctattgttatcatctcgccatacattgcttttctagcgatcttactgctgttgtgaccgacattacacaagcgcacgaatttttattgtagtgtagagattgtgaagaacgaggtcgaacacatagaaaatacttatttaatctaaataactaaaactctgacctagttccaaaaatggtgagg

SEQ ID NO: 220482 - DNA, 4250 bp, Cannabis indica
acgtctttgtaaagacccttttgtggatatcatataacgggctgatagaaccaagacatgcgagtcgatatcggtttatcgaggctgttgggtcatcgagaccagcttgcaatatagagaatcgatctctctgtttttgcaggaggatcacgaggatactcgcatatatcttgatatatgcgggctatagtcgttccttggtcctacataatgcgagtcattcgaatgcgattagactcggtcatattcgtatcatctcactgagtttggctcaggcgaggtctatactcgaggagtctctcattgacagctcaactttccttggggaaattgaatacgcgtgtcctttaaataggagtctggtctcgagtttctaggtgagaaaaatctcactataacacacgcccctagtttcgcgactgacagatgcggtcatgagggaaactataattgagaggcaggcgaagagatgtcacgaggtggtgaccttttgttgtcccatcgagggtttcaaaaaatgatggctgtaattattacattttatcctgcctatggtgccacgtcatgaaactcttcggtttccgtgtaggcgtgcccatggttaaccgttggatgggatgaccttaggcattcctattgccatgtgtcacgatcccaatttatgagggctattggtatttaagccttctgatacgaaatgattcccttatttccctctcatttttgttttctccttttcctccactccgaaacttcaaagataaaaaccctctctcagattgatttctactttccctcttgaatctttaaggcttctgaaatgattggaactattcacacgggggaatcgtcaaatctcaaggttagttttcgaaactactttcaaatttggtttctgattttgagaaacactctgtatttttctgttagaactgggtaattatcagaaaatagacctcaatttgtataagcgtgaattctagggagaacactttgaatattcgcatctttttacttgctattttaaatacttgcgagtattgagatgaacatcttgaatactcgcatgtatacttccttaggaattctggagatttggtcattccgacccattgtttagaacttagggctttctttatactctctatgtatttttgtgtaggaataccggttaggtctttcaaatggtgggtgtgtcgccgtagcccaatgttcatgcgtgcgatcgtatttcccttgagttactgcgatacacccagccatttgcgacataaagccagtgttctttttccttgtacattcacgtgtttcaactagtaggttttctgaaaacagtgaggagttttcgttagcccaatggttatgcgagaaaggcatgtctcttgggatacaggagactcctcagttgtttcttgaggtacgccgctagttggacatgtgcgatgtgtttgcaggttgtgattagctgaatttctcaaaatgttgggtttttctcaacaactccatggtcatgcttaataacgcatgccacttgggtcactgggatacacccagccattttttgaggcactcagctaattgcacacgtgcgatttacgccttgggagggttggctggatttctcgaaatggtgcgatacacctagccatttttggagaagccaaaccagctttccaaggaattcttatattttgtgtgagggtgaggtcacttgtattattctcgcactttcaccacactgaaaagatcttctatctttcagatgagcgacttatcggacagccaaatgctcggctctggtcgtgatgtttttgctggtgacagagactaagaagatagctttattccaacctcgatctctgaggaagaaactccagtccttagagcggcgactttgggtctgctgtcctccgaggacatagaaaggatggttcaggagctcgctgaaccggggacaatcgagattcgcgatagcaaatccttggtatctgctcgtgagcatatggttcattctaggcatgcacctgacattgaagtagaggatatgggcgaggactgggaggttcttgaccgcgagccaaatgaggaggaggacactgaagggagtggaactgattcagtggataacactcaactgaacgagcccttctcatgcgaggagttgatttcacaagtccccaaatctgacctgaccacctttacgaggtttaatttgctatgacttagcaccatgcatccccgctctactcagacgcatctttctttcaccaatcctgcgataatccccactgagaatgtggttgtttctatacccattattcattgtggagtatcgcttcccttccatccattcatcactgctattcttaagcggtatgacgtatctgccttccaactaaccccaaacagctatcgcatagctcttgggttttatgcgatgtacatggagtacgccatagggagccttcaatggaggatttcagctatttttatgacataaagaatgtgggccttcataacgatttccattgcttcagcaagtgggccacttctaaaatcaatagggtggaaggcatggtttccaatatgggagattggaaatctaagtggttctatgtatttaaagtaccaggaattaggactgactttaatcgtcgacctagtacgtcgcacttttcaatacttagttaatattcatgttaccttatgatatcgattcacatatactttctcattaatcgcatctagaccagctcgacctgctctgaacccagctcgtagagaagtcgctaaagttctcggtagcctccctgttcaagatcgcgactggaaattactatgcacgaccttgaaattgtgggaacacaaactaactccggaaaacgccagccttcatcgggagccagtatacaaggagccatctcagaaacaaaaagagaagatagacaagcgtctttctaaacagacctcccgaccaacatcaggtaacacattgtgcatatatgcgatatatatatgagttattgtttatttttaacttatcatttcttgtcttcgcagaaatgactttcctgaagcaagctcatgtgctcaatcgcaagtcgaaaaatggaacagtgacgacttctcctatcgttcctcagaaaagaaagagtgacgtcgtcgtgactcctgccgctgactcgtccaagaagcaggtgaagccttcgcaggacaaggggaagaaggtcatgattgacccgaccatcaaggcccgggattttgtgactctgcagagtaagtttgtgagcgacgagttcgtgtcgaaggtggaagtgatcccaactgaggaagtgatgtcgctaggggcggagctggccacgcaattcgtgaccgtgttttcaagggcattcgtcccaggttccgaggaagttgatcttctaaagaaacagatcgtccagcttcaggaaaacaacaagaagctgaagcaggacgcgaatgccaaggataatgaacttgagaaccttcaaaagtccaaagagcaggtggaacttgaagccaaactttctcaatcgaaggtcgaggagttgtctcacgatttggaggctgagaaggagaatggaaaaaagtagtacaaccaagtagtctccgactatatatatacgaccctgtccaagataccagattttgacttcgtaatccttggagcagaggcggccgagatggcggaagcatttcgtgctatgtcgcctactcagactcaagggtgcggggggaatctttttcccgaggacgcagaggctgcgcatactgaagagatcgctgatgaggctgctagcaaggtcgcagatgggtccactacttcaactcctcccaccgctccaaacgcttgacttatttaatctttatttctttaactttcaaactttttaagcggtacatgggtactcgcattttgtacttggacaaattttactttactttcttttgtatttcgaacagcacatatcccttcgagcatacttatttatgctattatgtatgctttccgcggtacatgggtactcgcatactttactatcttgatcgcggtttgaaagcttgagaaagctcataaatcttattataagaaattgatagtatataaacaggttaatcaatagtacaaagtgagtgtgttatatataccccttataattagaacatttatgtaaataaattgactacgtataaatacataaagagtacaaatgatacattgcgagtactat

SEQ ID NO: 220483 - DNA, 2664 bp, Cannabis indica
tgatgaagaaaggaagtctttgaaagtggatggcttatttatggatgaatctatagatgatcgtggtccattcaagtcaaccattaagactagttcgtgttccaaaaaatctgattttgatgatataaaaatgttaaaaaataagttggaattagttatatccactcaggagttgttggccagtaattttattgcgttgaggtcttttgttgatcttaacttcaagtttttgttgactgttgttcaagatattcaaaaaaaagttactatcatttacgatcgaccttctgttgaggtatatatttttatagttttggttgtattttataattcattgttatgttatagttggtttctttaatgttttattcagttgcattactattcttaaacaggtgaagacatccaataatattgatgatcttgattctgattatgatcctgctgctgctgctactgatgatgatgataatgatgacaaaggattactagaatcagagaatattgaaactgagtctgctaatggtgatgagtcaggtgaagatcgtggtgatggttctgctgatgatgatgagtgtgatgataaggttggtgctgatgcttctgctattggggaggttcaaggtgatgttgttgcaggtagtgaagatgataagtccaaggatgttgataatgtcaagggaaaagaagttgatataaagggagataattttttcaagggcttaagccagcttgagattgatgatgacccagttattttgactggtttggaggctgttacaaaaatcaaggtatgttgctttattattttttttagattgtgtttcatagtaaatgttttgtagttttatagagttttgttttagttttgaaattatcaatttttacttgttatttttcttttcaataggttccaaattccattcctgctgaggtagttgaaaaaagagatgccaatgtttctaatgaagaagaggatgacactgttgcttgtactcctcttttcgacaagagaaagtgtgccccagcattaaaatctcctttagtagattttcggtcggttgatttgaagaccagtctaatagagttaatgtgctcaggttctcaatctgcaggagatgagcgggattttaagattgttacgtatgtcaagggtcttcgtactcttgatgattctttttctaatcctgtttctcctgaacttgaggcaaagtttgatgaatagattagcaaaggattgcttaaatatcctaggtgatatttttctttaacctattttatctattttgtatgtatttgattttattttgccaattattttaattcattttttttatattcatttgtattttatatagggcctttaatgtttatgaggatgatgccaagaagttttcttcaggtttcaaattaggtgtgttgaagataaaacttggttttatcatttgtcttactgccacatgtttatcaatgactcggtaatatatttaaatccatttgtaaaatttgtagttttaatatagttgcttgttgattattttttagttttgcatttgttattatgatcttagaatgtgtgttcacattttactattttttattgtgttatttcagcacatgaatactattttctattaccttagaaaaaagaaaagttttcttctgttgttactgagaattttgctacaacagattgtctttttgatgattctatcaagtctttataccataaattctacaaggctaagtcattaaaaacaaagatgtctcacattcatgctgctcacccaatagcccattatatcaaagacttgcgaattccttgttctatgtcttggtatgaagccaaccatatttcatttattgtaaatcttagaaaaaagagccattggatttttggccgtctggatttgaatgagagaattatatttctttataattccttaaggactgccaaaatgaatgctgcagtaaggaatgcaatgaagacttattctgttttgctcccattatttttttatcttcttgggttttacaagaataggtccaatgtttctgatttgggttctgacctaaaaactccactaagagttgtggagattgctagccttccagttcagcagaaaagtaagttattgttattgtgttgtttttatattgcataatagttacttaactgttgttttttttttattttcgttgagcagtgattgcagcgaatttgttggtgcttttgtgaagttcttcatccatgggaaatatgtcccaaatgactttgacattgaagtttaccgtactcatcttgctgccctcttgttttcctatggtcaaatggaaaacaacaaaaatattgacagtgaggatgggaagcagaacaagtcttcgaaggcttctaaagggaagaagtaaggtcatttgatggggaactgttttatgctcgttgtttgatttttatatcttaaatgattatactttttaatggacgctatttttttctctttttatgctctagtttaagttctgtatgacttattgtaatcttttcttttcagacaattgttggtcttttctgtatttaaatacttaatacgtttaatattatggcaattgcttagcaactattatgcaatttgaaattaatcattctagtatgttcattctttt

SEQ ID NO: 220484 - DNA, 1577 bp, Cannabis indica
catttatttatttttttaaaaaaaatgtatatatttttttttaataaaattactattatagacatagatggactggtagactatgaagctcatttgtgggacaacagttgccgaagagaaggccagagtagaaaagggcgacaaggtaatttcctttattattattattatttattaattattttaagagggggaacagttttgctaacgtgcgccttgataaccgggtcggttcgggtcgggtacaataggtcgttatgtaatgacataatggtgtgattgggaaatgagtcggtgaatgtgacaaagagcttttgtctttatatatatcccggtttaaatgggagttatttaaaatccacgaaatatttaatagagaatatttttggtagtgaatcaacggttcagattggatctcgaaagattgttttagatttcatctgagccgtagatttgtttatttatttatttatttatttttatattggggaaatgatgatgatgatatgagaaagattctgatttttgttttgtttgttttgtatttttggaccaacttaatcattggtgaaatggatatggaacttatctcatgatcagtttatttgggtaagtaaatattctttctttctctcactcaatcttttcattaatatttctaaaccttaaaatcaaaaaatatatcctaaattagctatagtgattaatatatttgttgtttaaagaatcttctttcaatattcattctcaacatatatcattattatttagttcagatcgattataaccattatttataaatgtacttgttcaattttacataatcattttaaaaaaatatatgatattaattatttattttacaaaataatatttataggtggatatgataaagaagaaaaggcagcaagagcttatgatttggctgcccttaagtactggggtcctaccaccactacaaattttgcagtaagaatattttacaatatattaattttttttaatatatattatatttgaatctaaatttaattttgttaattaattaaggtgtctaattacgaaaaagaattagaagatatgacgaacatgactaggcaagaattcgttgcttcacttcgaaggtaaaaaagaaacccaatttgcattttttttttatataatatgaaataataataataataattacattataaagaattgtaattaataatgattttttatttattttttctcaggaaaagtagtggattttctagaggagcttcaatatacagaggcgtcacaaggtatatatttttattattattattaatattaatgaaaagtattaaaataactttattagtaaaaaataaaatcccactaattaatcgatgattaaattaattattaggcaccaccaacatggtcgatggcaggcaagaattggaagagtagcaggaaacaaagatctctaccttggcacctttagtaagtttatatatataaaacataaattataatgattttttatttatttaaatatattttaaaactatactcttactacattattatttgctaactacattttt

SEQ ID NO: 220485 - DNA, 2953 bp, Cannabis indica
atagtgttgttttgtgagtaaagctttctacaactctcaatgaaagcaccaaaatgttgattgaaattttcggcaactaaataattaatgtaataaagatggtttaagaagagtagattcaaatatttttacgcggttgagacattaatgagccttacttcacgagtctttgatattaataggtaagtatttcttacaaagaatgttctacttttttttttttccgaccccttcattaatttggttgaggggtatttatagtagttgtctagaagaagaaatgtctcaattgtcttatgtgcttgtcttggctatgcacaagttcccaaatctacgatgtagggcatgcacaacgtacgtagtaagttgcgtagggtttaggtgggacaagtcctcatctttccttgattgatgtgattgttcataatggagccgtcatttatacccttgattatcgcgtaattgctgaaggatgggtttatggcgtctgacacatcctctcatatgcgtttgtagacgcatcttccatgctgcattaaatgctacctgatagtacatctctagtaccctaaattcggaggagctaggtgctatccagctcctgaagacaacctcaagtcggacctttccggaccgaggcatggctcctggagtagttattgagttgtctcgaggagatttggtctatgtaatgactttcctttaattatctctaagtcttagagcctgacctgtcacgtgttccataataaaattgctacgcatattgagagaaaactaaggcaacaacacgacatataaatctattctttttaaatgataattttttatgtaatattaacgtgtataatgtatatttataaaaaagttcccaagaaaatgggactaatataaaaacctaaataacaatctccatttgattgtaagttagcaaaagggccttcattgttgtctcagtctgagagctgtaaaatatcagcatagaagtcatcgaggagggagatattattattaattaagatgtcgtttttgttacgaaactacaaattaaacgacaacataattcataagtcagtctctttctagaggctataaacgacaaatttctattcttcttccttttttttctttggaacaacaaatttctattctcctttattttttttttttataaaatctttagagaaagaaaattaaaaatacagagaaccaatcaaaaaggtcggtgagaggaaagatgataattcagggtccaaactccctccaatttgacagttgaggctctttctttttctctctctctcccaaagtttgggttcgcatatgctttgagtatatctttttatccctttttctccattttatttattttcaaaactaaacctttttctgtttttctttctatagagaccgttaacaatggctgctcactcttctcctctactcaatcacaaaaatcacttcatcttctccaccactaaccattccaactctcactctcactactttctccgcctcacaaaatcacctcctctctctttctccttctctaactccaattcaaattcgtcgttgtcgccgtcgctttctcgttttccgatcaccagagtaaccactgcaccggttgaattcgcggcgcaacctcctcctcctgagtttgacattcgtcgagaaatttcacgccttaaagctcttcgttccaggctctcgggttctagaagcttcagtcagaagctcagagttgttgatagagaccggagagttaatgacttctttaattccagtaggaatgggttttcgagggttttagcttcggtgaatttgagttcctatgagttgttcttgcttaagtgtttggttgcgtccgggcaagagcacgtgctttgtttcgggcttgagtttgaggatgaggaattggagtcgacgaggagctcaattaagagtgcgctctatgctctggttgggatgattgagaaattggacgttaatggcggtaaagttgatgagagcaatcttggtttgacattgggtgatgaagactttgtggacttgaagaaacttttaaaaaatttgggagacgttgaagagttttatgacagcattggaggaattattgggtaagttttaccatttatgtttatcaagtttcatggtattttccttatttaatcgttttcattgtttttgtcgtgtaaaaaaaatgaattagtttgatggattttcttttcttttcctaattatgttgataccatttgaatcttgaatctgttttttctaattttgtcgacaccaattggtatacgtttcgttttaatggtcttattacataaatgttgcagataccaattaacagttttggagcttcttgcccagacaagagttgaaacacaaactacaataaggtccaaacacaaacatgaacagatggagtgccagcttttggaaattcattctcctaatggagtggatctttctcaaaatacagagtatgcatcacaggctgctttatggggaattgaggttggtagttttttttatgtgttttataaattgacggggttccacaagttggcttgaactgcaatatcttatccttttttagggtttgccatacctaggtgaaatttatcctttgggaggtgctgcagaccggcttggctttgttgatcctgacacaggagaatgccttcctgctgcgatgcttccttatggtggacggactttgttggaaggtctaataagagatcttcaggtatagttccctgtttgtcaaacgtgaaaccatgagtgtttttgtttggggtaatggaacggaaaaggatggaaaatatttagttttcattctatttttatggtttgtttgcattttgtagtattggaatgtcattctaatagaataattttttcaccattttagtagagtgactatttcatttaaaaataagaaagtcca

SEQ ID NO: 220486 - DNA, 2673 bp, Cannabis indica
gcgttattggatatgcattctccatctcatttttacactataccactagttctatattattttaaataatgataataattaaaatttcaatacctaaatatgtcataactttgggcttacaaaaccttctccaccctaacccccaacgtaacaactttacggatttcattctttcctagtcatacctgccacagtcacccgattacttggaattatcccatttctttgctttatacaagccaaggtagcatgatcggatgtgccttctgcatcatgaagttacacttcctaaaggaaagaataagctcagtgggcatagtaagccacttgtaagaacttcttgtcaagcaatgtagttgcacaacttttgttagggttgcatgggttattaggatcttatgagaaatcgtacaagttgttatggtcttatgggggagatcgtataggttgctatgggaaaggttgtacgaggtggccaaagatattagattatagaaggcttcaccaaatcatgtgttcatatttttctcatttgacagagggaaaataaagaagagacaatgcaaattttttctatcataatcgtgaacttttttacccattgacattttctgcacatatgatttggtaaagccttttataatctaataccttttgcaacctcatacgacctttcccatagatatcatagatatgttatgactactagtatctcgacaatttacataagaccttaacgacctgacttatctctcttataagatccaatttaacatcgatcaaagatcgtaactttaaactttagccaacaacattaatgattttaaaatatcacattttatgggaaagtaaaatgactattccaacagtgtaatatatattcataaaaatgaaacacgcaatcagcccaacccacaagtcctactgtcatagattaataaaaaaaagtaattttgaattgatgaatatatgaacttgaagaaaaaatttaaaagacaattagattttcattttattcaatattcataaaaattcaggcatttataccaaatcagtgaggctagataatttaaaaaataatcaaatttttattttatagttttagatttaaactaaaactctgatcaatagcaggcaatatcaatgatcaaaaaagaaaatattacgtgtgaaatcaataaagaagagactatgggaaagagggaatagaaggacagaagaaaagtaaagaagagtcgatgaaaaagagggtggaaagtgaagaagatggacaaagagggtggaaagaccgcatgatgttatttaataattagactcatctgacatattctgacccaactgacatattgaagtaaaaaatttaatttacttttgtttaaaataaataatttataatttagaaatatcgatctggtggttggaagtccaatttaatttggtattttctgcagacgtggcgtgtgatatcattagtttgtattttctcgcttcggtgtggaaagagagtgtgccacattgtagactattcctatttatatatatatatatatatgtatgatcattatcatataatatacgagcattgctattaggtaccagtggtgcctagctccttctcgacatgtcgcgttatgattggctagctatactccataaaagctattgtattaaattatatgggaccagatacttagctgaatcaataacgatattaacacataggaaagtactaagcaccactagtgccctttagcatttctctataatataccaaacaatggagtggttacataaaagcacatttatcaaagaaagaaaataagattttattaagttccttgaagatcaaaagtctattttgactattatatttttagaaaaaaagaaaaaaaaaaaagtgaaaagtggtaaaagttattgaaaagaaaagttagatttaggtttcgagtgagctaggttttaaattggaacgaccttattatagaataattccaaattgtttttagtttattactttttatattacttttaaacctaatacacggagacgtgcaacttatatatttatggtaatgaaaatgattactactaagccttctttcccactatgtgatcacactagcgtttctagacgtgtagtcaaaaaaatttaaatatattgttttcaaaagttgaaaaaaaaaattactaccaaataaataaatagataaatcaatgatctcatgtgtttgaaatagagaaaaagtatatagaaagtaaagaacaacttacaaaaatattgtgataaagagttttttatatttttatcgtactaattttacaaaaatactatgtttaaaattttaaaattataaaaatactgtgttttcgtaaaaaaaaaaataactcaaaaataatttaaaaaaaaaaccctagaacaacttaacatatctttttgtactattacattgtcttttttcatgaaatttgtttttataactttattctttcaactttttttttcttctttacattttcgagttagttaatatatacacgataaaatatgcacataaattaattaacaactgtacgaaaaaatgtagaaacaacagaataataactatacaacacctaaataataacataaaaaataactatataaaattacaaaaagacaattataaatcaaca

SEQ ID NO: 220487 - DNA, 5510 bp, Cannabis indica
attattgtttctgtactcaaaaatatccctaataattaggactcgtggagtatgtagattttaactacaaaactacgtaaaaatatctggtgtttattaattacgtatttatctctatagtatatttattgcaaaaatactatttattttggttaacaaaaatatgcattaatagtttggtgctttcattgagagccttggtgataaaaactcaaaaaaaaaaccctccttacaaacattatctacacaaattcaatggctagtgctgattaatgccacaataatcaacctgagagcaaagagcccatgggatctcaaagacccaacacctctgaaatgccacgttcaagaaggaacgatggcaataatggtcaaaactcagaaagcatgaatgaggatgccaatgattctgccagatacttgtctaggagcgaggatgcttatcatccaaccaggtatgtaccattggtagagtttgagaatagacaacttcgataacgactggctgaatctaactgacaaaacgttgagttggagagagaggctgcagtagccagggcggcctaaggaacagttcctcaagaccaacctgatcctacggtaagaagaccatgaggaagacctcgaggctccaaaatcaggaggcagaaaacaaaccaagggaatctccaaaacaccaaggaagacaatctggggatacaatgaatgtcccaatggataatgaaaccaatccaagtaatacaaggaatgaagaacatcgacgagatgttccccaaacttcccatggattttctaaccgagggaacgaacgaactgatgtgccagaagcatctcacaggaatgaagaagcaaggtagcctcgaccaaggaactagggaatcccacgcactaataagagaaaccctggaaatcaactaaggtcaagcaggcttccttccagacatcctcaacgtcattctcgagcaaatagagaaaatgtatacacgtacttgaatagatgacgtgtatctaatcttttctatagaagaaggtcggtacaagatgaagcaagtttaagcttgggacattcaaggtctcgagggcatagttgatcgagtaggcaaacgcgagaaggaagtagatctcggcattattatgctaactaagaaagcataagtaattcacgaagttatcaatccgagagttactcggagacaagatctgtaagtaattatgagcgaaggtagcctgacctccttaacagcagctgcgagcagctggttcgataaatttacccatcattctataacatcctgggaacagttatccagggactttaaaaagtaatttcaagctgcaagagaccgtcgacttgaagcatcatccttaacccatataaaacaacaacttggtgagtctcttaaggcatatttaagtcgcttcaatatggctgctgcagaagtcagaaacctgaatgatagtattcaactaaaatcactccaagtaggaatcacaattgatttgtcaacaactggaggtgaattatgtgatcaccagggtcatcttgtgaggaacattaatgagttcaatgaacaagcacaagtctttgtgcgtaaagaggaagcgagaaacaaaatgaagctgttgaatacaagctcgagaagcaaacccagcacaagtacgacaatagtgagcacaataatgacaaaggtagacaatcctagtggatcgatcacgaaaagaaaggatgactcgaaagaatcatccaaaaataaaaagaaatagaaaaaacatgacaagtatgtatcaatttatttggtatatactgagttgaatgaaactcgcgagaatatattccttgctaatgaaaacaggattgcgttctgcaaacccgagccaatgaggcacgcgaggcataagcgagattaaaaaaaatactgtcgcttccacaaagatataaggcataccaccgaagaatgtcgacaactgaaagatgagacaaaaagcttgatctcgcggggatacattaggtagtatgtgagaaatcaagggaacgagcctaaccagcctaacaaccctaataacccgaacaactagagaatgcaacctcctccagttgagggtgaggatatcttggtaatctcaggagcgccacacctcgcgggaaataataatgatgcccaaaaaagatatataaatgaagtgaagagtcgagatactgggggcagagtcgagatacccacctctggaaaaacttgcattatgcctaattcatgcatctcgcaaattacagccatatttataggcgcatctaattaaagtcttaaaccaattagccattaaggcaagttttatcaaaacatgatgcttcaggaatattgataaaatagttaattgagttaggataatttgacataacttgccacccgagagtgtcaattaaagaacaagctctagcttacttcctaattgaaggaatgaactcagaaaaagacccaatgttgagcgtgaggtggaaaactggaaattatatgttgatggggcttcaaatgagaatggctcaacagtaggagttataataatattgcctaacaacttcaaattccactacgcactaagaattcagtttgataccttgaacaaggaggcataaaacgaggccttattggcatgtttaagaatagctgaggcactaaaagtcaaaaatataacatgctatagtgacttgcaactaattgtaaaccaagtcttgggagaatgccaagcgaaaggttcaaagatggaaaactacttagagaaaattcaaaagaacttggaaaagtttgattattttaaaattgaacaaattccaagagaacaaagctctaacgcaaatgcactagcaaagccagcatcccaatttgatatcaataagttgaatttggtaccggtggaagttttagacgacccaagtatatgtgaagaggaagaaatcaagatgatagatacttcaccagcatggatgacaccaattatcaagtatctagttagtggagaacttcctacaaacaaaaccgaggcacacaaactcttatacttaatacctcgctatataatggtcgaggggaagttatacagaagacgttattccatgcctctcttacgctgtgtgttaccagtagaagcaaatgaaataattaaggaaattcatgaagacttttgtggggatcatgtaggttagcagagtctatggaagaagattatccgttaaggatattactagccaataatcaaaaaagacacacacgaatttgttgagaaatgcgatatgccaaaagttttcacatataccttgcataccaccaaccgagttgagaatgatgacctcgccatacccatttataatatgggagattgatctgattgaggcattacccacagggcaaggaggagcaaagtatgcagttgtggcagtcgacttcttcacaaagtggacagaggtcgatcctctagtttccataacttgcaaaaagttctcgattttgttatcaagaatatcattagcaggtttggcattcctattaaaatagtatctgacaatagaactcagtttgatagtgaattattcactgagttttgttaaaggaataaaatgattaagagattctcatcggtatcaaggcctcagacaaatggacaagaaaaagtcgttaacaaaatcttaaaagatactattaagaagaagttagatgctgccaaaggaagataggttgactagctaccacaagtgctttgggcccatagaactacagagaaaacaacaacgggacacactctgttctgattggcgttttgcttggaagcaatgttacccgtagaggttaacatcgtgacccacaggcgtgaattttaaaatcaagaggaaaaccaagaacttttaaatgtgtccttagatgtacttgaagaaaagcaaaatgaaatgagtcgcaaataaccaatgcagcttaccaacaccgaataacaagatactttaataagagagttagaaaaaggttgtttaaagtaggagatttagtgttaagatgtgtatttacaaatacgcgagattcatttgtaggagtgtttaacctaaattgggaaggtccttatgtcattgaagttgtcgtgggaatgggggtttataaattagcttggcttaacgactcgctaataaaaaatctctagaataatgaacatttacgactatattaccagtagtgttagtatgtaaatactgtatttatctctgtaatgattaataaaattaaatttgttcaagcaattacaaagtctatttcctttaaaattacttgggggcatatatatgtataataactagagtccacctagaaatatatactgtattgcaaaaacctaaaaattaaaattttttcataaaagaaaggataattgattaaaattgtctttggacagtataaattcatgaactgaaaaaccttttctttaaaataaagaattgaaatagcagttgtaaatgagatttcctctcacaaaaacaacagaaagctatgtgcaagctgagtggataacggctcgcatcatcttagaaatgtgtcttgaaaaaaaatacttaaactaaaaatatgaatataggattaactattcatatgagcaatcaaaggatattcaaaatagttcctaaagtaaattattcaaaatatttaaagtttgctctaaaaatgtagcagattataaacagctcgagtaaaacatagcagataataaactgctcgtgtataacatggcagattgtaaactgctcacgaaaaacatggtagattattaactactcatatgacaaagaaaatgacattagaaatgcataaaactcaaagtatcttaagctaaatcaagagaaaaatatttaaattgtgaattgaaacgcaataaataaacctatataactcaaaagcaaaatgtgagacataaaaagtaaaaatatataaataagatatgttggccatccaacacaggaaaagtttttcacaagccacaaagggcaaacaatgtctcagccagatgaccattattctgaaataatatatatatctaaataactaaccctatatagttggggacttgaaaagttcttcttcttcttcttcttctcttcctcggcatcaacaactttatcttttttggtttgctcgatgaaggccagcatctccgtgtctccttctcccaaaaagcttaaatttatgtttggattagccatccaggcacaatagatagaccttttagccatagagttaactctggctatggcattctcctcagccccttcaagtttcttattggccttgttaagcttttggtttgcctcatcaagctccttactaactttctgatgagcttcacaaagatcattagccttctttttgagcaccttcaagctcagccttaaggtttctctttttgacatggcatcatactggtaaagcaaaagatgatggggtgatgcaacacccagtcgatggtcttgcttggaaaga

SEQ ID NO: 220488 - DNA, 2950 bp, Cannabis indica
atttttgtttttaaaaaataaatttttgaaaaacaaaaattccactttcattttgtgattaaaaattaaaaaacaaaagtgttaccaaacgacacctaaattttttaaaaacaaagattttacttttttgtgtgtgaagtagttactcacagtcacaggggactaactctcggtgtgtttctactccaaaatggcaaaatctatttgaggagcacctgaaaactgccaaaacctattgacaaagaattcagccaaaactgcattaaaataaacaaaagatgtggtcagcgagcggaaaatggcaacaaagtccaaaatgcggtgagcgtggatcgaacacgcgaccttcagatcttcagtctgacgctctcccaactgagctatccccgcttgatgaggattgtttcacagataaactactagttcttaaatgtcactatctgcattattactttgtttaatgggttttaaccaaactataaaatcccatcaactagattaaattattcgactgagagttggattggcttatagacttacagatgattatggtttgtaagtgttggaaattagttaaacttttacaaaaatatatgaatagtgaagtgtgtaatagtacatctaatgatctattttttattgtcttaaactaacattttctacgatcatattaccgttttcttatcattttatattaaattgatttctttatataagttgtattagaataatggaagaatacacaaagaaaaaaaaaatctcttcttcctgacatttttctcagagcaatttttaggtataaccgagcaatatcgttaacaaattgtataaagaaactgttttatcttgaaaacgctgtagttaatagactaccatgcacacttcgaattaaactgctaaatatcttagaaaaaacacttagtctgcaatcttcattcaataattcatagtaagcatattaaattctctcttttttggagttcgtttatcagaaaatattttcttttttcggttagtattaaactttggtcattgttctttaccaaaataccatatgtaagtatttttaaagataaaaactttctatgatgatttttagattgtttcttgttcataattgcagccttagttgagaagttctaccaaggcattttgtttatacttttttcatacaacatttttaatggttttgcaacgcaaccataatgaggctatacgtccatttattccaaaattattcgagagatatttactaattttaagtacttaattaaaaataccatagagttggagaagcactttctctttggatataaaaaacagacatttgaaaaacaagaaaatagatcagctactacaaatctgccagtccgaatgacttttcttgtgatttagagcttgaactatggattgagcatctgagagaatggcaaagttatcccaatgcttgtcccgagcccactctaaactctaaagccattttaatagcaaagatctccccttcagcagctaaaacccagtgttactctcccatgactcgagttccactatttatactaaaaactattctttctctgcttgaatcatttcatacggtctaccttaattttttatactctcccatggcagaaaccagtaatttcttttatacttttcgatatgaacttttctttttcaattctcatacggtctaccttaaaatgccttcagatttacattagatttttagtcattaatatcaacaataaacaaaataaagtaaaaacgtttttttctcttattgattgaataagaaattacagagtagattatgtcatggtgaggctgttattcgagtagggagccaaggatgaacaagactaaaaacttgtaaagatgaaaatggtatgtttgatgctgttgaacggattttttctaagctgatatctctcccaatctgggatttatacaaagtagacttataatcaacaagatcttgtccgaggaagaaaaacatatcaccacgatcatcatccggatcaggatgataaccaattacatacaactttctctcttcacaattttgcactacaacatcatggactaaaacccaaccatgatcatcctcttcattatgatcataattattcatcttcagatcccatgatttcaaatgaattttactcagttcattaccataccaatacgactgacacagcctcagtcgacctcgaaccatcccaattacagaagccattgcaagcactccaacacgccttattccgaccctttgtgatgccttcaagaaccctttcggcaagccaatgaagcgacattgttgggtcgggtctgtcattaaaacatccaaagcaacaactcctatcgcttcacatgcaaactccaatagccagtagagttttccattgctacaagccactgatgtactcccccaatccaaccaaacatctcgaaactgtgatggaaatttgattgacaaaattgactccttccattctcctgtctcagagaaaatactgcaatacacaccttttccacatcaaaaagcacaaccctgtactcgatgctgcaatagctatcgttaaatccttctatttcccctaattgacaacaagacttaggcatgcaaacaaatccaaccctgcattcttcatatgaaggtgactcggggagtgaaacacactgctctgtaatgggattgcaaatgcagaatttggttggtgttttctgaagcaataacaaatcacgataagttgatctcacaatcggcttcggctccctcttgttctcccaccgctccgatctcttaaaattcaaaaaatttagataattactcttacaagagggactcaaccatgggcatggatgtcgttttccatggagaatctttgatggactgtggtcagcgtatctgaggagaagagaaacaggattgggtttgggtttgggtttg

SEQ ID NO: 220489 - DNA, 3074 bp, Cannabis indica
atatatatgttcggttggttctcggtttaatcggccggttttccattaacactaaaaccgaccgtgcaaaggcgattttttctatttttagttatttcagtgttggttttttcaatgttcggacggtcgatgtacttagtttggtcagtttcttatattttttttctcacccctaatagcatatgcttctctacagttgaaaagtatgaatagaggtatcctactcatgatttgaaacttccaccagtagtatttgtgataaagatttggcaaaattacctacataatgagaaatatgaaatatacatcgatcataaaagcttgaagtattttttcactcaaaaggatctaaatatgagatagagagatggctcgagttggtgaatgattatgactgtgaaatcttttatcatcttgaaaaggtcaatgtagtagcagatgtcctaagcagaaaagttcaaggacaagtaagtaacatgaaacagattttaaagcaacttgcggaggaaatgacaaaaactaatattgatttggttgtgggacaattagccaacactacaatccacattgctagaaagaatcagagaagctcaacatggagatccatacttgatgaagattcgagataaaattttagccggtaaggttgaggattttaccgtggatgaaaatgctatgttacggtttacgaacgagtatgtgttcttgtggatgctgatattaggaaagagattctagatgaatctcataccactacttactttgttcactccggtatgactaagatgtaccaagacttgaaatctatgtactggtggcagtgtatgaagaatgatatagtggattatgttttacaatgtttgaaatgtcaacaagtgaaggcaaagcaccagagagatgcaagattattgaatcttccagagtggaaatggaaagatattaccatagactttatgtttgtattacctagaactacaaagtaatatgattttgtgtggataatagtcgaaaagtatacgaagttagctcatttcttacctattcaaatgaatttctccattgatcactatgttgagttctatgttagagaaatagttcatattcagggtgccctgaagtctatagtatctaatcggatccaaagttcacatcaagattttgggagagtctacatcgagctatggtacacattcaaagttcagtacaacattctatcctcagacaaatggacagttcgaaaggattatacagatttttgaagacatgttacgagcatgtgtattggactttgaaggagcttggataaagtaccttccttggatcaagttttattacaacaatagctaccaatcaactatcgggatggctctgtacgaactgctttatggtagaaaatgcatatcacctatccactgggatgagttaggtgagaaaaaagttcttaggtcccgaagctatttcgaagacgaatgaagcaattgataaaatcagagctcaaatgctcgctgcttagagtagatagaagagttatgctaatccaaagcgaaataatattgatttcaggttggagatatggtaattctctgtatttcacccttgaaatgagtaaaatgctttggaaagagaagaaaactaagcccgaggttcattggacctttcgagatcttagagaggacagggcaagtggcatactggttggctatgcccccagcgctagcagttgtaaataatgtgttttatatttcaacgcttcaaaaatatgtgcgagagtcatctcatattttaagttacgaagctttggaacttcaaccagatctctcatatgaagaacaactagttgaaatacttgatggaagagagaaagtcttgagaaacatgacattaacactagtgaaagtattatgaagaaacaataagattgaagaggcaagttgggagttagaatcggatttgaaacaaaaatattctgatctgttcaggtaaatttcgagacgaaatttctataaggagaggatatttgtaatattctaaagtttagaattggattagaataaatgtaggattatattatgatataataaattatatgctctaatttgagagtatttgaatttaagaccccatttatatatgtgaggagtatttttgtaattttgacctgaaacgggtaaaattaaaactttattatatttttttgctaatggactatattattatgtagtatgtttgcttttttgttttacaggtgaatttcgataagttggcgcagtatagtcacaatcgagtattttaactcgaatcgagttcgggaatcaaaatttataaatgatgtggctagggcgatgatctgaaatacatatatgattatattgatttatgtgtgatgtgaatgatatttatgcccttgattactaaatatgatgaactttggccctatgggcaaaatgcatttgaccaaaaagttaataatttgaggtatgcttgttatttctgaaaaatgaatctcaaaactttgttcatacaggctttgaaaccctcttgataaggaagcgtagcattttgaagaggtttttggttgtgggttgtgtttactttggaaggatcatttgaggtagctttaatctcatttttattgatctactttttgaatttcactctttgttttggagcttacatgctgttgtcatggtcttctagacttggatgtaaagtattttcgctatggatattaagctagtaatgttgtgttgcttgagtttagcaaaatctcaattttaggtcatttttcggttgtattttttagcatgtattttgaacatttaagttgtgttagttgctcttaaaatgatgaattgaacatgaatttatatttggattataggctttgattatgtgaattttaagaatttttgaccttgaatgtatgtattagacatgaaatatttgttttgttttgaacgtccattgttacgaaaattataaacactacgcaagtatacgcagtcaagtagtagctcacgcaagtgaggtcgaaccacagggaattagattaattactactaaactatacttat

SEQ ID NO: 220490 - DNA, 2760 bp, Cannabis indica
gtcttttccataaaaagaaaacataagtaagaaaggagataaagcttcaccatttttcaatgagatgaaaattccaatattctttagaatatcaatagggggtgtagttgtaaagatataatctacatcaatcataggaaggttaaaatgagtatgtgtctgagtttttgttttccaatgtaaaagtttggactaattttcctttgcagtaaggaatcattaggcaaactcacatgcaaagaaagggtgggaacaatttactgatgctgttattaaaacaatttcacaaaaaaaggaaggagttgtctttcttgtatggggaaactctgcccaagagaaatggaggtacttgtatactcttttagacatgcattgataccaaatctagattactagtaataatttgaaaaatggtagcagaagagtctatttacttcatttctcttggctttatactttgggaattgtagttaagacatattaaagttgttttcccttttcgattatacaacatgacaacatattttgttgtgattgatgacaactcaaacaagaacaagaatcagagaatgaatcaatttaaaactcattgtaatatgtatttggtgtattttgtggatggagaatctgttttaggagggagactctgctatttcacatcgttgggttcaaacaagcggggaaaaattcttcgattgtgtctgttgggtgggactctcatctccttgcttacccatttcaggtatttttttaaaattttgtaggctaaaggtaaatttgttcttcgttattcataacatatataagtttaattgaccttacatctcatttagattgaagtttgaattgcgtaaaagctaaccgatataaatttgagtttacatgttcaaattgaaaatgaaaattcagttgcaataattgcatcaacatttggatttggtatgaaagtagagagacctgtaaagtaatcatattccttcattcatattatgcaattctgaaacacaatacattatttaatgatggttaagtcaatgatttggtttgttaatacgttttttcattgcaacatgcttaatgttggtgttcgtgttgacaatgaatcgatcaatcaatccttttattccatcagtgttaaaaaaggaggtgatatggatggaaattaagatatgtctagtaaagattggtttggaaaagaatgaagatggtgggtttggtttgtctatatagaattgtggggtagtaggtttgtgttgttagctttttagattatgttacaggtcccagagattaaggaaggaatataatgtatgttattgtagtatatttttttagttgtatatgatgatatgaagagacagaagtgaagacaaaacagtgagatgtggtttgtctatcactattattgttgttcttgtttataatgtatgaatgaagagtatgcacgttaatgtgatagagggagtggtggaacttgactattgtgaaattaaatatattatgagtgaaatttatttttgttgaatagtctggtgcttggatttgataatttataatgaatatctattagcaattccacaacttcttgtttctattgttaaattagatttagtgccactaattaactttgctactaaattagtttttgggtaaaataggttgctaggcacaatttgcctgaaacactaacaagtagctttaaataaattataaattatttatttataaaaaataaaacctataaaattgattttgtgaatttttattataactatggtaagaaaatttatgaattatttatgcaaaatttatataattaaaattcaaataataaatttatcaaaacaaattcataaactcataaatttattcatagttccttacataaaataagaatgataaactaaaaaactccaaaagagaaaaacaaaaacaaccaaagacatttgagaaatcacatataacattaaaacatactaaataaaaatatccaaaactaaaaagtgaccttatctaaccaaacccacaccacttaatttttttttctgtgctcgctttatgatctcatcattcttcagtagaatcatcctaaaaaaaagaagaaaatttaatatataaaaaatatatataaatgaaaccacaataaatataaatcatataaaaaaaattacaataactgacatacctctatttcaatataatcatcaagatttgtatcaagttttctctttttgttatgcttatatggagttttaatagaaatatcgccctgagaaacctttgatttattaaatagtttatctacttcttgaaaattttcttgtattgtaccaatgagactatttaattattaactttaacaacatcttcatcaacaactgcagctttaacaccatcttcatcaacaattgcagcttgaacatcatcttcatcaacaagtgtatttgattctgcaactttaacatcatctttatcaacaagagtatttgattgtacaactttaacgtcatcttcttcaaatacttgttctttcattacattttcattattcttaatttcttcttcaataagaatgcgtttttgtacatagttctctatcactaacacactaagttgtgtcgttcctataattgtcttgagttaacttatgactctctccattgctgacatttttacatctcttctttaattgatgacatctcttctttcattgataataataaattgttgtccaaggtagattcacacatcttttctcct

SEQ ID NO: 220491 - DNA, 1262 bp, Cannabis indica
ttataagattagaattaaaagatgacatttgtggaaaaaaaaaagataagttgttaaataaaatgataaaatttaaacttgtagggcccactaataggttcggccatatggttcaatttaagccattattttatcttattttaattccatataatttaatcctaaccctagatgaaatcttataaatagaataagatgctactattttcataatgcttattagactactttgccagacatctgaaaaagagtaaagagccaatctagaatttgaaatcctctccctttcttcttcaaattttcgaaaccctatagtgagtgagtgtttgtccacatatttcaagtcaatactcaaatatagtgtggaagattgtgaagaattacatcatctaaggagatccaggttcagatcttagtaatactctacaatagaagagaacaagggttagagatctgaacgaaatgagccattatattctgctaccactaatgtaaggttttctacaactttatatgtgtttatttcattattttaggaaatttatatttaggatgttagattatagattataatcaacatacatgttagtaaatctagatcctgataaagtaagtttcaacaaatactactcggatcacaagtgttgtgagtctggagtggctctctatgcttacaatagtgggaatgtgagccaattctcaagtagatgagttgagggagacttagtctctgctacactactaatggtgtgtagaagagagggtgagttagggttttgagtgcttgaactcaagagcttaggaatgagaattcaacagcttttaggtttagcctagtgctctttatataggagagagcgtacataagatagtaggttgatatcccttaaaataaggggatatcacctatttgtaacatattaaataaataagaaaataacttattaatcaatcctaaagaataggtaaataactgacgttaatctcctatttttgtgggttatttgaggccaattcatagctgaaaatgttattcaggttgaaagctacaaaggcaccaaaagtgcctgccagaagagaagctggtcagcctaccctttcctggaggctcaccggcctatgttggcactagggccggccaggggtggtccgactagacccccttgctagccagtttgttgtctctttatcctgcttaagtatttagactctttgctaactggtacgttgtgcatggtgacttgtgttggaaattattttac

SEQ ID NO: 220492 - DNA, 2049 bp, Cannabis indica
accaaaagcatccgagcagcttcttctgcactgaacttaggcgtcaaatagcgagtaagtttttttttgaatctctttctctttttactttgcatgtttaatttcagggtttcatacatgcgttctcgacttgttgtagaagatagatagaaaatctaggcttaaaactttgtgattttctctgtaatagtctgtacaatttcacagtttacggcatttgcatttaatcacacattgttcgtctttcaccttgctcatttgaagtttcgtgaaattttaaccctaaacccaaaaatttcaaacttctgggttttgacttgtttttgtacattttaatcactttaatctaatgagtactccaggttgacatatttgcctgtttattgttcgatatcccagccaaacattcatctcgtgtgttgtctttttagatgaaccctggtgagttttggggaagcgaacacctgattgaccggatcgactagggtacggccacttcatttgggaattgaagaaaggttggaggtgttatctcctgtccaactagacatatattgtctggccaggtgttgctgacactcttcctgttggccgtccaagttcggctaacttcgacatcccaattgatattcttgctgttacggttgcccgacaatctcaccagtgtccgtccagaaggaggatgatggcccgaacaaagcaaacaatgcggaaggtcaacgcatctaatcctcatgttacccaactcgccgcattaccaagtgtcgaacaagatctgcccgtcatggaggagggagatcacgagggggacattgaggtccaagaaattgaggagcaggacggcatgcgccctagcagcccttccaaagccaaggaggaagaattggctgaacttccaaacttttgagggtataatgaggccggggagccagtgtgtgtggaggatgaagtcttggttgaaggggaagactatgtcactgaggagctcactaatgcagttcctcacaggaggcaaggtgccttaggtgccagatgggtgagtcctccgtccaagattagcgagggacgcatgagggcctttgacaaggttggatatctgggcggacttgagtgttatgtcccttctccaaatcatcgagccacgaacccgcaaagagggatgtgtgcttggtcggttgcccatattaagcaaggggcaatgttgcccttgcactcgtacttcaagaaggtggcagattatttttgcctttgtctaacctagtttactcccaggggcattaactatttgtctgtcctatttatcgtttgcgccattcagaaatggggtgtgccgtctccgcatgaggtcagttggttctttgacctgaagtctggtcccaagcaaagcaggtcggggtacttctactgctcttagccagatttcaagtggttgacaagcactgtggacaagatcgttggcaagctcgggggttttgttgacgagtattatttcgtggaaggtatggacaccacttatactcggtttcaacagatcccaatatattatcgtccaccctttacactagctcttagggataaagatcagaggattgtccaactgccgaatgttgctcaaaatatcactctgttgacctcggaggccaactttgtggagtacgggctttatccagcagattttatacctcaacctgtgaaggggaggaagaaaaagtccactgcttgctgggctgagggagccgagcaagaagaggagctcattcaactgatgcctgagacttagttaaagggtgatgcaggagcaaagcagtatgctcaggaatattctgagcaagagaaggagcttattcaacttaagcatgaggctaagttgaagggaggagctggagccaaacaatatcctcaagaatattttgagcaggaggatgaggcccaggaatattcagagcaagagaggttgttcaaaaggaagaaaaccctcccgaccgggcaaaggcccatcgagcatacaatccagatcaaaagagcttggtctacctgctcagccatcca

SEQ ID NO: 220493 - DNA, 2266 bp, Cannabis indica
tgggttgattggaattcaggtttgcatgatgttattcacttgtatttttctgagttatttacctcaactaatgctctaactaatgccgtggtggctggtattactccttccatttcgagtactcataatgaagatttgatacggccggttcatgaggatgaagtaagaagggcgttgtttcaaatgcatcccgataaggcacccggtccgggtggcatgactccgggattctaccaaaaatgctgggatgtggttggctaagatgtcgtgttgcaagtgagaaacttctttgattcaggtgtgttacccgacaatgtcaataatactaatattattcttattcctaaaaagaagaatgttagtagtatgggtgacttaaggccaatttccttatgcaatgttttgtataaaatcatatcaaaagtcttggctaaaaggttgaaaacagtgcttccacatataatctctgagaatcaatcagcgttcattcctggccgattaatctctgacaacattatggtttcctatgaagtaatgcactatttcaagagaaagcgtaaggggtagactggctatatggctttgaaactcgatcttagtaaagcctacgatcgtattgagtggggcttcttaatggctatgatgagaaaaatggggtttcataaccggttcattgagttgatttttcacacgatctctacggtggagtacaagatagtacatgggggtcatgaaattggtcctatcgttccaagtaggggcattcggcaaggggattctttatcccctatctgttccttatttgtgcggagggcttttcatcattgctaagaagggctgaaagaagtggtcatattcgaggctgtaaggttgctaatggtgcgccaacaatatctcatatgctttttgctcacgatagttacgtttattgtcgtgcaactgagaatgaggatgataatgtacttcgtatattacacatgtttgaggtagcttcgggacaataagttaatcgtgcaaaatcatccatcttctttagtgctaacactcctttcgatcttcgagatagactttgtactaggttggggatggtgcctgctagcgatgacagtttttacttgggtttgccttgtatactgggaagaagcaagaaagctattcagaatttccttcaggaaaaaatggaaaaccgaatcttgagttgggaaggtagattcttatctaaagctggacgtgagatcctaatcaaaacggtagcacaagcaattccgtcttatgctatgtcggtgttcctcttaccagttgaaacatgtaccttgcttgagaagttgatgtccaagttttggtggggtaattcttcccaacagtcacgtggtataacttggatgaagtggagccgattgagtcgtcacaagagcattggaggccttggttttcgcaaccttcgggattacaatttgtcacttcttggaaaacaagcatggcggctgttacagggggctgatactctggtcaatcgagtgtataaggctcgttactatcctcatgactcaatgttaaatgcttctcttggtgccaacccgagttacatatggcgtagcatacatgagtctcagagtttaatacttgctggtgcaaaaatcagagtgggagtgggagatattgaggtgctgaatcttccatggttaggtgatgacattaacccttttgttacatcttctcacccagctcttgatcaaagcaaggtgcggcaattaatgagtccaaatggtcagtgttgggatgttgagttggtgagtgatctgtttaatcatagagatgcttctgttattatgaatactcctattaatgttggaaggagtgataattattattggaaacatgagcactcaggattttacacagtgaagagcgcatacaaagttattcaacttaataaaggaaattggggtcatgaaatggaggacttagtgtggaaaaagctttggaaaattaagattccacctaaagttctgcactttatgtggaaggctctcactcaatgcttacctactcgaatgcagctccaaaagaagcatgtggatgtccctgcttcttgcattttctgtcacacgagtgttgagtccatcagccatgttctactcgagtgccaatttgctcaaagttgctggaatcgggctgctgtgagcactgctgctactgctgtcggattcgacttttcactttggttcgaatccctactgcatagaggacgggcaggaatgattga

SEQ ID NO: 220494 - DNA, 1056 bp, Cannabis indica
acaggttctcgctgttatccgtggaaatcgactgctaaagttcattcaaaactgaagtcgagttcagaagtcttgccaatgttgtagctgaaattgcatggcttcaatctctgttttcagaacttcacattcacctatctcatccaccaacagtttggtgtgacaatttaagcactgttttgctcactacaaatccagtgcttcatgctcgcacaaaacatattgaattggacctttactttgtgcgtgaaaaagtcccaaatcaccaaattactgtcaagcatgttcctgctacaaaccaattagctgatggcctaaccaaagatatctcaaaccaaagcttttgcaagttcagaaccaaactcaccattttggattcatccaatgctgagtttgcgggggagtgttaaagggtacagttgtcatttcttattttgttagttaactaacaactgtctttcagttgtaggttagttatcaattctgttacaattctgttagatccaatcttggttctactatcattgtatcttgtatatatatctcaactatatcaataataaagattgaactctttcatcatatctttgtccccttctttctctttcctttctctcccttttctctatttctggtttatcttgttcttagtcatgctgcaatgtcaagaaggttcaatactcctaacaaggtacataccttacttgttgcaaaactctgatttctccatcatacattttcatctgaaccgagcctattccttcaattttgcatgatttgttgttgcctaataggacacttccaccttgttctttgacagtgtgttgaagagctttctgtttggagtcatatatgaaatgagcaccccgaatccaatatccattcttcaccagaattcatgcttgaggcaacaagtacatcagcaaattcatatccatctgcagctaaattagcttcacctttaaacttgtttttcttgttttgttctctctttagattggctttgagagcaagacaatcattcctaaaatgtccttctttcttgcaataatagca

SEQ ID NO: 220495 - DNA, 2576 bp, Cannabis indica
gtgatgtacgacagccatcagatgatgaagttattcgatctgacggctgagattgatatagggataattagggttaaaaagtagaaacgtacgctaacaatcatttaatgtagcctgagacccatataatgtaccacggaatacattccgtgaaagtacatcacgggacaaaatcatatccctatatttatataatatatcacatggtgactacaaaagataatcccaaaatatttcaagatcgaaactcttcaggttgtttagccgcaatatgcacaatcatcatcaagctccaaactcattgttcctccgccttagcttttcctttacttacacatggtagcacattggtgagtcaacagacctagtaagatatgcataaaatatacaatgtaatattgacttgtacttaagccctcaagtgcctacttacaaggctcaccaaatagttaagaacgttcttaacagaattacaacctctataccacatgcactaaagtacgtttcccgtactagtgttggtagggctgaaccgtacttcggggtactactgggtgttgtacgacatgcactacgtacacactaatgtagtgttggtaacaccgtaacatacccttaaataccatacattgtgccaatgcactccgtatcgcaaccataccggtgttggtagtgtataacaatatagctaacatgcatttacatacatacacacatacatatacatactttatgctaatcttaccccgtttctaaattcaagcgtgtcggtcgacttgaatgaaaaattttcgagctgaatggagttcctatgtcacattcacataaacaggtaaataacttggacaaccctttccaaaaatctaaacttataaccagggtaacctaatgataaacaataaagtaatgcctaaatattgagaaaacaccaaactagggttctaaaaataactcaaactagtaaaatcagatttttttaggggtcctgcctgtctgtagaacccgttaaccgattcatactagaatagatcaaaaattttgaaactcaaccaaatcattcccaaactcaaccatacttcccagaataccaacaatatcattttagagaagtctccaagtaaaagcagtaaaacttaacatgttattgttgagtcaaaactcaaacttgctcagcctcaaaatcaaccaacaacaacagctcaaataaacctaaatcatcaattataatccacagaaaactaccctaaccaaaatccaactaattagaaccaaaatttccaagttacaaccctaaatttatcaaaaccttatcaatatcaagaatatggtttctaggattttaccttcactcaatttacttcaaaaccaagcttaaaatccaaataaatatggtactagcaatggttttccttctggtttgagctggaccgaacaagaaggggaagaaggaggatggttctagtttattatctcaattttctattacttacaaaatatgatgtgttattagcatcattgtcatcatctaataataaaataagaaaacaaattcagctgccaaaactaggttaggacacttatccacaataatttaaaaagaccaaattgcttttgctttgaaatttaagtaataaaatgacttagggataaaatggtacaataccataacctcgcctaaactcaaagttcgatcacaacctgtcataacttgctaaaataaaaggttctctgttcaccaatgtgacttagataaccctccattgtattttccatcgccaccgagctagaatcacaaaaataacatattttacatttaacataaatatccacacaattaataataataatgatgataatcaatgtctatagccccactaatccatatctaaatcatgcggtcattatagttagggtctcacaatgttaaggtataaaaatataacatcatatataagatgtatggacttctcttctcatttgtagattggttttgatatggaccccttgcaccttaccaaattctaacatggtattataaccaaacaaaactctaatgagtatccgatccaaattcaataactggtccaaaaagacaagccaaacgagctcattatgactcaaagatagtgagtaaaaaaagagtcatttgtgatctgttgtgaaccaaaatgccattgatataaaaagatgagccaaaaaaagagtcgattgtgatccgttgtgagccaaaagtatcagcagtctaaaaaaacgagcaaaaaaagaaagagttgcttgtgatctgttgtaagccagcaatctagtccaaaaagagctgcttgtgatccgttgatcgagctgtccaaaattatatataagatgcatgagttactcctttcattgtcagggtcgactcaagggtggtgcagtaggagctcacgcccaaggccccccactcaggatcaaaaaatcctttaacaaaaaagccccaaatttatttttaaaaatactattttcgtatttttactattatttattaaataatataactattttctaaaaaaatacctaatttatactatatttaatattttttt

SEQ ID NO: 220496 - DNA, 2455 bp, Cannabis indica
tataattaactgattagtaatgttgtatgtgatgagtaccaaattttaccatttaccaaattctacattttgatagattaataataattttctttaagtcaaaaataataataataattttcttaaaaaaaaggttttgttttaccacctggccgataaggatgggtgaaggaagggtttgtttgtcgatattaataattgggcctatttgcatgaaaagtgggcccattcaattgacttggcaccaaacagtactagtactattgctcatcccataattagtataataagacgtaagagatttaaagggtaattttaatttgtgtatgtaatagtaatgaataatgatatgtgtgtttggagtattcaattcaattttcaataattttggaactaaattctggattttagctaaggataccaatatcatagagctttcattcttgactccattcccacttgcacttggactacctaccaaaaaacttatcccaactcatgataataattatttaatataaaatatatatacatataatttgtttggtaggaaggaaattagaatgaattgtgtgtaaaaaaataatatttcatttttatggtttattttcaatggtaataacaaaagaattacaaaatataaatcttttatttttcaatctttgaaatatcaaaagttgacttgagtaaagcgagataaataatatttttatttttatgatttattattattattatcttttttattggttaaaactaaaagtccttcagtgaagatttaagggaaagaaaagaaaagctacatgttacactatgaaatagtgtagggatttattaataatttgcaaaaagtgaggtgcgaatcactataaatatgtaattgtatagttattatgagatatgaattgagtaaatagaactttggttcaattgggagtttgatactgactcgaaaagtgcatttcggtgatttgtcctgtctcgaagaggactgttatctaacactaccattattatgaagatcgatccatatcaaccaaagggctctgctgcttgttatttaattttactcaatttattattgtacaattttggttaaaataaacaaactggaaaatttaactagaatttaaacacaagtgaacatgtgaaaaatgaaaagtaacaacaacataacattatcaaaaaaaacgaaatttatgtgtgttctgtctcacgttgctcgtatgtgagtgatagtatctacaaaagccttaaccccgcgataaaattttgataattgggtaaatactatttcataacataaattgaaaattgagacactacacattaatagcctcacgtttatataagtgggaaggtaaccttggagtaggaattgcttgtaatgggcttttcatgtaagtaaccattcctggattttcagtcaagtcaatatcttctggcttaattcccttacatgggctccaactgaaatggtgtaacaagtgacccatcatagaagtaaccaaattgataccaagttgagctcccgggcaaacccgacgacccgccccgaatggtagcagcctataatcatgacccttcatgtcaacatcttcttcaaggtatctttcgggtcgaaattcgagtgggtctttccacaccgcggggtcacgggccacggcccagacgttgacatggactatagagccctttggaatgtcgtagccaccaattttgacattggcattagccttgtgtggaagcatgagtggtgttggagggtgcaaccgtagtgcttctttaactacacattgtaagtaatgtaattttgagaaatcattttcggtcataactcgatccacaccgataacccgatccaactcctcttgggccttttgttggactcttgggttcttgattacttcagccatggcccattcggctgatattgctgtagtgtccattcctgctgtaatcatatcctacatttgcaaataaatataattactttttttgaaaataaatataattactttgtagtaataaaaatatatctcttcaattttttctattctatatacatttacatattgaaaatcatttctttaggaaacataaataaaatttcttaaaaaattcaacaattaagaaggttgaacttgacaccataactaaaaacaatattttttttattaatttttgaacacaaatagatgtatttggcattactcaaaagagaaaacacacacatttagaaacaaagctacgaaagaaaaaattgagaaccaaaagttttactaaacttctgtagtagacttttaaaggagtgttctggtaaatctctatttattctaacatttaagaaaacattttaatataatttttgtatgacatatgttgtaactatttaaaattacatgtaaattttcagaaaattctaaatagtttataatatcgaaaataaaattta

SEQ ID NO: 220497 - DNA, 3124 bp, Cannabis indica
taagttttatttatatatgcatatgtatcattactcatactataggaacaagcattaatatgttttgattaattagatatgatataaaataaaaagggtaatgataattgatatatgtactttaaattatacactatttttttgaataacatgctttctttacaaaaaaaaaaaattatacactatttttgtaaattgtaatgtgtttatgttaatataggacgaggataaatagattgacatcattaataaataatttatatattaacatgatgattaaagatgattctagtaattgagtggtcctaggataatatatgttacaaagaaacaaaagaagaacaaaaatcttatctacaaaggtcaaattataatattaacactattctcgacaaaaataataacattatactaaaatcctaaataaaaatagtggagtttaaacacaaacttacttcaatagaacactaaatgttatcttatatatgtgggagtctataatgtcccactatttttagtagaacactacagactacactaaatttttttaaaaaaaaataaaataatatgtttataattaaatttttatatttatatacatattatagtgtgagataatttaataaaataatataataataaaaaatatttttctatgtggttggaattaaaaaaaaaattagtattgaaataatatccttttaatgtagatttaacactaaatttaagttccctattacagttgaccttagtggacattttatattattttaatttaattagtgagatatactagaatacatttattaaacaaactaaattaaatcttaattattaagacgacaatgatgaatggggacgtaggggagtggggtcatgtcatgtgggggctgtataatttttttatatatttttatatatgcctgtacaaaatgaaaatattcatttttactcatatatttttatttctgtttttgtaaaattataattttcatttgtatttcacatattttcatagttattctataaaaaaaaattatttttattctcacatatttatttatgtcctccaaaaatttatatttttcttttttataaaatatttttttttattaatagatcctttttgtagaaaaaaatatttatttgccccttctaacatttattgttggctgatgatgatgaacaggtgagaagatagggaaattagtaaccctttttccaataatgtatttatctggtggcacatgcgtaacgctgattatgatcggaggtggtaccatgaagatattttttgagctggtgtgccatgaaacatgcaatgtgaaaaacttaacgaccatagaatggtacttggtttttacttgtatagctactcttattgctcagcttccaaacctcaattcaatagctggggtttcattgattggagctattacagccataagctactcaacaatgatttgggtattcacattaagcaaaggcagaaccaatggtgtgtcctatgaaccacttgagaatgccaaatcaaatgtggctaggcttttcgaaattctcaatgcatttggtattattgcctttgcttttagaggccacaaccttgttcttgaaattcaggtaaattttgtttatatatacatctagctaataccaacaatattcaatgtgttgcaacataaaagttacttttagtgacaattttttaatcgcaatataaattttttgtaacttttaattacaataaaaaattacttgtgactaaaacataatatttaaatacaaattatcactaatttagttttagtcaacaacaaatgttacataaaaagttataaggattaattagtaaattattaatattatatagctagtataaatatgtaatgacatttcacaaatgatcaaaaaaaatgaatggaaatgaattacaattaggaatatttttattaggagattggtactgtctcgaagagtgcatttggagtttggcactaactcgaagagtgcgtttcgatacaattaattttgttttaacaagtattgtaactaaaaacacatttagtcacaacaaattgatatttttgtgactaatacatttagctaaagatcttttagtgataatataagaatgatgatttataattagtcacaatttttacttttagttacaaattttattatagactaagagtaagaatttttgtaatgatggctagaaactttattatttttatttttattaaaaaataataattaacaaattatgtataaaggacatgcaacataattatttttttaataattttgatggcaatcaattacatatatgacgaatatatttttatatatgaaatgtggttatttaacagtttttgttagtttaacagaaaattaatattctgttgaatttaacggtgttaatataattaattttataaatatataaatattaatattatttattttagattaatttaaatatatataaatatcaatattatttattttagattaattaaacttatactaattttaaattaaattaaatatatacaaatattaatatattatttataatattattattatttattattatttttaatattggaaatatattcacaagtaatttcttttaatttataaaatttaaaatacacttaataaaaataaaactaataatataaaaatatatatataaatgtgcaatacacaataatttagtatatataatatatagatgaatattaaaaaaatggttttttttttatttttactacttcaaaacagttttttttttttttgggaattctacatagaaacccatattgcaactaatgttgcaacataaattgcaaaaaaaatcgtatgtaaacccctattgcaactagcgctgcaaccactttagaaactcaaaccgtaaattttaaaaaaaaaattaaaaataatatatggaataattctcctaaaaaaattataaattataaaaacaaataataactaataagtatactaaatattaccggtctcttaagtcttttgttttgttttatatataaggataataatatacctgaaagagtttctttcataattacattgttttctatttttttttttt

SEQ ID NO: 220498 - DNA, 2266 bp, Cannabis indica
ttttactccatatcattaaccgattggcacaccggtccaaagttgcagcaagagtatgagaatcgacatcaacaatatcaacatctcgccacacttgaagaacaatatccttgcactcctcacccttaagtcaatgtgtttcaaaatgaaatttcttaggaagggatgcatgagcttggccaacaatattctcaagactggcaaaatatcaagacgttacataagccctcctgatcaaaactcttgccaagcccaaagcgaggcaacgacgtcagacgtcctaaccaagagaagatgaacaaaactcacgaaagaaacagagtgacactttcttgcagtgctaataataggttgttattaatatatgtcttgttacattctcttgtacataattatgatatttattgtgattataaataaatttaatcttaacaaattatatttcttatgactaaaaattaaagcaatggtatgtgtcctaagttatgtatgattgtaatatataaacgcttaaataaaaaaaagacattatatatattaacactaattatttaatctaatttccatcaattaatatgtcctaacaaaaaagtaaaatgtatatatagtagtagtaaataattttttgtttaaaatttgaaaaaaaaaaacctttgaaccttattaccaccgtcgttttttacagctattttgacaaaggcacattgaccgtctatagccttgggcatggctcttgtttaccaaaatttttagaaattaaatgaataataaattaagctaagaaaaaatatttaataaataataaagaagaggatttatatgtggttgggacgttaatgagctttagtctatgagtcaatattattaagctctttggctatggagtattttacacatgagtattcttgccaaatttctacagagtgtctagccaaagtttgtaacccttttattgcaaaatattttgtcttgccaaatcattttcaaaaagagtcgctaaagggattgtacatttgcctaccttttcaaggtggttagcgaattaagtttgcagtgtgaacttgataaattcaactaaagtagttattgaatattttctaaattcttctatcacactgttgaagtttttggcaacaatgttagtcattattgttgtaccaatcgcttggacaataaggacgagcccactttttaaatcctatactatcaacatatgcaacaatggcaggatccatctatctaagcttctcaaattatctatcacaatcagtcttcgaccacgagtaagctacaaactatatttgcttgtgatatcatccgccttgaacttggcgttcacgtccataaaaatatggtgatagcaagcacagtggtatgtttaggggaaaaaaagtgctacaacatagtcaatactttgatgtctatctgagacaatcactaaattttcaaccacctcaattgcttcatcaagtattgcaagaaatatgtccaagagtcgttattctcactgccaactattccaaaaacaatcataaataattgtttgtttgcatcgtatgctacaacaactaacattatgcccccatactttgtcttcaagaatgtgtcgtcaatactattatcacaggacaacagaaagtaaatcccctcctacatccactaagtgagacaaaacagttcttgaaccgctcctcctctacatgcaggtcagtaatggtatctggattcttctgttgcagcatgtacaagtatacaggtagcttcgtataagaaaattcaggtgtacccctaatatatgtaagggccttctcccggcacctctacgcctatacataacccatttagatcccatagtcgccaagcatatacctcattatgtctttaactttgtacttagtttcattgggtgtacttttctttaataaggtggctaactacccacggtgctgtttggcggtggtcagaatatttagcatccagttacatgtgtgtttgttgtgaaatacggtaaccttaaagttgttagaacacatcttcttcttccatcttaatctccatttgcaatttgaatccttgcatgtaatgtacaacacatcggtcccaaacttcttcaccatccgctaaaaattattattaagtgaaacctacccactacttgtattaattctttgtttccacacaaattaccaagttatatctccaatgattccttactttgtgttgacttcgcttttagccaacgacaatgagtctttttgataagcga

SEQ ID NO: 220499 - DNA, 2851 bp, Cannabis indica
caataacttcaaggtgatacattaagcctttcatgtacttataattcactttcaatttcaagtcatactaccctttgtcaacatcgagttttttcgtacaaaagatcaatcaaacgtgagtagcttacattcatatcaatctcgaatgtcaaatttatagctcgattataaacccaatttctaccctcaagatcccaaacaccattatacataatgaatgcaaaaatagttgaacttatcatccacggacattaaaaacacaattaaaattttagaacaaaaatttaagagaaaattgataaaaaaaagttctctataaaagccataaatcagtcaagcattggacaacgtcggaccacatagtaaccaacaaagtaatctaaatcgtaattgaaatctatatagtaacctacatagcaattatcgaaacaatttaaattgtaaaaataaaaagaaaaaattaaaaaatagtagatatagtgattttccaaaaaataattaacaaaaattaatttaagtgcgtattttgttctattttaaaaactataaagtctaaattgttatttatgaaaataaagagtctaaataataatttttttaaaaaaaaattaaaaatgatattttaaaactctaaagtaatatagattatcgttatcgtgcataacaattccaaatcaattcttgtggtccttggtcggtgttacgtggcacgacataatttgtcaaaaataaaatattaaacaacaaaaaaaaaaacatattaaaccaaagacaaataatgaaaccaaacacatagctctcataatcattgctaaaaattaaaaatgtactaataacaagtaattattgatggtataatacagtatagaatgctatgagaaaaagaaatatggcacggcaccatgataagtcatacatatattattagtatattaggcacagcataattttcttttttaatgaaatgtcatttttaatcatagcaaaagcttatttatcaatgaaatattatatactatttaaatataaattattaccgatttaattataataactcaaaaaaatattcagtcacaataaatcataatttcgtacctaaagacttttacaaatttcttttttgattgattcaacttttacacagatttcttttggtgataatataaacttaatagtattgttaatttagtcacagatttacttttattcacaaattttaaatattaattttatttcaatttgcgtgctcaattttgattcattttcctataactcatttaaaataataattaatagactcataaaagactttgaaataatttacttttaaataactcatattaagtagtacgatattcaatatttacgtatatttatcaaaatattacatagtgaccgaacccaaaacattcttggacatggtaattttaaatcatcatccgaacacctaaaatgtatggagtaaaacatcacagacaatttttaaaatctgaagatcaactgattgtaaaaaaccagtacatatataatatatgttatcattacccatacctttaccagcttattctaatcagctataaagtaataccccactaaatatatctcgttacctttttctaatgttttttctatataaaccatctccactagctaaaccacaacatatattcaagatctctctctcttctttttattattcctttagtcaaaaatagaaaattcattcagtaggtagctaaaactaaatagtaatcttgggcagtagagagacatgtcaggaggttactactcatcatcgccgaggtccgaagcttctatggcttttcatctttgcttctttctttgcatactcttcatgttcgtagggctgtcgtggtactccaattacgaggccctgatagagggcatgctagatcagatcaagctgggactcatggtctccccgctcctgctgctactagctctccacttgctttcctacattgaaaccgccaggccccaccgactcggcggcttctcgtctttcattccattgcccgagagggactccttcaatagggcaggagggactccctggggagttggctttcttctggttttcctattctttatggtctcttaccagtcttctttgcaggaacgatggttccctcttcttagcaaatgatatatttattaaactttctcttttttccccggttttcttaaggcttgtacaaaagtataaaggggtgtgaccgtgtgaggtgtgctaaattatttcatgcagaagtacaggaaattgttttttttttccttgtttgcttccaatttcttttttttttttttttttgaaattatattttcatgtaaaaatagtgtttttatcatatttgatcaagatgcatgcggagaaatatcactacttgtaggagccgatcagtttactcaatgtcgttggctcaaaatagactgaatagacaataggaaagcttaattaaaacattacgagcttgtttggtacgccatattaggtcacaaccaataatcaaagataaaacaagaaggaaaagaatattaaactcaaaacaattaaagcagtaaaataataaaatcaagaccaagatatatactcgttctagtcttatagattgatgtgatttatgactctactccaattcttgaacatcgcaccaaatcttatttattgattgagcaagaatagggtacaataccgtcgagatcgattctctctcagattctctcaaggtgtttaactctcacactcttgtgcaagaatcttcttcatctacaaaaaattcatcaaacaaacccaaatccaatctctcttctctgtacctctctatttcta

SEQ ID NO: 220500 - DNA, 9023 bp, Cannabis indica
aatggtatttacccaaaaaaaaaataataataacatatttggtattattgcaaacaccatgccatttgggatagaaatgtgctcaaacatatttggggtttttatactacctattgaaatttataacttttttacatttttattgtgaggcaaaaattttttaaaaaatattgtatttttttcaataatactatataaattttatagtgtactgtgttaaattttcacggttattttaaatattttaattgttttatagataatatttttataaaaaattccatgtgaataaaattttacccaaaatccaatagttttgtaaaagccccaacatatagacgaagtttaaaacatttttaataacttggggccattttgctcagccccagtatacagatagacgtaggacgacactattttatgagtaatttaaaagcgtcgtcacagttttgaataaacattttagcttaaatgcctcatgagttttgccaagttcagttcctattagtccttgaattttataaacagtagaattgtattacaacatttttggtttttgaataaatttcattgaattattcaatatttagaattgtatgttacaaaattctgagagaccaaattgccaaacaacaaaaagggcacttatgattaaaaaaaaaaactttttgaatgtgtacaataggtgctactaaatattaggccatgttaaaaagatcgtatatttttggttgaagaaaattatacctttgttttaatttttacttctaattctatatattctttaagatatacccacttttacagattatgtccctattatactcttagattaatgtaaatcatgtgctactagagaagagtatattaacctaaccaactcataaaaatgtaaatcatgtgctactagagaagggtatattaacctaaccaactcataaaaatgagtaaattttaatgaaatataatataaggatttttaattaatgaatataaaaaaaaatatttctcaatttatccctttttggtttaggcacttgcactttccctgaactcctatttttcaaaaatcttatgcatacaaattattaattataacaatatttaaaatattttctcttgaattgtgaatgtacactaaattagtgcataactttttcttttaaatttatttttaaatagagtaatttgcggcaaaatccctcaactatcaatttacttacaaaaaaccatccaatctcatattttagttgagaaaacccaaagtattgttctgtttatatttttaaggtgtcgcaagcctcgttaagtcctaatttttcccacatggcaatgacaagtcactaaaatttatcctgtcattgccacttagcaattattcattttaatttttattttgtaaaatatggtcacgtaaaataattttttagtgacctgccattgccacgtgagcaaaattaagacttaacgagattgtacaaacgacaccttaaaaatgtaaacggaacagtactttagagggttttcccaccaaaatatgagatttgatggttttttacaagtaaattgatagttgggggaattttaccgcaaattactcttttaaaaacaatcataatttatttgttgacaatttacataattacattataattagttggttattaatgtagatactataaaatgaatgattttttaaacaaaatatatttatttgttgtcatattttatgtgacatttgatgtaaatagtaataaattttgtaccaaaatagtacaacctttggagatggtattacattgcattggtgctctaattacttttccttgactctgcatttagtttctcagatgcagaacgcttacttcttgaggtcaatttgtacattggactgactgtagttttctgtttctccaacttaattctaagcccaccaaatctcgtctacttcaaatggaggaatatttagtttgaatagaattttgaaggaaaatgagataggaaacagattataatagagtgaggtttgaaaataaagaaaagttaaaacaaaacaaaaattcttgaaactttctttgtaacccctcaaaaggttttaattttactattatgggaaaaaaggtttaaaaaaacttataagggaacaaaaataggaagaatttattttcctaaagttttataatagtttttttatataaaaaaacatatattctaaacttttaaaaataaaactaaaatatttggggagcaagccaaagctctagttttttaattattgatgaaaatttgaaaaaggtggattatgttgattatctttgcagcaaaaaagcctttaaatcaaaataagaaagaataaatcttttgggatttttctaaattctcaatttttaaaacagaaagtgagttttttctttttcctccatttcaaacaaagccagtatgtatatgactttgaagcaactgtgctattttactcttatggctttgtggtttttccttggtcattgcagtttgtcagacgtgaaatggttacttcctgagatatatagtcattcacatttgcactgtaattttcttaagtttttagccaaccaaacacggctgtgctaattcaattggaagttacatatataataatgctatttttcagcctttggatataaatattgtaattttatgaaataaaagtaacaaatctgaattcaaggtattgaaattgtaaatcattcagcctctagattgtttgaaagttacagtagtagtttgttctcttgaagttgaaacatcataatcagctatacttcaacatcaacatttcttataagctttcacaaattaggttcaattcaacaggtaaatattaataaatgtttttttttcctgtctttttgggaggagatatgttatgaatatttaaatgttgggttgagtttttctcttttggtggtgggggtgtaaacagagagtaacaaaggaataacatgaatattaaaacaatgtatcacaacaatcataataattaagaaaagcgcttaaataataataataatattattctggggtattagacatacctcactccagcagccataatgtctaaaatgctggatagtaattttcatgagatcaatggaaattttcatgccaccaccaaagttgtgaattaggcctaccttaaatctcagtcatcttccttgtactgtgaagaccctttgaccgagaagacgagagtatgcggttaatagacctaaattgtttccttctcacttctgaagaatgcaataccagattagaaaatagctatttcaacatgcttcgatgctaagaaacatgttaggaagtaaatttgacattttaaaaagttgggagtcacctctacaagttgtcatgaaggtccagtaagaatgaaagcatgtagcaagctctgagctgcctgggtttcatcgggtgtaccagagataactatgatcctatcacttgttccaggacgtggctcgtgcacaatgaccctggcacctgaaatctgatttgagagaggaagggggagtaaggtatggacaaacttatagataaaaatgaggattcctgagaaatttaaatgcttctagcagcacggtttcgaatacgagaaggtagtaataaataaaaaacaaattaaggaagcatcactataacatagatttcgtttagtaatgcatcaaaaatcaaattttgatgtcacaaagtgggatcctaaacaatttttttatcaatatctcaaagttaaatgtgtgcttgtcataagttcaaagaattttcaataattctttactgtatttaactataatgagtgccaaattaatccttagtctaaataaccaaaaacttaataactttcttggagataattaagtataaagtattccaaatcttgacgtccactttttatgattcattttgataatcataattatatctatataccagtacatccataaacatactgagtacaaccttttttaataaacttgattatacaattcgtgcatatatacacataaacgagaatatctaattaaacgtgatatatattcactgatataagtcatttagctataaacttgaaaggagactattaatccaagtcccgacattgggcgggccatttaactaagacctcccagtttctttgagacttcctacttttttgtttaatagaactactatatctagaagggtggatccaatggttaggccgcttaatcccatgatttgctcccatgaaatctgggcttcaattttgaaatattttaatagtttctgcctacaataaattgtaggatgtagcaaaaagataagtaattaaaaaattccattataaataatggaacttctatggagatttctaaagctgcagatagttatcacagagagaaaagaaaaccatagttttaatggtgttgattcaaatacaacaagctagaaatctagtttgctaatgtgacgatacactagtgcaccgatgctctaggatcttcgattccagcaatttcctaataatagtgaaacaacaagctggcagcaaagcatgcttgcagtctctcacttatcattttagctatcactaatgggtagcatgtataagcacaaaacagtgccaataaaggagtatataacaagtttgtgatataagtacctgtcttagtcgagtcaagttgttcccattctccccatacacagagccaatagcattttcaggaactatgatctctacggttgtatttgttacaatagctgatttgcttccactgctgatatggcataccagaaaaaaacaaacaaaggcaatcaataataaaagaaaaagatgtcctgtatatttttgtggcaattatggcctatgctacttcttgaaacagatagatgttatgttgaaatgactactagttgtaagatatatggactctacaaaaaagaaaaaaaaaactacttgattccatcagaatctgcaaggggtatatatttcaatgaataatatagatgcaagtatacagaataaaagcaccccaagaattgtatcaaagtaattataaatgattttgatacaccatttttagctatacgggcattttgctctacccaaatattatcagttgacattttcttaaagacaaatttacaataaatgaaataaactcaatccttcacataccattacattacttaaatactactagattgccagcaccaatatatatataattcatttgtcaaaaaagagtgctccacacacttcatattcagataaaaattagacaaacagtagctaatatctgaaatcagtgttatccaaaccaaagctttaaatttataagatggtttcctttttaagtgaactaatcaaaattcactatctggtggcttctgtcagcattccagtttctgcgaaattatataaattagcataatcgggtaacttttgtgctctataactaaatacctacccggccagttccaagccaccttttagagaacttaatgccctgctagcatcagagaatcccctgatcgcatcaacgaaatccctgccagaatcagagaaacccctgctggcatcagggaatcccctgccagtatcagtgaatcccctgccagcatcaacgaatcccctgcctgcatcagtgaatcctctgccagaatcagaaaatcccctgtcagcatcagagaatcccccgccagcatcagaaaaccccctaacagcatcagggaatcccccgccagcttcagagtatcccctaacagcatcagagaatcctccaccagattcagagaatcccctaacagcatcagagaatcccctgccagcttctgagagtcccctaacagcgtcagagtatccaccaccagcttcagagaatccccttgtactaattccagccatcatctgcagatcagctagtaaaaattattcaaaagatcaaagtcaaagaatagataaaagaaaaagagacatttccaattttacctgtgattcccattgtcttggagaagaatgatttaaagcgtgagaaagtccaagatgatctacgcgttgaccaagtgtagaatgttgagtgaaactatgaacaccaattggcggtgaagtatttattgtaggaggggcagggtccctcattcttgcataggggctagtattagttagcaaagtcgaagcattccttgttgcagcactgtttactatacttgataaaaggttatcccttaatctaccagtggcattgtacaatgcatcttgcacacttgaaaaatctcctgatatctgttgacaaagaaatggttacagtgaacaaagatattgttaacttgtttaaccaaaacatgaaaatctttaccaagtagaactcgattaatcaaattaaatattattgttaatccatcacaaattccaacaccatatagaagggtaatgatagggttacttctatcaggtgaatctaaaactatgtttaatacaatgaaagagttgtaatgaaattttataaattgaaaaagattattttacaaatccttttctaatacttcaagaaattggaaaaacaattatataagcagtaatcacttattaaatctaaggaaaaagacatcaccgcacctgtaccactacatccttctctgttgcacactttgggacctggtctccccctattactcttatgttagcaccagttaccttccgcatttcggaaactattgaacctcctttacccaataaacaaccaacttgatttgatgggacaacaagccgtgcagtaacagatgagcctttattgaaatcagaatcttgccccttttcacagctagcatctaaaaacctcgagaaaacgagaaccacggccttttgagctggcgaataccttgattcagggttctacaaaaagtgaagtaacaaatccaattgaataacatatagacaacacataaagttgtacttgggcagaattaaaacaaggaaatcaacattttaaacacaaaatggctaacctctgatgcagaaattgttatcaatcgttcatcacaatcagccactgacactccaacacttacattagcaccagcatcattctgaagagccctaataactgaacctccctttccaattacactcccaatcctagcattttcacaaagaattctgaaagaaacctcctgtggttgaactttttcttcaattgctgggatcctttcagactccaacgccaagggacgaaccccagaaacataaccgatggagctggtaggcagactaagggagctaatagtataagtaggcatcatcaaatttctgtgagaaagatgttccatacgcagatcaggtaaagtctcttgaggaactaaagtttcaagttgtctgctaccaacaacagcttttgacttatcaaccgatggacaatcttgaacacgccgagagacagcaacaagtcctttcttaacagccaaaacactcccttctatctgtgaagaaaaaaaattacattcacaatcactataggaatcaaagagaccagatcaaaaacatacaaaaccccaatgactcttcatcacaatcataaaaagagcacaaaagtttctcattcaagaataaaatctaagcaagtttctttcctctcatatgtacaaaaccataatttaaatttaactaaatcgcgtactccaattaaaggcaataaattccaaaaaattgaacaattacctcaatcatctcatcagtggagtcagcacaagccggcaacatctcagtcaaaaccctaattttacacccacaatccttccttatcttctccacaatcttccctccttttccaatcaccgacccggcctgagcagcatcgaccagcaaccggcacgacacaacgccgatactagctccaacagcgccggtctccgccgcaacctcaagaatccgatcaaaaaccctcagaagagcctcctgggccttagacgcatccatctcttccccacctccaagaccaaacccatcacccccaattggactcttcagcgaaattttccccaccaaagaactcggcgcaaccaccgcgacgacccggtccggagactcttcgggggcattttcgacccgaatcttagacccagtagcctgctgtagctgcttgatcacactgccggccttcccaatcacgcctccgatcctcgacgcgtggcaaagcaggcggaaggccacgtgtccaggaggaacaacgagaggttgttgttgctgctgctgcgacgaaggaggcttcttcgatcgtttcgaggatccgttaagagaggtgggatcggacattacggaacgcttggctgggagagttgctgaaccacttcccataatctcactgtacggaatcacacaaactttctctctatatatatagataactccaaccccagtttctcgctctatagttatcttaggttcttatggcttcctcggtctccaaaagagcggagactttgagtttataatgggttttttcttgggttgaaggggaaaaggttaaagatgaagatagagatagaaagagaggtgtgttttgtgctaaattgcgccgtagaactgggtatagggtgcgctatgcgcttagatgaaaagtattgttatgtattggttgattggttgtgcacgtgagtcgcatttcgtcgtataggtaattaggcgaattgaaaatcaatctatacttatttttttttaaggttaattaggaattgacatataataaattatgtctcttaaacttttgttgtcgttaaaaattccctctaaattattgagattgttaaatttaaaaacttttgtctaattttagtaaaacaattttaaataaaagttcaaggacatgatttagtacctatcaaaatttgaagggcatgatttggtagatatcaaagtttgaacttttttagtcgttaaaaattccccaaacttcacataatttattaaaattatgctccctaaatttaaggactaaatcatgctccctaaattt

SEQ ID NO: 220501 - DNA, 1621 bp, Cannabis indica
gagaaaatgtttattgagagctttaaggtcgatagcccaaacgtaacgtacacagagagtgagattcattctgtgtacaactatgagaccactgagcttgcccatgaaaatagaaagggaacctatcagtggattgttaaacccaaaactgtcaaatatgaattcaagaccgaaacccatgtccctaaacttgggtctgtttttaaaacccctcaccattttatgcttgatttttgaaattaaaaataacccaaaaatgtttatctttcatgcaattgttagagttatagttgtttaatttatgagattatatttgacagggttatgcttgtgggatggggtggaaacaatggctcaactctcactggaggtgtcatagctaaccgagagtgagttttcttggttattttcaggctttcagcactaccaagatggaagtcattttcgattttcatttcaatttttaattcctagttgctaagattttgattctctttttgattcctgtttgaagctattaatttaataaacaatgtttaacgttttgtttaatttgtctttttatatgatatgcttattataatgcttattttttgtccatttagtaatgttgtgagtaatttgggttcattttaacattgggtactgattattttcagaggcatctcttgggcaaccaaggacaaagtgcaacaggccaactactttggctcactgacccaagcatcgtccattcgtgttgggtctttcaatggagaagaaatttatgcgccatttaagagcctacttcccatggtatactaaataaataaatcatagtaagtagtaacagtgtaaagtgaaaagtgaaaaagttggatatgacttaatatgtttaatgaatacaggtgaacccagatgacattgtttttgggggatgggacataagtgacatgaacctagcagactccatggcaagggccaaagtcctagacattgacctgcaaaagcagttaaggccctacatggagtcaatggtcccacttcctggtatctatgaccctgattttattgctgctaatcaagggtcacgtgccaacaacgttatcaaagggaccaagaaggaacaggtcgaacaggtcattaaggatattaggtatttactacttcaaagtgtgtttaattagtactttaaagtgtgtgtttagtatgcactctttttgtgttcttgtcttttgtgagaaaggacttatattggtgatgtttagtactaatatttttaggctcatcataacagagagttcaaggagaaaaacaaggttgataaagttgttgtgctatggacagccaacacagaaaggtacagcaatgtcattggaggcctaaacgacactacagagaaccttttggcttcagtggacaagaatgaggctgagatttctccttccaccttgtatgccatagcctgtatatttgaaaacgttcccttcattaatggaagcccacaaaacactttcgtcccaggttagtttcccgaccataacttgattattattgtcttttttttttaatcacaaccagacataatgaactctaatattagttctgtatttttttcgtacttatttccagggcttattga

SEQ ID NO: 220502 - DNA, 1366 bp, Cannabis indica
aatgactgggagagtactccaccatggctaagaaaaagaaagaagagaaaactgcataatgggattgaatgggctttattcattttgaagagactcatcagattgagagtttttcaatctgtctatttgttttgatggaggaagattgatgtcagttgaagatatgggtttattttttcatttgatatctgcaagtgcaaagtcatggtagttggttgtaactaggtggcagcaatatgagaaaacagaggcagaaccaaaccaagggccgaattttccactttttgaagattcaaatttggaggatttgtgaagcttatataatcaccaaagaatggttttttcgacaatagtaagataagctagaataactgcctcagtaaatcagtcaaataattactatgtagtgtaataaacctttggattatgattaattgatatgaatctcaatctatttaaaattttgcaaacaagcatatgttcgctattatcttcaaatggttgacctgtggcatagaattatccgagcataacccatattttattaacgtgctaaaagatattagtggtgtctagcatttttttatgtattaatattgttattggtccaattaagtattgggttccatataatttaatataataaattttaaaaaatatcgttaattaatcgcaacgcaacatgtcaagaagatgctaagcattacgggtactaatagcaatgctcattattaacttctctttttaatgtgaacacttgagttgtacacggcaagcaataagtatcttctggtcaaattttatctttattgaacgaagacgcagaccaattcaaacacaaataaggggccaaacgggtaaccccacgtatgtgaatgacttaaaactttgactaagcgatattttcaaatataaattaatagaaggaagaatagtaagactcacgagtcacattctcatactatttctttatttttttttttttagcaagggctcgttttttttcttaattcatttttttttggtaatgtcatacaatacaaccgccaaaatgtcatatgccatatctcaaaagtgctacagaaaattaaaatgtcattatgttagtttgaaattattagaggaatttttttatttgatacaaaaatatttttttttttggttttgattcaaaagaaaattgaacaaaagcttagaaggtttataaacaaaagttcaaaaatttacgtacaaaagcttatatacaatcaaaaaagcttacatatagtcaatagaactaagcttagcacaaaagcttaaaaggttacgtacaaataatattcccttaacatttctctactaatttgttaggagtattagttagagt

SEQ ID NO: 220503 - DNA, 1562 bp, Cannabis indica
atcagctacacttttggggcaaaccgatttaggaatgagtgtaatggtagtagcatttatctccttaagtattttcccagagttcaaaaaagataacacagcctcctcagtgtctttaccaacaatttgccagcaatcttggtaaaaggcactaccaaagccatcaggtcctggggctttgttcccaggaatcgaaaatgcagcagcctttacctcttcagcagtatatggagcagagagaatctcatggtgaacttgagtaagtttaggccccaagttaacaatagactggtgaacatgtctcctattaggtaaagacttacctaacaatcccatataatagtctaaaaaagctttttgaaccccctcaggattatctctccagatcccagtttcatcttcaatggaaaaaattttattttgtatccttctagctttcaatgatgcatgaaacaatgctgaattttcatcaccatatttagcccaatcaagcttagctttttgagtaataaaaagggaataagctttgtgtacctctgtgtaatgatggtgagctctatgttcttcttctatcaactccatgttcatcggatccttgtttagtcttgtttgtacatcttcaagagttaacttggctgctatgtcctccttgtgaatttccgaaaatccctctttgttcaacttccttaacacttctttcaatcttctcaacttactaacaacttgatacatctttgaccccagaattccaggacgccaagactctgccaccaaattctcaaattgaggagcaagtttccacatagtgaaatatctgaatggctgcctccctatgttgcaatctttgtaaatagagaccaggatgggagagtgatcaaatgacaattcaggcaagaaaaccgcttctgagctagagaaagcatttatccaacaaggattgatcatggctcgatcaatttttgaataaattctctcctctggcttttgtttgttattccaggtgaaaaatgccccagaatatttcagatcttcaaggttgcattgtgaaatacaatccttaaatctctgagaaggtatagcatgagctcttctaccaattctctcattcgcaaggagaatctcattaaaatctccccacaccagccatggatctgcaatgttagtggctaagccctctagttcagcccataattcttcccttctttgttcatcattaaagccatacacacaagtaacttgaaatttccctcctctctgtttcggcataacagtacaatgtataagttgacttgtgcaaagaccaatatcaacagagtaaacatttggttgccaagcaactattattctccctttatcaagccaagggttattatttgtgaaacaccaaccttgaaaaagacttgtatacaactcacccatattcttattcttaactttagtttctaggaggctaacaaacccaacttccttagaataaatcagattcctgatttcattgtgtttttgatggttgttaatccccctaacattccaacatagcaatctatccattggaagtagag

SEQ ID NO: 220504 - DNA, 2035 bp, Cannabis indica
aaaaaaaaacataaaaaggtttcccatatcaagactcacattacaatacattagtttgatattttttgatattaaaaattgtaccttgatttttccggatctaatttgggataaggctcctacatctagaacgggagttttaccagtagcgttcttgagttcaattgggccggttttaggccttcaagacccaattgttcagtgttaccaagggtcaaactggaagccaagagaaggatcttgtcaactaccttcagtggtagccatttcagtagtgccattgctattccgaaagttgagaacccaagtatttctctaggcagaacatggacctgtaataataataatattattaataaaatattattaacaaaaaagtaataatgattcaaaaacgacaacgatgctattgaaaaaagtgccaacaatggctgaaaaaaaaaataaaaaaattacaaaactaggaagaatagtcaaaagttggaatttttttagcataaccaaacttggaagatattaaaaatctacaaaaataagacaaaaggcagtgtgtttggttgagagagagagagagagagttacggtgtttctaacgaccatatgaggagctgcattgtgtctacaaaggtccaaactaacttccataccggaattaccacaaccaatcaccaacaccttctggtttctaaactcactaccggacttatacccactggtgtggacaaccggcccctgaaatttgtccagccccaaaatttctggtatagctggctccgcattttcgccggtggctacaatcagccaccgagaaatgtagtcggctacttgggtctttacccgccaaagccccgaacccgaatcgaattgggcattttgaacggcttggttgaagcggggtttgattgagaagtgtgaagcgtaagactccatgtaagagatgaactggtgtttagttgggtactttggaaaatcttcagggaaatccatgaaaggaagctgacaaaactgttttggaagatgaagtttgagacgatcgtaagttctttgttgccaaagtgaagctatacagtcacttttctcgagaaccaaacagggtactccttgacgagctagacatgccgaaactgctagaccagatggcccagctccaaccagaatcggtccttgaacccaaaaaacacatttcttcgactcttgttctttacatgatgaacccatgtttacaaaatcccaagaaaccaaaatacaaaacagtttctttgtatgagaagaaaaaagtgagacgaagaggttttaaagagagagtgtgagtggagctttttcaatgcatggaaagagagagagtgagagagtgaagtaatgcaaggcgtaaaggttaaggaaaggatttggttctgtttctcaaggcccttttctcttcaggctcagggatttgtgggattcaagttgaagtacttagtagtgtatatacaaagctcagtataaataaataaatgcgtaggtagattatttcttcattattttagaggaataaatattgatatgtcacgtgtcaccaacttcaactctatgcaaaacccaattttaaaatacgttaaattacatataatacagctatatatatatatatatatatatatgcaattcagctctctgtcttagctgcagagcaatttataaatttgtaagataactacaaagagcaacagagaaatctttctatgaaaacaatgacatatcctacataatactggaggaacatacatatatatgacgtcgaaatttaatctttcttattttattttaaataattttacatatatatatatatggtatgtatactattgattctgttgtggaaaatttgctaaaacatccttaaaaaattaaacaaatctcttaatatactatatttaaataaatacactaaatatttttcaaatactcttaaacctaaaattagccttataattcagaacaccctcgtctccctctctatctatctaacttcccccagggccggccctgaaacaaa

SEQ ID NO: 220505 - DNA, 3493 bp, Cannabis indica
cttctgttggtttgtattagtgaaaccaagctgtatgggaatacaattgcattttgagatcacaggcagttttattttcatcacaattatctaaaataggtttggccttctcaagaacccaagaatgtgtcttgaaatgtaattttttaagttaacgaggataaacatttggtcactcttttatgtttctgatggtttgtattagagaaaccaaggtgtatgggaatgaatattagcatgttggggtcacagcatttttttttaccccttaattattcgaaaataggctatcccttttcatgtttttgtgatcaagagtacaagattgtgtctcgaaatgttattagtcatgttaatgaggaaacaaatttagtaactcaatgaggttttgtaggtgaaaccaagttgtgtgagaataaaattgcatttttgggtcatgggcagttgtattttgttatatcaattatctgaaaaggacttggccttgtcatgcattcgtgatcaaggaaacagatttgtagtagctcaaatagtttgcttgctcccacaaagtttgaagttctagtctttcctgggcgccttcaaaacaattgctttagctttttggtctcagataatgtaggttaggcaggagcctagtttcataaaaataataataaaaaaagtattaatgtaattgctttgaaaaaaaaaaatgtaattagtgaagaaattttttggttattaaactgaagccaaccattacattacagtaaaccttttcaccatttaaatgtttatgaaggttttgatctctgtgcttctactcacgtaatttcactgtcaacattttctcttctttgcagtgattgggaacgatatctgataatggggtgtctcactatagtggtggaagattttgacccgattgattcattgtcaatatctgatactatgaagtttcaaccgtctagcttgttcaaactgtattcttaattcctggcaaccaagttatcgatgtccaaaattgctcattgtctctcccaacattgtatattgaagacatttaccttgtgacaaaacatttgtttttcaatttcttttgcttactagtttttgggctttgaaaatgttcacttgtagtcatgatttccttttagttttaagcaaattcatatttgatacattttcacggtgtatatagattaattgatttctatggtccatttggtttctttaatacagctacttacaagatttcatagtactttttcgaccattctttattctacttgtagatgtgataataaaacaaattaaattgaaaattttaattggtattaccgtcatgagttcatatatcattacactctactattggaaccaaatataaatttgtattgtctatgtagctcaaatagtagatgtagttttcttccacaagatcattgagacttgagtctcttcaatttggtacctagtaccaacataataaacaggaaacttagttcttggaaacatttattttgatttgtaacattgtttgtcaatttctttcacttactagttctctgtctttgaaaatgcctacttggtagttatgatttcctattagttttaatgtacatagagaatagagtgattgatttcagttgtccactttagatgtgataatattacctactctctctctctctctctctggagcagaatattataacaactaaatgtttagtatgactcaaacctcatatcatatcagaccatttgagctactcttatgggataataatactgctaaaattaaattgacaaattagttgaaagaaatgcactaaaaaaagaaattgtcataatgccaaatgaaattacagaccaattaaattggaaaaatgggatttgactttacaagttcaaatctatcagttgggaaaagacctacttttgaaaccagatatgaaattgttgtaatgagaaatccttactctagcttcacttattcactttcagctcatttaccttgttttaaaaggaaaaccaattaggaaacattggcaagagaggatcacaaataaataacatgaaattgtttatgctgactgaaatccttgatgctactccaaattataactgttgttcatagaaaaagagatatgactatgatttactcaagactgagcttttcgagcataggttagatccatcaccacatcttcgcctgagctgcccggtgacgtctctatattctcagaagacattgattggccatagatgtccagcaagctgcgcagttgtagtgttgaactcattggttcacctttcagtaaaatctctacctgtaagagttttgacaattaagagaattaatttagtgtcccacaaaaataacagttttagtttgaaatactaaataagacttgattatgaaactatatcaattcatgtggttaaaacttgtcaaaaatttatagcaaaatatgaagtaattacctctgactcgctagaaagattcagtttcttcactatgtactttttgatcaaagagacagttaaagtatcatctctagagaaacacataggaaaaaatcttataagaaacgcataaagtaataataaatatcaaacttgaaacataatttaaggaacgctaaattgatgagtctattatgaatagagaatagtatacacagtcaattcatttcaagactatgtctgcaaaaattatgacagaatattaatgagagtgttagcatagattacaatgcctaacataaacatgtaatgaaatagaaaaagtgtaacaaaatagtgaggcaatgaaacatacttaaccctcaaaaagcgtgaggatagctgaggcaagggtggatatactttcctgcatttatatcaaagagaaatcaaatacttgagcaaagattcaaacttttcaaccatgacaagtcctatctagatatgttacaagctaaacccaacacttactggtcatgggaagcaattaaggagaaccaaattggactaaagaatctgatctctgcaggttcgctacccttactttctacccgaacactatcttgtctttctgtggcaggttcactttccttactttcaactggaacactatgctgcccctcggtggaaaaatcgctacccttactttcaaccggaggaacactatgttgtccctcagtgacagttgcgcttgttagttgaactatttcttctgtctttgaaagtgttggagcagaatcttttccacgactacggctaccaccacgaccacgaccacggcctctgaatctttttccttgtaccttagaaactgtggcaggaggatcagttaaaacagggttattagtaacagttgcttcctgtgtattggcctgatcatcagtctttatatcgcttgctgcaactttctctttcagtatcttggcattgttctctgtactcatattctgaactccattcttagatgacccagtagcattcttctgcaacatgataatttgaa

SEQ ID NO: 220506 - DNA, 3449 bp, Cannabis indica
tatattatacgctaagtgttttaataactgattcgcctcaccattgacttcttatacagagggagatagttgtctcgctatgcgaaatctatgtcctccttgggattatgccgttggacgtgaaatgatttctcgtcaatacgtaaatcagtagtccgtacatccttgtctccctaaagactatgcaatttgcgagttataaatatactctattgattctgcatttaattagttattccatttaatatttttaatataattatcaatatattcattgattcatattccctgagattgacatgcgtcaccttctgaagtaccagccaaattttgggtacaacaattgcccctgaaaaagtccttttcaatgaaaagcgctttttaaatgattattgagggtatatttgtcataatccattttgaaaatatgcatgcctttgatttttgtggttttgtggtttcgagggacatcattagcattaatgaaccatcctttccacttctcttccatttttattcattggatcttctacattttgatctgatggttactaagttcaaagtataaaacggtaaagaatccatttttcatcatttttgtcttttaaaaaactcaaccttttctgaaaaaatttcatcccagcttcctgaaatcttgcatgcccaccttatatttgacatactttctgcgaatttactcagattttcctttcgacctcaggtgttcaaaaaactcatcatgtcgttcatcccgtctctgtttgcaaaaaatttcaccactcgactactcgacctcaaacagtaagtgtctcatccttcttctctttttctttttattttttctgggttctgatcatttagtttacatcttgtcattctatttggtacgtttagcgattcgggtttacgttttttgggtaatttttagggtttaggcatgatttaggtttatcatattcttttctaacaaatttcatctaggaattcggattgttctttttttgtagaaatctcccaatctggttcaaaagtttactctccaaagctcttggaaacaaataccctaaaaaattagccctccattcaaacccagaaatctggaccctcgatgcaaattagaaatgaatgatgccaaaattagagatcatctgattaagtcaaaccaagaagaaattgctagtcgttataggcaattcttataagagaattctgagggcaaatttttttttgggagacgcagcctggcctgaaccaacaatattagcttctattccactcacgagaaaaatatttttacctgaagtcattgttgcttttgaactaggttacctaaattttgacattatgtctcctaagcctcgtaaatcaagaccccacaggatcacaatgtcaccttcgaggttgaactcatcgaatccaaggctaggtcaattggggcctacgttcatggcatcttaaagtcctgcggcatcaagcaaaggaaaggttgtgtcataagttccatgtctcctgtggaattcacctgttttcctccataaagggtactacgtaaaaagtgcattgggcctagcatgagtaattcctcgggcattagagcctggagcctcaagcacatcaaggctggggcagtccttccccttagggattattttaaggagtactgtaactacctcagggttaccccattccagctgaaccccatctcgtatatgatccttgtgagcttgaaggtcctataccatattttaggatgggagtgccctacttctttggagatagcctatttttactcagtcaaagcagtccctgcgaggaagaatgttgcaggaggcttttactatcttgggacttatattggtgatgattgaaagatcatagttaggttgccaaacaaaacatggtttaaagaagagttcttctggacgacgggcctctctccaataaatacaattacctttcgcatcatacgtaagtgcttttccttagaaacttaactttaaaatgtattaatttgtatcattaaagttgcttactaaacttttgtctgattgtagcagttcctcggagaccagttcctactcctgtgatagccaagcgccacaaaattttgctaagtcttcaatatgggttgcgagcagtagatttcttaataaatgaaaagattctgaagaatgttggccttcttacatcggacgaatttacttgagattacaaaatacccaagtattcttcgtttcaaaaggtcctggttcaagttgaagagaaaagttaggaatttgtggctcgcgcacaatatctcgagagaactgccactcacgatgaaggagcatcgtgaggtaatctatgtgggtagttgatattgctgagcagtacggaactatattggatagatcgggtcacatagattcaaactgggatttagatccactacacccttatgatctttttatgatcataagattttgggagtttagtgaatattatggtccatcctcgtcatcctctgaagattatggtaaccttctcaagtgggagtttttttttcccattttcacttatttattttgtttaagtgttaatgtacttctcttacctcgcaggtatggatgtggatttggagtgcatgttcaagagtcctcccttagtcgataagaagtctaagaagagagttcccaagatggtgaggcctcgggttctatcaaagaacccaaaaggaccaagaccactgccaacaagaagaagtcctcaagcctgcttaccatcaagccagccaagtctctagagaaggggaaaaaggtctctgttgtgaggaatgccaaggagcaaccaaatgggtcagtgcatcaggtgaaattctctggttctcttccatagatggttctcctcaagccctcctatcccctacccctcgatgtcgggacagaaggctcgcaactttgctcgcagcatgctaccaatggttgccataacatcctgactttggggtttggcaactgggatcttcttacgcgaggtagctctaaggatcttgccaaaaggagttacgagcttttgcatcagataatttccccgtctccttgttctcacttttcatcattatatcatttttactaactttgatttgccttcttcttgtaggcctctctcctttccgatgttactcatcatcagtcgtctcagtaggctgaaatgcttaaggttgagcttcaccagactagggagcatagggatactttagccaaaaagtggaatgactccaatgctgaggtttctcacacaaaggaagaggcagtaaagcaacgtgtggctgaccaaaagaaggtcaaggaacttgaggactctctcgagtccctccaagctgatcatgagaaaaaactcaaagagatggaggctgaaaccaagatagggttattagcatcgggaggaggaccatctatcaaatctggtca

SEQ ID NO: 220507 - DNA, 2766 bp, Cannabis indica
ttttgatgtatatttatttgacactaatacattcctttaattctatacatgtaggctcttatctttccagagaacttgaagcgggtatgtcgttcacctttgctcgattggaaaaatcttacatgttttactgaacgtaaattgaagaatgaatcaatattgaaagatgctctgcaatgaatttctcctacattatccataaagaaagagcatccttattatgaaaagcatgaagatttgttcttgtgattattatgttatcaatgccttgttacttaagttaactgaaaattcaatattatattcattagctttcatcaggaaaggtggtgaaaaattggtttgtcaaatgttggggcatttcttagctgtataatgactatgaattcttttttgttgattatattgttaacgtatatttggtccttctgaattgtattttactttatgtgattaatgctctatatagtaaataaaatgatttgattttgagttatttcatgagcattgattggttgaatattacactgaattggaaatgtgatgtaactctgtaagtgaagattgatcattaatggttttaatatgttcagcaaaacttttatgatttatttggattatcctttattcgtgctatttggtttttagtgaacatgaatagtgtgaatgccactttgtttattttttcttgtatgggatatattgtattttgtttctttcctctatttttctataattgaattcttatgtgctcttaatttcacgagacattgattttctttgctatggataataccaaaatatgttgtataaaatgttcaccaacctctcatttaatcatggtgttttatttttatgcttgcatgtgttgttataagataatctaataatgttcaacaaatttgaaacacgttttacccaaattatatcaattacttcatcaactacttagataaattcttacagttgtaaaacccttgataaattcgtcattgatatttatatacagttattgttcacttacattctttatgtatatacataatatatatatatatagaatcaatcaattgggtttctattatttagaggcaaattatgttggaagtgtgatggattttgtagggttattttctcatttgaaataatagttatatataataaaaagactacagaatatttgttattgaactctaagcattataacttgtgcaaaagaagtacttttttttttttccatttaattgaagctatagaaataaggaatttttattttggcttattttagaataaaatcatctaatttttattttttgttatggatttgggctgggttcaggctgttcttattttcaattttaaaaataagtttgtagacaaaaaaacaaaataaaaattgatgatttgaatcaaatggaaaaagtactttttttttgcacaaattataatgctttatttagtagtcttttttattatatcaaattttggaaaggaaactattatttcaaatgagaaaatcactctacaaaatccaccacactcccaacattattctttattttatatattgtgtatatacatatgaaagtgctaacaaaaaaacatatgcatagagcatatataggtgaaccataactttatcaagtcttttacaatttgaagaagattcaattattgatacttgtgagaattggaatatggaaagaaaagcagttgataaatatggaaagtaattgataaattttgggtaaaatgtgtctttaatttatcaggaacatagatagatcaccattattagataatctcataaaataccatgattaaatgagaggttgttgaacattttatgcaacatattttgacataatcctgaggcttagaagaaatccattgccaagaaaattaatgtctcatgatcaaatgtgaattaggagcacataagaaattcaattatagaaaaataaagcaaagaaacaaaataaacaaagtggcacacactattcatgttcactaataccaaaatcacacaagaataaaggataatccaaatgaaccatcaaagatgaaactatattagttgcagaacatattgaaaccattattgatcaatcttcacttacagagttacatcacatttccaattgagtataatgttcaaccaagcaatgctcatggagcaacccaaaatcaaatcattttatttactatttagagcattaaaggataccccttttcaattactaataaatgtcaacaaaaaagaatacatagcttcaattaatagcagaaaatcactttagtatcttatattatacagctaagaaatgtcccaacatttgacaaaccaatttttcatcacatttcctaatgaggctactgaatataatattgaatttcttgctagtaataaggcattgatagcataatgtaatcacaagaacaaatctttatacttttcatattttttaaaaatacattggtaattaggatgctctttctttatagataatgtaggagaaatccattgcagagcatctttcaattttgattcattctccagtttacattgagaagaatatgtaagattttgccaatcgaccaaaggtgaacgacatacctcatctgattcaacatgaatgtctatgcttctccaagaacacttgagattgaaaagaaaattcatcaaattgataaaccaattgacatcatagttctccagcccgtaaagaatcacaaattctccagacaacaatttggacgactcca

SEQ ID NO: 220508 - DNA, 1832 bp, Cannabis indica
ttttatttagggcataaaacccaacagatccatctcctcttcttctccatttttatgccgttttcgttcattgagagttttcacaacaaaataattttctttctctattctctctcattcttgcatgtcctcattatttcttgtctattttcttcgagtgtcaacaaccattttttccaacccaaaagacgttatataccatacccctgttatcaaaaatttcaggtaaggaattcttccagattactattcatcccaaaaaccagtaagtatttcgacttttctcttttatttattatttttattttctacatttgggacgatttattaggttcatttattctctaggtaaatatttgaatttttggtgatctttatttttcctgaattttaattcttcaaatttttcagaaatttaattctttaaatttttcaaaatttaattattgaaaatgcctctacctgaattcgaatctgtaaacccaaaaattttagagcatgaaaaccattatttacccgttttttcctttaaatcgagacgtaagaatttcaaaacgatactttaggagaatgacaaaaagattagggaatataacgataggttaaatcgaacaaatacttttgctcgttataaacgttttatagatgaggtcattgagagaaaatgcagttgtttacgagatgcagcttggcctgagttgcatagtctaattaagtacccattggtgagcctttattttttgcctcctgttactgttatttttttgccatgtgagctaaatttccagattacggcccctaaaggtcgtaagtctaggttatcctaagatccctttgtataatttgaggcaaaaattttcagtcaaaagtcacctccattgtcccatatgtcgggccctttctaacactgtgcggcataaaacaaggaaatagttttgtatgccgatctgttgagcgcgatgagagaagctgctttcctatgtccacttcaatagggattttgaatgtagtacgagcgattcttctcgtattggggcttcgagtatacagcacatctgagccgaggccatcctttcgctcaaggattattttgaagatttctgtaacttcatagggatcgtccctttccagttaatcccaaatggatatagatttttggcctctttgaggtctttctatcacatgatgggatggaaaggtccctctcccttcgagattacatgtctgtatacattgaaagcaatcccagcaaagaagcactgttctggaggtttttattacctcggggcctattctaatgatcataaattatcgtcagactccccaacaagaaagaattcaaaggccagttcttgtgaaactttaactttagtactcgtgtgctatgggagtaccgacactcctatacttcaattttccttcttttcttgtgaaactttgactttagggttcaagtcttagcgcatgcacgagatattttgcttgaagtattgattctccttgagaatttcttggtatgtaactactgacattgggaagtgttagtagtcgtgtatcacattttccttagtaattggtgatgccatcttgtcctttgtactcttttcttcccaacaacttaaagtattttagccccttgttggatttcatctcagattagggctttgaagtgagtaagtacccttttttttttattttttttttattttttgaagagacaaaccctacgggtgcaacactacacccatttcaaggcagtagttgcatgcctccttctttgtgccacgtggcactccgctttgtcctttatcgtttaaggtcttctttgttga

SEQ ID NO: 220509 - DNA, 2969 bp, Cannabis indica
acactttgaaatgcaactaatgccgccgttattgtattttctacaagaagcggctgatgatcttcaaagacaatcactggaaaactggaactggatgacactgtcaatatacacgtgttctgccgtgagtacaattactctatttgaattgaatcataaaattatttgcttccttttcctattctaaaactgaaatttctttgtggggtctcctgaggcatcccaattttcaaggataaataattacaccctttagtctggtccttatacatattcgtaaaagacagttttcactgtactaatattcatgttacattccattctccagagctgttcgctttcttctgatgaagaagagaatattaattggagtgaaggttggactgtggcggaagaagctgtaacagtagaatctgagaaatctttacatgagttggcagaacctggttatttcatttcgtctcatcatgagcagtaggggaggggcatacaaatagttatcaaccaatacgtgtaagtatatgagcgagtatttttgtggatagatctatgtttacgcactttgcctgctgtctttgtttaccatgcgaataatgttccttggtattcctaatgttgtttctaacagggggtgcaggaaatgcctagagcttttgagatggagaattctggggctggtcctctggtttgcccccgaatacaacagcaagtgtttcgattttcactgatgtagcctgctgtcgaggagtttaatagtctgatagtggaagcttcagttctccagcatgcttgaggctgagacactggctttgctccatgcagctgcgtcctgcaggtcgagcgaggggttggaacaatcctgtttttgttatggattgtaaaaccgaggtggagggatagttcagtttttatgcttttatttgatgttttggatatgttgtctaaatcccaggtttgtcgggttaattgctgactgactgggcttttctttgtagagaggaggtattaaactccttttcgaggaatggaaagagttaatcatttaaaaatcataaatttgctcagaaataattgttgcagttactatgatatatatgtaaataatttcaattgaaggtgcttatatacaagccaaaataaagctgaaagactttctagtgacaatctctcctttaaagatgtgttttgaatttgtactaacttcttagttttctttttcttttaccctacatagcacaatcttcattgtatttttggtacatataaaaatattgatatttttttgtatggaatttaaataaaattttaaaatttttcagaaaagttcaattcctctagtttaggagccctggcctggtgcccctgcagtgctactcagccttgagcattgtctaaggatattagatctgtaatatttttatgtaaaattattcttgagcatctaaatatataatattttagtataaattaaattttaatatagtattatataaaaatatgatatatgatctaatttaatatactacaatacaacttaatacatcgtaccaaataagtcctaataaatttttggcttcctatccaactcaaacttatgttaaagctaaagagaagattgatacatctctctttaattcttttgattcatacatatacatatattttatgttttgggtgatactctcatactaatgattatactaatgttgtataaactctcatgatgatattagtagattcagcaaaaatcactgcaagcacagtgctagtggagatcatcagtagctcatactctgcaataacatctcatatggtaaattgaatgaaattgagaaagtctttgatgtttcttctcatttagttaaaaactcgatgaccagtgaatttgcaacaaggtgagagtgtacccacagttgcccaatcatctattctcagaggacattattgtgctccccattagagaaaacaagtaggtggctgttagcttggagtttccaaatggaaaaaatgaaaggaatagttgagaatttactcacccatactcattattctttaagtataaacacaaatgtaatctcataaagaattgatatgcttaaatgttttctatttatttattttcttaaaaacacgtcaatactttgagaccctaatacaaacccaacctcgacctaacccaaaccagcgacttcaacctagacctcagagctgaacctggacattggccatggctcgactcggacatagaccgggacctctacctcagctccgacctgcacccgatccagatccctgactatgcctcgacccagatcccttacccagacttagccctactacttggactcgggccaaaacctggactcccaccccgactttaaacccaaaccccagaactggagtcgagcttagatttgaactcggggtaccccagaattggaacccactcccaaactggacctcgagttaggaccacgacactgcacctcgaccttgaccttgacccgaacctaaatcccaggactcggccctgatctagacttgaaccccggcatcaagcctaaattcatgttggtttaatggtactaaattaggtacgtagtgttaggctatttttagcctaagttccgggtcgattttatagttgttttctctgttaatgttatcttttagaatgattttacgcttgattttccttgtttcagattcccgaggcattagagttcaaattctatcaattgttgaaaagacggagcaaactggagaaaaatctgctgaagctgacaaaagtgcttcagtattcgtgaccaccacaatccatggtcgcaactacgagatttggcagaaagcatgatttttggtctttgcctatggtcgcgactaggctttatatgtagtcgcgactatgcgctaaacacgggaattttaggcagttttaaactttcgccattcaaagatagcaaccctaa

SEQ ID NO: 220510 - DNA, 3422 bp, Cannabis indica
gcaccatgaagttgaactatctccttgacaaaaagatcagcatactggtccattgtatacgtagtccgtactgataaaaagtgttctatctttgtatatccatccataattacctagataggatcgtagaactctactgttcttgataattcaaccacgaagtccatggccatttcttcccatttccactcaagaatctttagaggttgaagtattcctgctggtctctgatgctctaccttgacctctggtaaattaaataattgacacatactccacaatgtcacctcttatacctgaccactagtacaagcttttacattgtgatacatcttagttgtccctggatgtcgtaaatatggcgtggtataaagctcatccagaaccttctatctaatatcatcattagctggtacataaatcttgtttctaaatcatactaattcatctaataaaattgagaagctctatgctgacccagcttcaagctttcctttatactcttgtaattctagatcactctattaggttgtcttgattcttcctaacaaatgagactacaacataatattaactagttttctaactatatactcaatccccactctggtcaaatccttagccaactttggtgagatcttcttcaattcatactcttgccttggacccttttaacttagaacatttgctaccacattttcttttccaagatgataaagaatctcttaaccataaccttttaccaattcccaccatcgtcgctgtcaattttacattatgcgtaggacactgatgtttataatccttcaattacttagatacataagcaacaacttcccagaactacatcaaaatgcaatctacccctgtttaaaaacgtcacaataattcacaaatttcttattactgattgataaggttaaaactagtgcaataattaacttctacttcaattctttaaagttacagtcgcatttgtcaatccaaacaaactttcaattctttcaagttaattatgttaagggcgtaaaaatcttagcaaatccttcaacatatcttctgcagtaccccgctgatctcaagaaacttctaacctcgattgcagacctgggttgatgctaattctgaactacttctttcttaactgaatctacaaagattttgtctttgttcacctcatgcttaggaaacttacgtggggcagccataactcgtgtttcttacatttagcataaagcttatgctcccagaggtattgcaacatcatccatagatgtctctcatatgcctcctctcgaatcctcaactggtaataaccagatcaaagatcgatcttagagaagacgctctttccttgtaattgaactttcaacaacttttttttaacttaacaagtaccatctgatacgaaattaagatacagactttgccccaggtaccatatcaattttaaagtcaatctcccactttggtagtaaccctagtaactcccctggaaaaacattcagaaatcttcagaccactagaacatgttccggtcccataggtattcttcataacatttacctcactagctaagaaactgacccatccatctcacaacaaatctctttccttaaactttgagattaatagaattcaggatccttaaaccttacccattaacataaatgggtcctctccatctggttcaaaagttaccatcatcccttttaccatcgatagttacatcatactttgcaagctagtccatttccagtataacatcaaaattctctaaattcaatcaaatcaactgataatccccttcccttacaaacagcggaagggacctaacccacctgttagagataaccaattctccactaggcagtaaggtaccagaacctcttggtacaacatctctaagtttatacaaatttccaatcgctatactcaacacataagaatgtattactccagaatcaatttaaaacagtcaacaaggtatcatcaataaaaaagctgactcgtcacggtggaaggaccaacatcggcctctacctgtgtcaacgcgaactctcgaacatgaatcaaagtgtcatctttcttctattttggtcattgtaactgtggataatttcttttcaaatggctcaatacccccacactggaagcaggctctagctcaatatttgccctaataacatctcttgcacctttgacactttggataggtttgccaattttcatttcaccttgtcagaaaccttggtgaccttggaatctcttgtttggtcccgtagttgacggattattaggcctttcttacaatctttagcgtcaactcccttactaaaaccaacattagatgtttgttccatgaatctctcctcatattgtttccctttcgaatttgatcttctgcactctcaacagcaagggttagctcaactacctgagcataagtgtagacaactcttagttgtttggcagctacaattacatttcaagcaatatgttctttcaaccctcaaataaacttggcctctctagtcgccttagtggccattccatctaaagtaatctttgctaaccaatcagatttgctggcatactctatcactgccacattaccccggattagtcgtataaattctttccgatttagcagctcgaataaattctttgttgtacttctcatagaacaaagtccagaaagtaacccacgtcatggtattcagatcatcgtgttatgatacaatgtcccaccaaatgcgggcatctctacgcaacatgtaaacgacacatctaacccaatcattactcttaacctgcatgaaattaaaaatcgatattatcatactcatctattgctccaccttgagtggatctgcaccaccctcaggcacaggcaatcactactttttgaaccacttatgcaaaggctccaaacaatttctcgcatcctgtagcactaccaaaagtgctagaggatcagtattgagacttggagaaggcttagtttgctgctccctcaattttcaaatctaatcaccttactaccggatggtctcctgcatcacggcatacatctctttccagtttggtggtggtggaggattcaccccttcaccatcaacgccgagccctaaaagctcgcgattacctctattagatcacctcgagtgcatattctactacactcgcgaccaaaactttccatcattagaatcttccaaattaaaatttaaagctaataagcattgccatacatgcgcatacatatttaacaatctttatcggaacttatcatattttctaattacttgcaaatttcaaataagcaggtaatcaaataattaacaaataatttaacatttaacacttactgaaccatgagtcgaacgagtcttcgcagccaatgtacatatcaaaccagt

SEQ ID NO: 220511 - DNA, 3407 bp, Cannabis indica
aaactcaaaacacagcccaacagcctcttaatctcctttttgcattgccaaaacaacctcttaatctcctttttgttctgtatttccacaatattatcagttgcttccaaaagcttttgccagctttgtcgatggttcagtatctgggcacacttcgcccttattccctaacctattttgcccctacagacgcccaatcccactctccacttcctcaatttcacttcctaagactgcctcatctccctttagacggtttctcgatggttgtcttcgatctggtacgtaacccctaaataattaatgtatataatttgtttagggtttgtttgtcttgcggctgttctacattattatcagttttttaatttttgatttggcattgtgctgtttcagtttaattatagatatagatgggttttatcattggcgtttatattattaggattatgttgtttaatagactagaaatctcaattatgtcactgttatgtttatttgggtactgctatttctctacatatgctctcgtaagtataactttgatcatatagacactccgaattcctttttttttttttttttttattgttaacttcaaaagtttcttgagtttacatcattttactgtttctaaatagaccaacattcttaattttcttaaggatacgtagcttttgctattactttttgcgtgttttgcacaagtatggcatagacatgagattttttatattagttgggaattttaatgaaatgattcagggttgaatgctggtgctatatgttgtttaagaagctaaacttgttgctaatgctacaatgaattctctttcatctgttatccatatgcaattactaggctccttttttatggctgcttccattgcctatgtgaattagtgaaatatcaagtaatttggaggaaaaaataataattatgttgactactcatgacaagagcatctatcatcgatgaggaaacatacagagaattctggtgatttcccctatatgtaggttccaaatgcagttgtttatgacttgatgactcatgcgtagcaggtaatgcaaggggggtctctggtgcggagttacctaagtgtcaatcagagatcatttttatggttacaggaacaagtgaaggaattcctcgtgtgagctgttgattaatcctctgaagacatgcgagatatgaatgctcaacctttaggcctacgtactttttctgcactttctccaagttcaaactgattccttatatatcttacaaaataaaactttgatgattcagacaatgtcatgatttttaattttacaggtttgctcaaaagctgcagaaccgggtaataaaaataggagactgcatcctcattcgatgtgccacaacatctggaaaaggcaacatccttatagatgcgggaaagtaagtatctacattggttctgttattgttatgggtcatgacagtgcttcatcaattagtttctgtaatgcagattcttctaccacagtggtcttcaatggtttccagcctattggttagttattatcttgtttagtgattatttattatttcattttaatttaatagtgtaattttctgctggtcacactggctatctgagggtcacaatatctgtatatgtagtgattacattgataaatgtcaaattcgcattctgcaaatagcaaaactaccattaactgtccatttcatttttagagatttttgatctctttgtgttgttagaccatccgattgcccagcgcttctcctgcagactcattatcatgtttttgcattttctctagtatgttctttctcgtaactagttttatttttgccagactaagaacaattgatgcggttataattactcattctcatgctgatgcaatcggaggtctctggattgcgtactttctgttcttgagataactaataaattagtgatgatatgataaaaaattcctttcagtactataattttcctgtcatatttttcatttaaatcttctgtttcagttcatccctttgcctgtgtggcatggtcgtggttaccgctcccttggtttttcgttttggtaatatttgttacattaggtaatgcttcattgtgccacacaaatctataatataattgcaatccttgcacctggatttctttgaaattgattaggattcccaagctaatgtgattcacttgtgcagcgatgttagtgaaatacctgaagatacctgaagaaacttattcactcctcaaggattgtgaaatcctgattatggtgcctccctattcattcatctaactattctgtttaactcaaacttttatgaacaatttaactcttcaaaaaagaagtatattaatccaaaaatagttcaaaagcataataataacaataaatttggggccttgctgatgtttcaaatcatttcctcaggatgccttaagaccggaccggtcatcatcaacacatattggacttccaaaggtaaaatccaattcatcccaacagtaataaaactgtcttagtgacaatcttaatttcaatttgatcttttccaggctttggaggaagtacggaaaattcaactgaaaagaactctgttcactggtatggtttaacttcttttcttgatttactggttttatttataagttacaagaaaatttagtttcttttgatctacaccttcaatttactttcacaagtcaatcaattttaactcagttataaaattatgtcaggtcagggaaacaataaggttttgcacttgtaaaggtatgatgcatcgaatggaccatgagaaggtaaataactatcttatgaagttgatggagacagaaggccttgatgtacaactgaactgtgatgggcttcgggtacctataattctctagacttaaaatcaatctcataattaaggaaaatgtcttttgaaccacatttgtcaactgatctttcctgggttatattggtcttcaaaataagtgagaatgagaagaaaataaatattattagcactttttggtacatcatccaatttcatcacttgactattgatttttcctggtaaataagatatgtgctttcaatgaaatataaccaagaatctttctttcattacttttccatttatatatatatttatacacaaaatcagaacaacagtggaggatacaaagcaatcactgtttaactgaaccttgacagaaattcttctcaagataagtttttatttttatgttttttttcctataaaaaagtgagatccaaaaaatatataattttttgtaaaagacaagtttcctttggccttgtccccatcaatgattttgagttgaaactgaatgtgaaatcatcaaaggactgttcttttgaaatttgagagattcctt

SEQ ID NO: 220512 - DNA, 2978 bp, Cannabis indica
accatataaaccacatgagacatagaatattctcaaaagctgatttttcataaattgaagacaaatgcataagataatccccatcttgcagtcggtcagcattagtgaaatcaattgaaaaaccagaaaatttccaaacttccttagcatggcagcaagaaaataaagcatgccctatggattcccatgccgattgacaaagagaacatgttgcagatgttaaaattttcctatgatacaaagatttggcaactggaatggaagattgaattactttccatccaaagatcttgaccttagagggcaagtttaatttccaaaaagacttccaccaagtctcctgggtgtgtgaacatgaagataaatcctcttcacccaaagaactagcaagagtataacctgaactaaccgaatagtcacccgaatcttcatagtgccaaatccatctatcattgacaggaagaaaagacaaaggaattttaagaatgttgtccacatcaggtgatgagaaatctgattttaaacactcaatattccattctctggtagccgtgatgtagtctgcaacaaggtttgtgtgtgcacctgtgtaacagtaaggcttaaaacctttatgacctggaatccatgagtccacagcacaccttgttacccgtaccaactttcagcctcaaacctttcacaagcaattctctaccccacacaataccttgccatgttaaagaacttaaaccaccacctcttgctgtcatgaaatcattctgagaaaaataacgtcctttcaacacacggctgagtaaactagtaggatcttggaaaatacgccaagcttgcttggccaataatgcttgattaaagtgcacaaaagatcgaaaccccatacctccatccccctttgatttgcaaagaaatcgccatttcttccaatgaattttcttgttatctgaagaagaaccccaccaaaactttgccatcatagcttcaatttcgttgcacaatttgaccggtagacgaaagcaactcatagcgtatgttgggatcgactgcacaacagctttcagtaacacttctttgccccctattgagaaaatcttatcattccatgcgtgcattagtttccatattttctctttaatgttgctgaacaattgtgatttgtctctctcactataagctggtaaacccaaataagcttcatggcattcacagataggcatacccaatatttgctgaaaggagttttgaaccgcaattggtgtgttcggagagaaggacattacagacttgtccgcattcaattgttgacccgaggctcggtggtaaatatcaagagctcgtttaatagcaccacatgatcgatcatttgcttgacaaaacaacaagctgtcatcggaaaaaacaaatgcgagatagatggtgaatgacgagatacagccagcccttttaatcggcctatttgttcttcatattgaagtaatctagacaatccttctgaacaaatgaggaatagatatggtgagagtggatctccttgtcgtagaccacgcgggggagtaactgagcccataacttcaccattaatattaaatgaaaacacattggtatgcaacaagacataatcaatgtaatccatctaatgttaaaccccatcttgcccatgaccgcagcaataaagaccattcaaccctatcaaaagccttgctcatatcaaacttagagcagcaaacccttttgaacctcgcttcctatgtttcagactgtgaatcaactcaaaggccacaagaattatccgtaatcagtctgttagaaagaaaagcactttgagtttctgatataactgagtgaaggacttccttaagccgagtagccaacatctttgagataattttatatatacattgcaaagactaattggacgaaatctttcatttcctttggtttcttaatttttggaattaaggtaaccaaagttttattgaaaggtgctgggcttcctccataattcaagacattgagaacaacttgtgtcacaagatcaccaacaatatgccaataagtttgataaaacattgctgacataccgtctaatccaggacttttatccgatcccattgatttcaaagcagcataaacatctgtccgagtaaattcttgcagcaaaaaatcattctgttgagaagaaatggttgttggaatggtggacaacacatgggatagtgcccaatggtcttcatcagctgctgtgaatattttggagaaataatctgcaactacatgagctatatcatctttagaagtcacaacagtaccatcatcatctcgcagctctttgattttattattggagtgtctggccgaagctttggaatgaaaaaacttggtgttacggtcacccgattttaaccaatcaacccgagaccgttgttgccaatattgttcctcattggccaataattcttcaagaattttttcagccgattgaacattctgcatatgattatctgaggcagtagcagtggagttcaatcgagacacttcacgttgagctttggagattttcttcttcatttttccaaacttcttaacatgccagtcttgaagctgtgttgcacagcgattaatacattcattaaaaccatcagccggttctaaatgattagaaaaaaaccagcagtttgagattattgttgagcattcttcatcattcagccagattttctcgaaacgaaagcgagattttcgcctaacaacaggaaccaaaggctgtgaaaatgagatttcagcagaaagaactcgatgatctgatccataatagtccaaatgagtgagagtcggatgcaacaaagaatctttccacacattgttgataaaacaccaatctattctttcctttaaaccagtcccttttctcctattcttggcccaagtaaaatcatctccaatagccggtaaagcatgcaaaaaacattgatccaaaa

SEQ ID NO: 220513 - DNA, 2546 bp, Cannabis indica
ttttaaaaaaaaaaatcactaaagtgacaacaccatcacatcaaaattttttcattattaaatacaatcaaaattttcataaatttcttacaaaaaaaatttttaaaaaaacacatcttgaagcccaaaaaaatgacaaaataaaagttttaaaaaaaggtaaaatattgccatataaaagttttaaaattatacagaacaaatataatttatactgtgtaatttttcttaataatattgagtcgtagactaaaagttgtaatctttgaaccacgtaaaaaattttgactcgttctttgtctataacatattcctttagttccaccctattataggggaattatcctaaatactgtttttttaactttttttttcttcaaatttacggtttgagtttctaaagtgattgcagcgctagttgcaataagagtttctatacgattttttgttgcaatttaaattgcagcacgcacaatagaaagaatagaaggaaaggggcatggtcgtttctatgtccccgcaggtaggcaatccagaggcaggagatcactgctagttacaatagaagtttctatgtagaattccgtaaaaatgcgaaaaaaaaaattgttttaaaatgtaaaaatgaaaaaacccctttattatattttattaatttctaaaaatctcagtaaacctaattaaataaagatatttgtgattttacaaaagttatagtttgatggaaacttttatttattgtttttattgacaattagctgggggcattcgaacatgtgatcttttgtggagagaggtgtaaaattattatattatgtctataatcacaagtattctatttatttattattatttcatttatattaatgacccttatcacaattatttctaagtctctcaaataaagttgttcgaatttcatgtaccaagaatgtgcaattatcattacaagaacaagatcgaacaattgtcaatatataatttttcaggtagtttcggattaaagactaaaattaataatcattgacatagtcattttattggagtttatgcagaaagcatcctttattatagtaatagaatatgtctattatttaattatttattttagaagggagttttatattcgaagactatccatgattgacttcacacaaaggttgttactctgttgaacttgcatataatccttatatttcattccaacaaatgttggtgattggctttcaaccagctttgatgctgggctcacaactgcctcaagtgctggtccatttgctatgcctactgaaattcttgtctcattgttattcactatggctcgatgaacaacactcttgtacttcccattactcaatatctatatcacaaaacaaacacattcaaaattaaaaaacataccaaaataaaaagttctcaaaactatagctaatagagtgaatagttatttggatgtgtacatatttaatcaaaatacatattttgtactatatatttgtacaaaaatacttaaaaggaacgagtggtgtctggtactatctaaatgtatcatatcactattagtgtaattatatatcgggtcccacataatttataataactgatatgaaatatagcttaccatttacaaggcatcacctataaatagtgttaagtatcactgatacttattaacaatactcaattatcttaaaatttgaaattgtgcctattccgtatcatatgaactcaaatttaatttaataaaatttattcactataagtgcattaagttatatatataattaagtaatcaatgattaaatttatgtgactaaacaattttgttttgatgaaacttatgtctagactctagaataacaaatatgtatgattttaagtataataagatatataaatgatgagtattcataaaacatataaaaataaggagtactttgtatttggacaaaacacaagatatcaaataaatatttagggaatgtaatttatacctcaaggtggtctcctgtgttgaccaagaaggaattgggaatgggattgacattgagccaattacccttatgttgaatttgaagtccaccaattccattttgaataagaagggtcaagaggccatggtctgaatgaggtggcattcccattgtaagctcaggctgaggacatggtgggtataggtttgctacaaatacttgtaaacctgaatccaaattcagtgttttgtatatgtaattctcttctaactctaaactctttgatatcccttcaagtatcatcacagccacttcccttgatttcttcaggtactctaatgcaatctcacttcatgaccaacacacaaataattatgttataaaatcaaattctttatgtgaaatttgggacttcaaattataaaagggaaatttgataaaatatacttaaaaatttagactattcttttaatataccacctttaaataaatacgctaaatattctccaaacaccataaaaccccaaaattacccttacaatttcaaaaactctcttctcccactctctctgt

SEQ ID NO: 220514 - DNA, 1808 bp, Cannabis indica
tagattagttatccagacttctaacatgcccaaacactggattggacaaattagtctgtctaatccaatccagtcatgcgtaccaaacaggcccatatattataatattttattttatataaaaattttatatattgggattattaattttctaacaataaatatcggccatatcatattttaattaattaaagagtaatatgataagttaacctaataatatcatattatttgtttgaacagtggatcatatcttaataaatatgcacttatcattaacacaaaaattatatagccattagcaataataatagattagattggtttggagtttggagtttggataaaaagtctacgtgtacaaagagacttaatttggtcatggaagactgtgccacacgattgtactcacttctccacactcgatcttatccaatgcaatgcctatgcattgcctactttgcttatcaatttagttctcttgcttttgggttatctgaaacagttcaaaaaactccaaaacgatgtcgtgtcagccatgccttgttccatcacaacaactatataaacccttcactatcatgattcatatctcattaaccaaaccatcacggattaataaagttacacactttacttgcttgcctgcatgccttgtgtttgtataaatttcaaaacgaaactactatatcaaaatcaaacttctccattgcctcttctttctttctttctttccttcccatatatatacattaaaaagctcaaaactttatgaaggaaatcatggcttcatcacttgtaccctcctcttgcttaaatgggtctcttctagttccatcaattaggcctaagattctcactcaaaggtttgttttttgatctgggtcttgtgctttcatcttcaacttcttcttctctactaaccctttattcattttttgatcttgttcaggacaccaactcaacacttttgtcattcaagaatcaaacccaacaaagctccaaacttctggtaaaagatttaagcttgtttttactctgatatgttatgagtctttagtttttggtttctaacttgttgtttggatggtgggaaaaagtcctaaggctacaactttgagaaggaatttagagacaaccagagtgccaatttctgtcccagttagagttgctcatgagcttttacaagctggccaccgctacttggatgttaggtgtgaaatttttgttgctttattccaaatgaggagagaattatctgtaaacgttttctgtttgattgatagaaaaatgggattttcgattgttttaggactcctgaagaattcagtgctggacatgcccctggtgctgttaacatcccttacatgtacagagttggttcaggtaaatcataagaatcacatcacattttctttttcttgtattggatagtgattattggttaaagtctgttatgagctattgtaatgtcaattggatttgagttagaattagagtcaaatatttccaaatatacatttataacactattggataactctataatacattctcctaaatatagagtttttagctcaattttgttaataatttacactaacgttcaaatattttgttgcacatgatcataaaaaaaaattacactaaaaagccctacttgatgccaataaaaataataagaatgtattgaacattcttttagggggtgtactgcaaatttatccaatactattattgattgattttgagttaacacatttcagatagcaaaattgtgtaataatatatttttaaaaactaaaaaa

SEQ ID NO: 220515 - DNA, 3636 bp, Cannabis indica
gtttggtgatctagttatcttgttcttgcctgagtaagtgatttggccattttttttcccggtgaaacaacttaaaaggctcaggttataaatggcttttcaaattttaatttatttgtggaactcattttttgattttatttgtagccttgcctgaaccaaactttgttttttcagtagcttctaattctcaactttgagaaaattatagctccaatccttgtttgtgatagatgtaatattatgaggttgctagagtttgttaatgcaactgtaaggagattatagcaatgcttgttaaaccattttaagagttaagttggtgtgataaacccctctccatatgcattgataatataaaggcccaattaaagttatacgtcccacagtttgtttgtagtgcatattttctgtattagtctcttttagtggatgattgaaaacttagatcattattttattactgaatcagataagactagagttttattgctattaaagactttctccaagtggaaggggtgactgcacatgttgtgttagcctgcattttagtatgggctggggttcaatccccagtgggactaacttcttcttcttcttctttttttagtccaaacaaaaaataacatcgattttctttagtccagttacaatcacattttttaatgagtcaaaattacgtatgacaaatcttgtaccaatttgtgtttaatattaaacttggcacattattttaaatcctgtaaaataggagtgagctaacactttcaactttattaacttcttaaacgatgtatgaaagcttgagtggttggacacaaattggtacatttttttaaactcttttagatatttgaatttttttttcttttaaacatgtttatttcatattttgaaattttagattttggattttcggtagaagtacttggaggtcctcaaagtgttggttatcacagtttgaaatgatattagccatttgaggtggggttttactgtaaatgggacagtgccttaaatctgaggctaggccaagcctctctctgatcttatggaattgtgggttttagtatgtctcgtgtaaatttctatatgagcattttcatctaaaaaaacaatatgaaaattcaattcggtttatttagtggctaaactaaacttaaacaagcaatattttctagtccttctatatcaactaaaattgcttattgtatatctgtagtttctctgatttcatgttgatcttcaagttcaatattgactgttgtttgttctgaagacttgagaaaatattagagtggggttcaaacttgtttccatttcaaaaatgcaatgcattgggtgtcacgtacgatagttttaaccccactaattaatataggtgcatgcctctgtattccttggcaagtttcaaggatctgtttatgtgttttcctgcaattcctaaacttgaacaatgctgtattattcaaagaatacattctttttggagagcaagtttcaaagataaatcacatttaattggtgcagtaatgtgtttttactttgttctgatgctcacttataattagcaaaaactgcttcacaatttttttttgttgagtattttattcatctattattagctcataatgaatatctttctacccttttgccagtccgaggttttcgccgttgcatttgctctactagctgctggtgctgtaattttgacactgaatgtactactcctggtaattgcttctcactcactcatattcattggcttgatagataatttctacttcattattcaaatgcataaaaaccaattcattggcttgtgtattggtttcatttttagtttgagaaatcttgagaaatgaatgtttgtttttcttgttgggaaactatggtaaccggctgaaaaactagatcaagaactttaaaccttgcattgattcatgatcgaacgactgacttttttaaacatctgattattccagggcgggcatataattttcttccagagtctgagccttttgggttactgcttgttccctttggacgttggggcggtaatctgcatgttgaaggacaatgtgatagtgaaagtaatagtggtatgtgtgacattggcatggagttcttgggcggcataccctttcatgagctcggcagtcaacccgaggagaaaagcccttgcgttatacccagtttttctcatgtatgtatctgttggttttcttatcattgccattgattaatgatgctttgaaaatcagtactgaaatggggtttgaaacaaaaattgttgttacatagaaagtttttttttttttttctttttgtgctgagttaatcttctctttcgtgtcaactgtatttttttgacttcttgatatgtttgggaactcaatttgcctaatagaagaatatactagttttgtatcaaatcttattaaaatctcctctttttgtatgtttcttttgttctttcagcatcatattttgactaattaggattcttctcaaagtatgattaatgtattattatgttcttgaactattcacaatactgtaaagtagtcttaagttttgtcatacgtgtcaaatagaatgataacgtaaatgtttatggcattataatataagtgtccaaaataaaattatgtttttgatttagtgaaaaatcaattaatcattaaaaaaacttaagtaaaattaaatgaaaaagtctaattatttttttttcccaaattagttataaatgtagtattgatatgtcagaacatactacatcatcattatgtttgtcacatataacaaaattctattttattaacatattgaaaaattcaagagacataataacatataggttataattcaaaacaaaaatcttaaatagcataataatatttttataaacttagtaaggaaacatgagccataataactactaatttaattttaatcctttagtgagaaaattgtcttaaaagaataaaaaaaaaagtgttgctcattctattttcttttttcttttttgctatgccttcatatattctataggttgctttgtgtaagattttggtgcacatatgaaatattgaaaagaaatttttttgatggatttccaatagaaaagttactcaaagttaagtaatgccatcaaaacatagctatttaaagtcacaaagtgtaactaataaacatcttttaattagtaataatcatattattaattcagtagcacttttaaagaattaaggataaataaaccacctgcctatacattgtgaatatatttttatgttatataacaaaatttatccatagatataaactaaggtccttcatataattaattgcaatatgtgatttcaaactccaactttttttaattttctcgttcggtcatggtttaaaaattctcatgtgtgggatcaaaccaaactgcttaattttttatatgtgcttaatatattttttttttattgtaatattgatatttataaataatcttaggtataatattgatagtaaatgctattttaagattatatattttcattgttatctacatattataaaagtaaaaaatagagtagaagatttacgaattacaaactacacggtttcgaatcaaac

SEQ ID NO: 220516 - DNA, 3595 bp, Cannabis indica
tctatatttcacagcacttttaattttgttcaatatacaataaacagagttagaattaaggaaaacaagcaagtgtttcggttgttccataagtggtagatcgcggctgctaacatcagcgttctcactctgtccatgatgttcggccttgtattgcccaaccaaacagtctagctttcaaagttcttagaccaaccatcaaaccacagccaaataaagatcaaagacagcacctgttgtgaaaagatgcagttgaaaaaaatgtggcggtggctctctgtttcaatgtcgcaaaccacacaattttttttcggataggaatgttcaatcaacacaacatatccctcgttagaagcttagattgagcagcttgccataattggaaagcatgttttggcacattaactctgcaccagattgcacaagtagccgagaactcttcctggtgcagcatgcttcggtacaacctgctaacattaaatttttctccacctgcagcaataattttagctttgttgtaagttgtacgaagcctacaaagcttactccaataccaactcgtatccatgcttaacttataagaccaaacatcactccctttgagataaatcgagttaatccacttaaccaatagcaaatctttcttattcatcaagtcccataaaaatctagctaaggaagctttgttccactttgttccatccttaaacccaggacctccataggcttttaggaggcacatcctctcccaacttatcaagtgggctctagttcgattatctttcaacccccaaaggaaacccccgacataatttctcaatctctttaatcacactttgaggaagaagaaagactctcatccaataattccttaatccaatcaatgtagattggattaattgaacttgaccgtcataggatgaatgcttattagccaaagagtggagcttaagtttcattttcttccgaatcaaaccgcaatcatcaagtcttcacatagttggtcttagagggatcccaagatacttaagagggaactcaccgatagaaagatttatcttttgagcgagaggaatcggttgagaaattccaccaaagtacactggagatttagcaaaaattgatggagagacccgaggtcttgctaaactcatcaagcatgaccctaatagcatttagagagccctctaaatcatctgcgaaacaaagatttgtgagtttcatttttctgcataagggatggtacctaaaatccttttctctgactgctttttggattcttggggacaaataatccatgacaagaataaagagaaggagagagatgggatcccccttgtcttagccccctgctaaccgttaaaagtcccctgaattctaccatttagtagtaaagaataagatgtgtttctcacacaattcatgatccacttgataaacttagtagggaagcaataggccactagaagcttttcaagaaaatcccaattaaccgtatcataagctttacttatatcaattttgatagtgcatctgggggaacaattttccttcaatagttcttcaatatgtctcgaagaataagaatattgtaagcaatggatcggaccttacaaaagctccctggttctgactcactaaagaaggaagaacattagcaaaccgggaacaaatcagcttagaaacacatttgtataaagttgtgcaaaggcaatgggtcggtagtagtcaatagctttagaaggaatatcaatctttgggataagagagacagagagtcgtactatgaagctcttccaagaactgattagtgtcaaaaaagtgagtaatctcaatgtggatatcctttcccatctcaggccaaactgacttaacaaaccctaaatcaaatcaatcagggccacgagatttagcattagggatactaaacatcgcagctctgacttctttgagagtgaaaggttttaagagatgaacctgctgatcgaggttgagtttagggcccatggatatgcaatcatattgtatctccatggaggtgggctcagctttccccattatgcctttaaaatggccaagaaaatgttgcacgacatcaggaaagtgatcatttaaatcatcttgctcggtaagaaacaaaactatcctgttttcttccttccgcttcttcaacatggcatgaaaataagctgtgttacaatctcctttttgaatccaattaaccgagcttctttggttgagaaagtttaagtacatttttttctaaatgtgaaaatggttagtagccgcacgctccaactcaaggaaatgattgttgttcgggttagattgacatgggaactgagcctctttgtaattatccttggccttctcataagcatctccaatgttcccaatcgagtgcctattgaaggattttaacttgtgcttgagtctcgtggtttatagatatatccccttcaaccaaaaacatcttagaggcttgccccaactatccaacacaattttcttgtaatcctaatgatcaatccagaagttgtagaattgaaacggttttcttccaatactttctgtagcaatcgaatgaacaacacaaagacaatgatcagaacaagtctcccaagagaaatgagcagatgtattcgaaaaatcatcaacccactcgtcattgtgaaacacatggtcgatacgagaaaagatcctattatcctacttataggtccaagtgaaagtcgaacccgtgcgcttcataggcccaacagaagactgagcaatccagttattagagtccacaagctcagagttactaatatcatttccccgtgcctgtcatcatgatgaaataccgcattgaaatcaccaagaatgatccaagctttagaaacatttatcattgatagggggtccaaagatcactcctaccttctatggtgtttgctccatagataaaagtagcaaagtaatcttttttctgccctatcattttgatatgacaatgaacatgttgcttggaatcctcaatgacttcaacattaaaaaaattcttcctccaaagcaggagaatccgaccttccactttaatactagaataaaaatcccaacacgagaagttacttgccatcatttttttaaatttttcccctttaatcttggtctcaacaagggctccactgccaactttattaactctccaaacttctgcaactttatcttgcttctcctttttattcaaacccctaacgttccaacaactaatattgcaaaaatccattaacaacacaagctgaagtcattctctccctctgcttcttcattctgtccccttattaatatcgcaaaggaattcctaagcactttctcacccttgtcactgcctttccttgtcgaaccagagcccttagacacacggttcttaggggcaatccagcccccattaattgttttgacaacaacaattttttcttcgccattggcttttttttttcttagttactgtagtagcaacaatagcagtctcaggggaagcagccttaacctcttcactactgacaattgccatctcaacattaatgtgctcgactacagcttgaacacc

SEQ ID NO: 220517 - DNA, 3783 bp, Cannabis indica
aaatgtgtctttggagtgggctctggaaagtttctcggctatatggtaaatcaatgaggaatcgaggctaaccctgcaaagataaaagttttggtggagatgcaatctccaaccaaaccaaaagaagtccaaagccttacacgtaaagttggtgcattaaattgcttcatatcacattcctctgacaaatgtaatgagtttattcagattttataggaaataaaaagtttcaatggactgaaaagtgtgaagaagcttttcaggccctcaaaacatacttggggaaacccccaatactttccaagccgatgcctggagaaattttatctatctacctcgcagtgttctaatacgcaattagttcagtaataatccacaaagaccaaggtagacaatatccagtgtactgtgtgagcaagcgtctcctagatgccgagacccgttatccacaaatggaacgactagcacttgcattggtgatcgcttcaagaaagttgcgaccttactttcaagcccacaatattgaggttttaacaaacttcccctttcaaaaagttttggccaaaccggaagcctcaggaagataacttaagtggtcagcagaactgagccaatttgacatcaaatacaaaccaagatcggcaatcaagggataggcccttgcagattttatactggactttccaaatgaccaagtagccataatcacagaagagcgaattgatcccgacataccaaagggtgaggggtggactttgtatgttgattgggcatctaacagtgaaagatcagggggtggcataatcctcataagtcctaacaagtttaaggtacacgctgcccttatattcaagtttcctgcatctaacaacgaagtcgaatatgaggctctaatcggaggattgaaactcgctcttaagatgaaagttgagtatatggaagcatttagtgactcacaaatcgtggtttgtcaggtcaacagagagtacctggctagaggaggtcgcttggccaaatatctttcttatatttgtgagctattataaaagttttaaaagatagttgtttgtacaatagctcgtgcttacaattctcatgcagatgctctggcccgattggccttgacaagagaagctgaattactcgatgtaattcctgtagatgcattaactcacccaacaatcaatcgagatgaaatgattgaagttgatacagtcaaaagggtcacctagatgaccccgataatagactacttaaaaataggaatgcttcctgaagataaaactgaagccaaaaagcagcgatatcgagccactcgatatgtcatttatgacgacaaactctatcgcagaagctttagttagccgttactcaagtctatcaatggaatagagtgcgattatatactctgagagtgcatggtggaatctacgacaaccatggtggtggtaattcccttgctttaaagataatgaggtaggggtattactagccaacattgcgagcagatgcatctagcttcgttaaaagatgcgacaagtgtcaaagaatagctacttatgtaaacagaccaccaagccaatttaattctatcacaagtccctggccctttccggtctagggcatagactaaattggagaattgctaaaaggaaaaggacgggtaaaatacgtcgtagtcgctattgattacttcacgaaatgggctgaagccaagcctctagcgactatcacagccaccaaattacgcgagtttgtctacagcgctatcatttgtaggtttggtatcccttataagttaatttctgacaatggtaaacaatttgactgtaaggagatgcgccaactatgcgatgaattggggatttaaaaagcattttcaacagtcgcatatccacagagtaatggacaaatgagggcagttaataagatcattaagcataccatccaagggtcgaagaacatgagggcacatggccagaagaacatccctaagttatgtggttgtataatacaactcctcgatccacgactggagaaactcccttctcactctcttacgggtgcaaagccatggtgccagtcaaagttggagcaggatctctaaggagagatgtttttaaacttagtagtaatacagaaaatcagttgttagagctcgatcttctggaggaaaagtgcgatcaggctcatttgaaaaatacggcctatcaatagcgaacagctcgttatttcaacttaaaggtgaaagaacgaagtctgcaagtacgtgatttggttctatgaaaggtcatgccaaacacacgaaacttagcacatggagtttttggtgaaaacttggagggaccataccaaattgcttggagggaccataccaaattgctgaaaaaaattggtagtatgacctcgattatcagacctcgatggaaccgcgatcaaaagagcttggaatggcaagagtttaaagtattattatcaataatactcgcattgtaattatacttagtcaatttattttgataaatgtcctaagtatagggggtatagcctacctttgtactattgattattataatgagattttcgaagtttttactttttctcctcttatgcaagttttacattctaagttattacccaagctgtaatagtaaaaaaaattgcgaatagaaacaataaggtaaaatattaaaagagcagtttagattatgcaagtacacctgtaccgcttaacataaatatgcaaaagtaatatcctcgaaaggataaatattgttcaaaaatgatgaagtcaaaacttgtttgaagtacaaagcgcgagtacccatgtaccgctaacaaaaggaataaaaattcgacaatcatgaaagggacttagataaattaaggagctggagtgacagagtcatttgcgaccttacttgcagcaccatcaatgacttcctcagtatccatgttctctgcctcctcagggaaaaggtttccaccgcatcctttagtttgagtaggcaacatagcacgaaaagcctcagctattgtagctgcttccaccccaagaactgagaaatcgaagttaggctatttggataaagtcgtgtagatgcagtcagagacagcctgatggaactgtctcttcccatactccttgcgatcacgattcaattcctcaactcacgactctgagagcttggctttatccttcgcctacttagccttctcctctgcctgctctttggcctttccaaggtcctcgatgtctttctccctcgaagttgcttccaacttcagtttctgcacattgtcctgaagaagggtgttctgcttcctcaaaagatcgacttccttgttacctgcaacgaaagccttcgagaaaatggcaatgaactgtgaggccagttctgcaaagcgtgaaatcaattcctcgaaaggagtcccatcaaccttggacataaactcctcaccaactaacttatcttagagagttatgatattgcgagctctaacagcggggtcaatcatgaccatcttccccttgtcttcggtaggtctgtcctgcttcttagaggaatcagctgtgggagtcacgacgacctcactcttcctcttctgcgggataataggagatgttgtcgcagttccaaccttaggctttctgttgaggattggagcttgctttaggaatgtcattactgcaaaaaggcaataagataagtataattttttatgttataaaataacatgtacatactcgatatactaactgatgttggtcttgatgtttgt

SEQ ID NO: 220518 - DNA, 2809 bp, Cannabis indica
caaattggatccgatcaaaggtccaggggctgccctcgatcactcgtccgatatcaacttcgtgataaaactgaaaaagatatagattaggctctaattctttgacatataaaccccgtcccggacgccataaggaggccatcttatgttgcatagcaaggaaatcaatttcccgatcagtgataaaacgccccactagacaccacctatcatcgatctcagagagatcatcatcattcaccccatactgtagaccccccgtttcttcttcttccagagtaatcgaagcatactggtcctccatgttagaacgtgcatgattgaacgtcgccatagtcgcaaaatacgaaacccaacaaagcttaacaaaagacacacaaacacttaacagagagaaaaacaaaccatgtcaatagacaagacaatacgcatatccaactttacccttttttattaggcaatatagaggtatactttgttaatacgggacttagaaaatgtataactaattacaatttagaggttattcttatttataactggcccaaatcgggacttgatttttttataacaaattagaggttattcttgaatgtaacttgcttaaaaagaaagaaaaaaaaagattaataagaaaacacaaataaaagttaattatttattcctattatatattttgcttattctattatatgcaccataaatgctaatcataaatcatatctatgtttgattttttttgtttccttattggaaaatataactgaaaatatagaaatgagttagttactataacaattcttccacgtgtaatttcctatttttttactatttttttttgtatgaagtgtaatggggaagggaattactacttaaaagattaaaatggagaatagtttgctgcaattcacaaccttggatcccaggcctctcgaattttaaacccctggtgttttttgggaatgatcctaatatcaaagttgctgaatttatcactgatatgagacaataggatgttcaaaaactccaagttcactttgtcaacctgatgtggatagagttctttcaataccattgagtttgtttccttgtgatgatattctttcatggcattacactacatcaaggttttatacggttaagagtggttataaattggcctcggaagaactagattcctctctaccaagcagctctcatacatatgaaacatggtggcagtccttctgggctttaaaattaccatctaaaatttaaatttttgcttggcgtgctttccatgaagctttacctgttgctgcaactttgcatcatcgacacatttcaacatctccccaatgtcctctatgtcagctgagtttggagaccattaaccatgcacttttctggtgtactcgtgctaaacaagtctggaaaaattgggatccagtgatcaattggcaattgtctaagtcctgctctttctctaattttttaatctatgtctcctctcaacttcagactgataaggttgaactcttcattacggaaaggaatgcaaaaacacatgctaaaactccaaagactacttcgcgtatcctgcaatttgctagcaactacttatcagattacaaacaacctcagaccagcaattttaaaacccaccaacgtgtctctgaatgttcaaaccctcaggatactgctgctgcaagctgttcacactctcagacttttgctgcagcaaataattcaaatgcataggtttcagcaactttgcagcatcgtttagtgcctccaagtaaacctaaatggctagctccaccatcgggtagactcaaattgaatacagatgctgctgtcaatgttttttctagtgtgtttggccttggtgctctccttcgtaactccagtagtgatgttattgctgcaatgactaaaccaatgaaagggtgtgttaaaccataagaaatggaagcaatagttgtggcttggagtctcaaattgctggtgtctctcagacttattgttgatttaattgagattgattcattaatggttgttaatggattaaagtctcaaactaaaggtctatcagcattttatactgtacttaacgatgttacttttctgttatccaatttcccacgagcacagatctctcatgtttatagatctgctaataacgaagcccacttgttggctaagtttgctcttacgatggattttagattgtacagtatttggttagagaaattttcgcctctttttttgactgttatgtaatttagttttccgattaatataataatcttttctcaaaaaaataaaaataaaaaatacataataatatggagaattttcaaaaatatataaaaattaaaaaatacagaatattataaaaatatatacaaacaaacaaattttatttttttgtaaaaaaactcttataaatttgtaacaaatttttataattttataaatatataaaataatatttacaaaaattaaatataatatatttataataatttttttctgctgtaaaaaccaatttgttttcctcataaattgtacaaaatataattttcccacccatatctattttcaccaaaatttttttatctttatcccatggctttgagattattttttttttttttttgaagagaatggctttgagatgttaattattaattacacaataatcaattgtaataaattgtcattaataataggaaaagagaaatgctaagaagcatttttagtttcaaaggcctattgtattgagaaatttaaaagggaatcagtggtgtctagcacattcttatgt

SEQ ID NO: 220519 - DNA, 2053 bp, Cannabis indica
gtcagaatagaggtggacttgctgaatttattgtagttagcgagaatttttgatagtggcttggccctaaattcatattaattagctattgatattttttcaagctctgatatgtaagttcttcttctccttctccttctcaatcttcttttcaaattacatcaataaaaatttagatttgaaagttttataaaaatattattgtggtgtgattctttattgttaaattcacccatttacccacaaattttatgaaatttatcttcttttgtaagttaagctttttgtttatatgtatacaagggcatatcttccatgtgtttgacaaaatgtctaacatagttaatattctttattagtctaaagaaagaggacatcttccattgtgctatttttttatctttaagttaagcttcttcctaatattgttattatttttattttgtagaactgagtttaataaattagtaattttatcttcaaatcttaaataaatgtgttgatttattgttgtttataagttgttttgtagttgctatcatcttttttatttatattgttgctattgttgttgttgctgctgcatttcaattaatttatttttgttggtgaagctcaaatctaaatgttaggtataaaactcaaatttagagttttattattcaacaatctcctttagatttggttttaattttttttttcaaatgatatcaactttgaaatctaatgcttattgatgtccatttctctcacaaggtggcaaagttatttttctaaagactttaaataactatgttgatttaacattgtgtataagttgtttgatagttgtttcatcttttaatttattttgttgttgttgtttcaccaaattatctattgaagaagctttcaggacaaaaaatgagataatgatgacaagattgcaaattaaaagattaatgtattagttttggttatctttgtttgggttcaaagacttgctttgttattgttttttttttttttttttttattttttttttttctgatgtatttagatagaaaaaaattttaaccttaaatggtttatgtctatcactttttcagtttctaattagttattttttagttttaatttagttattatacggttcttattctaggtttacttaaattttttttttaaaaaaaaacgtttagatcattgagttaggtcttacatatatcagttgtatttgaattttaatttagagttattttagttgcatatttattaagttttacaatttttttatttttagttgttatattgttatttttatattgttcagtacatgatatacttacagttttgtataactattaattgtattttaattagttcattgctttattaattttgccatcataatattttcaggtgggtgataagacctctgatgttgttgataagttgaagcttccaaagaaaaatattgtcaagattaataatttgtttttttttatttgtcttgtttgaaatgttctctggttgtagttcatttatttgaaaatatatatatattttatagtagaaagttgttttatagtttgtttaatgttattttaattgctacatgacttgatttctagcgatgatgaacttcaaaattgatcagaatgaagttagttgcatacatcaaaagtgtacaagaaaatgttctaaagtctttcaagaaggaaggaattactgtgcatgaatttacgattgagaagtgtgtttctttttgattgtatgtgctgaacaacaacaatttttaaaaaattttgcttttatatatttttttacaacttttctctagttaacttcatatatatcttgtacgagatattgaatattataatttctttttaattatttatatgttttagtacattaagaaccaactattattatattttcaatttatacatcaagtatttgtattattatatttttttttatataaaaaagacaatagttgttaggagttttttttaaaactattaacaattatttaataacgataaaaaaaaaaccataaaaataatt

SEQ ID NO: 220520 - DNA, 1669 bp, Cannabis indica
tagtaatatagtaaataaagaagttataattagtgttaataaaaaagtaaatttattgtaggttatatttagtacaatattatataaaatttgatataaattttaggatatgtcaaatttggtacactttttagaatatcattaaaatagtttttttttctcaagtgtattaaattatagcaatggttttaaaatgccatttacatctttcttgcattaaatactttcatcaattattttaacaataaaataagaaaatcaattatccgtaaaaataatatatggctgcaaatccaattactttttatatctctttatccttttggagaaaatataaaagaaattctcccttgaataccttttaagtcgtcgaagaaaaagaggtcgtaatcgggggatcggtgcaaccgagtcgaatgtcatatcatatcgatcaatccatccatccatcgctctccggcccatgggcccccacaaccgcccaaaaagaacaactcaaccacatgagagcctcaattcaaaaagaaagaaaaatgacacatccctaccattagtaccattccatttccatatacccacaccacaattttattattataattcttctttgttttgcataaatctgaatctcactcacgcacgaatataatttaaaggtacaatctctcattttgactgattgattagatgtgtctcattccaggtcccaggccctcctcatgatgctgactcacgtaatttatgttgttatcataaatttctgtcccttatctaaccccctcccctacctatatacaacatcaacaaaactggctactactataaagttttggtgttatgttatttctagatagactattatactatactcctatcatgtaacgctttgtaatttgacccagattccagattatataagagcattgttatttagataattggctatgtatcaatattccttaaaatttattacattaaactatataggatctgatacttaaatagaatagtactaggcagtcctgatacaccttttaacatttctcattatataatagtagcagtgtacacaaactacagattagtgtcttaattcatctcaatatgggaggccacctcataattactacaaaactaaatggcgttttgtggccaaatttaattatataataaatttaacaagagtattatactttatatattttattccttaagatatctaaggaattttttttattttacactaaatttttatattcaaaaatgttaaaaaatattcatggtgactagcaatctaatatgattattagtgcaattcaatatcggatcccacatatttcactttaataaacattatagagaaccgctaactaattataaaacgtcatatttcattataataatagacactttgatatcacgtagcaatacattttacattacaacttatattaattcttttatatttttgctttatatcatttaaatattatttagggaaacgtacaaaaatactggaatttggatgacaaaatactgtcacacgaaaagtttttaaaaatactatgtttttataaaacaccagtagaacacaaaacagaacaactcaaaacaacagtaaaacaactaaaaaatacccttataacaccattaaaaatttaacacagta

SEQ ID NO: 220521 - DNA, 1544 bp, Cannabis indica
ggcttggggtggtcgaagaactcttggggtgggtggccggcgctgcacacaagagagatagaaatcaggagagtgtgtgtgaagagatattagagttttgttctatttagaagaagaaaaaaaaagaaaaggaaaaaaaaaagagaaaaagaaaagaaaatatttatttattttttatattttttaaattatttttcataataatttaacaattaatattacgtggactacttaaaatttgccacgtgtacatttgtgtacacgtgaggagttctctgtggtatttaaataaaatttttagatggaagtgtaatgagcaaaacaggcctgggtaggttttaccgtcaaaatttcgatttttgtagttaagtgttaaaaaataaaaagttcaaatagttttaccgttaatattcctaaactataaagcaactaaaaacaactaaaaaaacaattttattatttttattaaaaatgtatttttgtacataaaaaaattcaaaacataaacataaaaaattttccataaaaaattaatttttttttaccatttttatgctttcattactctttaataatataataacaaatttcaacaattcattgacttagtttatacccatctttaacttgtgaatgtgaaaccttttcctaacccccaaacatatatatgtcacatcttctctccctcaccaacccatctaccttcaatagcctattccattttcgttgtcttagaagtgaagaattccattaaaaaaataaattattctatatttatgtttcatgtattaatagattttgtgaaaaccatataagtttatcaaggacattctttaaaaaagaaaaagtaattatctccattaataatggtctataataagtttttcacacttccttctttcttaactaccgtcttcatctacgaagaacatctttaattgagtattaaaaaaataatatattaattcattttaacacacttaaaagaaaaaaaaatatcactttaataatattttaaaacgtgtactaaatttaatacacagtaaaagttctactaaatttaacacaaaatataatattgtgcaaaattcggtacgatatataatattatattaaatttaattcacaggaaatattattatttttatttattattataacattaattatatatttcatgagttttacgaaactttacattttttatttattttattattgttatttaaacaataaaaaagtaataaatttttgtatattttcaataaaatagtaaataactattaatatcaaatattttttttacttactttacatatccattaaaacataattgtaatttgttaataataggttaatatagcacaaactcattgattttgttgtgataaatttaatataaattttggatcttgcattagagataatcttaatttatacatattggctcgtttgaaacgctgtattaggtcgtattatattatattatattgaattgtatttttattgcaatatttttattataaaactaatatgtggtatta

SEQ ID NO: 220522 - DNA, 1930 bp, Cannabis indica
cagtatttttgtaaagattggactaaaagtcagcatttttgtaaatttctctttttttttagcaacataatccaatgctagcaaaagtgtaatttttgtccaatttcgttagtatagactcagattttaaatttttgggtttgaataaaaacatgtagtccaagttattttcaaatctttttttaataaatttaaaatagagtttgtattgatgaaactaacaaaaattctatttttattaacattgagtacttgtgagttgtgacgctaaaaaaattagatttagaacaattataaactcaaaacttttagtactcatgtcacaaattatcccaaaaataattatatactaaaatatatataccttttctttaattaactattttagaggggctaatatatgcattaattattctacaaaattatatacagaaaacaaattaggggggcattataactatcccaataattcctctaactttgtcattgtcgactataataataataatagtaataataataataataataataataataataataataataataatagtaactatacattaattaatccttataactttaataaaattcatataatatctgtaattttaaaatcgttcatattttaactcaaatttaaaagacaaatcatttgattaatgtggctaaattatttgaccaaaacatggaaatcatatcaattgaactacgcaaggcttgaataaacactaaacaatcgattttaagaaaaacttggcaagatcgattttctttgatccaatttaaagctttcttaacacccaaagcttccacaaattttggtgtagccgacctttgataaagcatggttaatgattgtaaggctttattgaaaaaaaaaaagtgaacatgtttcaatcttttttgttaggcgatcagctaataaggtggctcataatttttgctagagcttccttattctatcctgattggagtttcaatttggggactgtctcaattgatttgctaccttcgttggtagttgagtttaatggttaataaaattatgattctccactaaaaaaaatatggctaaattataacttccatatatataattaagtaattaattaaagaactattaactatataactaataaagtttgattatattgattaattggatttttagttttttttagaaatagaagtgataatttgatttcaaagtatcaaatattattacttgtcatatggtatgagtattaattaaaatacgagtctttttatttttagtattcaaattttagttttttttttttttttttttgatttttacagaattttacatagaaatttctattgtaattaatggagcaacctaaatcgcaaccaaaatccgtatagcaacccacatagaaaccaccatagaaactattttggaaacccaaaccgtacattttttttaaaaaaatagtatatgaagtaatttcccttaaaaatattgggtaatatttatttataaattacatacatattatatattaccctaataataataaggaaaattactttatatatatttttaaatttgcaatttgagttgctttagtagttgctccggtaatttctatatgaattgttatatgaattttaattacaatttagattactctgttaattgctatgtgagttgctatgtgaattttcataaaaatataataaaataaaaaaattattttaaagtgtaaaagtaaaaaaaaaaaatcctaataataagtattatataataataataataataagggatattggcggctaaaccacctgaacattaaggtttgtaatacttaaccacaaaaactgaaattttggcggctaaactacctaaaccctggttccgttttgctctgcacacctccgtccaaaaatcacagttaag

SEQ ID NO: 220523 - DNA, 2137 bp, Cannabis indica
agatcaggctctgttaccattccaggtaagggggatggtatagacatctggatgcaaccctggattccctggctcagcttccctgagttcagaatgctgatggaggaggtcagaatcagattgccgaatctggaatcggtggctgatctatcaaggagtggcaatgagtgggatcctcacttacttgagcaagcctttggaagggaaatggggtggaaaatcagtaatatcaaaaggctacctcaggattgtgaagactctgttatttggaaaaaggcgaatgatggaatattcacgactaaaagagcctaccaggaatgttgccaatttcaagattgcagagaccaagatgtgtggaaagcgatttggaactcgaaaatccaccctacagtcgctgttatgctctagagagtattagcgggatgtattccagttaaggagaaccttgcattcatgagggataagggctgtgttctgtgtgaagaaggcaaagagtccctaaagcatgtgttttgggattgtccttttgcaagggctctttggttttcaggtatgtttccagttgtgaatgcgagagcgataggttcagatttgaaggaacttatccttttctttctgcaagggataccaaggaacgataagtggcgatttctgacatttgttggttgtatgttcgaagaggtttggaggaccagaaacgcagtattattccaaagtaacagagtttatatattgcagtcgagagtttctatttctaagagacttgaagagttctactctatacaggaagaacaactagtatttggcacaaacacaaaaagagtagagacttacctctcctggaagatctctcaatcgacggcatttgtgtgcttcacggatgcgtcttggaaacaggggtcgacaggcttggcggtcggtctggtagatcaagcttccagtcggagctggtggtctgcgaaatggtctcgggctgagtcagcgatggaagcggagtccatggcgattttgtgggctcttcagatggcattggaggctgggattcaatcaattgcagtggcttcggatgcactgttggtggtcaaggcgattgttgaagaaagctttcctccttgttggaaagccagaggagttttctttaaaatttggaagttggttaagttatttaattcttgtagctttgtctttattaaaagggtagataatgaatatgctgatgtagtggcaaaaactgctagaattgatgggcactgtaaagactttattaacagggagggatccccttttgtgatacccaactatctcttttaatacactgaacttttctctcaaaaaaaagttgacctgtgtgttcgaaattatatgtcaaaatatttatttttaattttttctctagcggtatttgttaaagttataatatcatctctataaatttttgaaaattctgaatagtttatagatcgaaaacaaagttcctaatatctcaatttactacgcgtatttaaaaaacttcaaacctattttttggcatgtaaactattcaacttttttaaaatttataaaaatgatgttataactataacaaacatcatcatggaaaaaaataaaaaaatatatatagttacatatgtttttagatatgaaaattgactaataaattgtaatagaatgttcactgtacgtaacaatatataaaattgatgatacttctacaatgcacctcaatgcacccctatacgccgtttcggcatttcataaaaaaatttcgtctaatttttttatgatcgtctacattgtagttatttaagatatcttgcaagattttaagagtttaaaaaactttaacacactgaaaacagagttcaaatagtctattacttgcaactcttttattttatacacgtgtaaaatagactatttaaactctatttttgactttaaattattctaaattgggtaaatatcattttgaatcctgtgttttgcaaaagttacagattggactttgtgttttgttaaatgataaaatggaccctgtattttctaaaatagtaaaaataggaccctgagtttaatttttgacaactttttttttaatacaaccaacttaaaagacaatacttaatacgaacagata

SEQ ID NO: 220524 - DNA, 6149 bp, Cannabis indica
agtcttttttttatatatatatttatgtacgttatagctatttaagatatcctacaaaattttgagaaattcgaaataatttacaatatagaaaacaatgttcaaacagtctattttacacgcgtataaaataaaatagtcacgcgtgcaacacactgcttgaacgcaatttttggcgtgttaaacttttccgaatttcttaaaattttgcaggatgtcttaaataactataatttacatgaccatgagaaaaaaattgtctaaaaaattatttcgaatactaaaatagagagagatgtatcagtgtatcttttttaagggggtgcattataaaattttccaaaaatatattatgtagttatttaggatattttataaatttttaaaaaattaaaataattttcgatataaaaagtataatttcattttacacgtgtaaaaaaaaaaactagcatggaatgaactatttaaattttattttggtgtatttaaatatttttaattttttttttaaaaaaaaaaatcttaaataagtacgttgtataacattaataaaaaaaaataaataaaactatctatgaaaaataatgagatgcgagcaccatcaaattttccaataatcttagttgaaaattcaataaaatgatgattgtaaaactctttgttttttttttttttaattttgagacaactggctgtaaaactttggaaaggaaattaatggttttattaaaatgaaataaataatttattaaaaatgaaagctatttagaatttttgtctcttaatatgtactaaatcatatttctataaattttgacatgtattaaatcatactcttaaatttttcgaggtcgttaaatttttttcttaaattattaagattatttaattcaaggactgctaactaattctgtttaatttactaatgcaatgattatttatgtactaattgtgctatcgaatttcgatatttactaaatcgcatccctaaactttgacttatattataatatttacggaattggactcaaacttagacgaccttggactcgaactcagactaggacaaaatctgagttggagtcgagtttatgacaaaaataatataattttacacaaactattaatataagtaaatattaaatatattatatattaaataatattaatacaatactatactacacaatataacaagtgaaatgttaaaaggcactcacggtgcctaacattctatgaagtgtaatatcgctattagttcaatttaatatcgtgtcccacttatgttaatttatgctaatttggaattttattttctgaacttttatatgtaccaaatcacgccccatttaacttttcaagtcgttaaaaattcccctcaaactattgagattgttgaatttaaggatttttgtccaattttactgaaaaaagtctaacgtgaatgaaaatttcaaatttcgggagcacaattcggtacacgttaaagttctgaggcatgattttagagacactattcagtatatggaaaatcgtcacattaacaaaatttaataaaattagataaaagttcttaaattcaataatttaagggaaatttttaatgacttgaaaagtccataggcataattttatacgttaaaaatttcagaaggcaaaaatcttaattaactttttaataaagagtatagagaaccgttaacctataccaatggagcattactattaggcatcaacaatcgttcaacaaaattaaataaaattagataaaagttcttattcaatagttcaacaaaatttttaacgactttaaaagttcaaagacataatttaatacatttaaaagttccatcatgcaaaaattttaattaactttttaataaagattatagagaaccgttaaccaattataaagtcgtcatatcatagaggtactagacactaggcaccttgataccctataccaatggagcattgctattaggtatttcaacgatgcctagcatttctagacatgtcgtcttgcaattggttagcgatactctttaaaaattattatattaaactatatgagactcgatacttaatttgaccaataccaatattaacatataggacaatgatagataccaatagtaatttttaacatttctcgtactaatattaatacaacacagcgtactaaacgagacaagtagtattaagtagtgcttgcccgacagttgggggagggggttggaagtagcaaaaatggggagtgtgggaaaaaagtgaaaagggaaagaaggggtgggaagcgataaaaacatcctctcttaactttcctcttttttctcttctctctttgtctttgtgcgtctatgtagggatttccttttccagagtagcagcaccaccacccactcatcttctactttcatttccacctaatggattgatttgattcattacattcatctccaaattctctatccttacacacccacctcacctcaattcatctctttcaggtaaaaaaatcctttctttattattatcatcatcaatatgatctactcttctcatttctaatctcttcctcttttacccagatcggacctctttctttaccaacaaaatgtcctcattttcctagaaaattctcgttttttccgagattattctcaccaatttctgttcaaaagtactactttgctcgttttctaggttttttttttttgggttagggttttaattactattactattaatatatgtatttttttttttaatttaatatcaggcgatctcttagtcaggtatctttattcgttgaaattcgagcttgttagttgttattatcagttgtaatttatttttttgtcgtttttagttttttcagtaagttgtttgtttgttttatgtttttgattcagcttcccatgaagtgttgttttttaatattattatttatttcttaatggtaaattttagtcgtgaagtgaaagtctttaactaaaaataaaaatgcattatttaagcccatcatcagagaaatgaagtttatgtttgtgtgtgtgtttgttagatttgttgttatatgagattctttgtttggttgggaagatttgttgctttactttcagtgtttgtgattttcaacatgtttttactacttgacattgtagtagttaaactatctgcttttatataatatttaaaaagattgagtaattggcgacgaaactcctttattatttttttcgtggcgaaattattttttctttgtaaatttgaggcgtcagtcatatatcattgttatataccaataactttaaccactgtgtatacatgaaagtaaaatttcgaaggcaatacattaataatatctagctgacacctcaaatttacaaagaaaaataaacataaggaggtttcgctgcaaataacccgaaaaggttcactttctcatgtatgttatgttatgtatgaccattttgtatgttaaaatgttaattaagatgtatgatgaacaacaaaaattacatgtgtgaagtattgcaagaatatatgaaagcatgattccctgcatttagtgctgttaattcctctcacttatggtcttgagatgtttcatcatgatctgtttgtctggatttgtacttttatatggatcagaagttttgtattgagtaaatgttgttttggtacatattctatagtccttttttggggttttaagttcagtgccttccttgttaatggttgatattttgggttaggcatcatggtttcaataagaggtcttttcttttgttagagcacccatttgattagcctggtttaatgtcgtattgggttgcattgtatatttattggattcattcaaatcttacattgttcttttcttatcactttgtattgcctgcagattttctgtcatggataatactcattctgttgctacgctgatagactctacgacctcgaagatacaacagcttcagaaagcatttgctgaacttgaaagtcacagggcagtgacccttaatttaaaatggaaagaactcgaagaacattttcacgggcttgaaaagtctttaaagaggcgttttcatgagttggaagaccaagaaaaggagtttgagaacagaacaataaaagcccgtgatttgctggtgaagaaggaagcagatatagtggccaaggaacaagcttcattggacaagcttcaagagaagagggatgctgctgtatttgccattgctagtgctcgagataagcacaggaaagtatcgtctgatgatccggctgttgtgactactgagggtcaaaatgcacagccaagcactgaagagacaccacaagagaatacaatttctgatggtgacttagaggaaatgaaaagtcctgaaaatgagcatgagggtgtgaagtcttatcctcagttagtgacactatgtaaagagatggactcagaagggcttcacaaatttatatcagacaacagaaaaaatcttgctgccataagggaagagattccatttgcattaagagctgcaatcaatcctgcatctttggtgttagagtctttggaagacttttaccgcgctgaatctaccaatactgatggaaagaaggattcaaatctcttgggtcttcgccgtacatgtatcatgttgatggaatgtctgagcactttgttaacaagcctagatttggcttctgcttctgaggttatcacagaagaggttaaggagcaagcaaaagaaattgctgaagaatggaagccaaagttggatgctcttgatctggatgacagcaatgggaactcattagaagctcacgcatttctgcaacttctggccacttttggtattgcctctgattttgacgaggaagaattgtccaggctagtaccaatggtttcccgtcgtcgccaaacagctgatctgtgtcgttcccttggactatccgagaaaatgccaggtttgttatatgaattagagcatgtcatagatcatttttatttatgttgatattagaactagtaagagcctaagcttgtcaaaattagaggtttttctttccctttgattttttttttgtcatacctcatatgtttatcctgattgattgtaaaatagtgtgaatatgtggatcttgcacttgcccctttgtgaaatccagctaataaagtgaagctcactttgcattagctgacaattctgacgaggctctcattgcttggtgggatagatagatgacaattctagcttttgatggactttcaaattccaattcacttttttgttttcattggattctactacaggtgtaattgaagtacttgttaacagtggaagacaaattgatgctgtcaacttggcttttgcatttgaactgacacagcaattttctcctgtggctttactgaaatcttacttgaaggaggcaagaaaagctgtttcgccatccaaaccagggaatacatctcctactgttcaggtgagtagacattttttaatggttcaacaccaaaataggagtgtgttggcgaaaccagcgagtgtacctaactgttgtgttgttgttttgtttaagaatgaggtgaatgagcgagagttgactgctcttaagactgtggtgaagtgcattgaagagcataagcttgaggagcagtacccggtggatccattgcagaaaaaggttgtccagctggagaaggccaaggcagacaagaaaagggtgactgaagcagcaaagcctcaaccaaagagacctcgggctaatggggttgcgctgggcctcgtgttactaatattcctgctgaaaagacgttttatcctagagttgctgaaaacaggtatccgcagtacatgtatgaacgaccctatgtctaccccggaccaaatgacaaccattgtccttccctgatcggttctgcaacatacagtctctcccccgcacatggcaactactttgcgaatggctatcagtaccaggcggtccagaccgcttatcttcattagttagtaaaaatggcctaaaagatgactgatcctcatgttaacggttagtcttaaccctgcagatctttgatgctccaatgtatgaatgaatttagtacttaaaaaaaaaatgaccccaaaaaaacgaaaaaaaaa

SEQ ID NO: 220525 - DNA, 2720 bp, Cannabis indica
tagcattggatatttcaaaggggctctatctgaagtgagattgggccgaagctcgaagagtgtcacgatattgtaaaatgggaggggaggggaagttgtcacaacgaagaagatacctgggacatcgattataagtatgatccatgaggccacagaaatatctaaagtttgggagactctcgtacttaaaacttatcaatttttgttcatggatagaccgaaaacggattgtcattcccctacacaaaggcttagtgatatcgagtaagacacgaatcctgagaaaaggaccagagttctcgagcagcgaaagagggtatatttcaataagatcacccaatgcatccgctatgaattgagccagctggggacttctacggccaaaaggaatatggtgggcttgaatccagaagggggtataccggatactatctggggtgggggtgggggagacgtcagggtgagtgaaaacgataaggaacttatcaaaatgccaaggttgttcctccaagacacggcgacgatccccatcacattgaaaagttgccaaaaagaggccagaatggtattcagtgatttgagcagggaaacggagagtccatgcctcagacatagctttctcaatccaggctggcttcgcagttttaggagataggagtttaaaaataaggcaaaatgagttggggtcggaggaagaagagagcgaaatgtggtcgaaatcgtggatgaggctttcttcttcagagagagcagtgagaatgtcagggttggtggaagatgaagccattgagtgagcggtgtgggttagagtgaaaaggatggacaaaagaggagaggatgccgatcgaaccaaacacatggagattaaatagacagaggatagagaagaagggtgtagaaaatacctggagagagaaggtcacctcgagggatgagggaagttctgaaacaactctttgattcctggaaaggctctctgcagaggaggaggagatatgattacccaggagttaatgttggaggcgatagaaaagacggtttgggatgatttgggggactttaggaagaaatagaaaagagtgagagtctgagcaaacattgaatgcccaaaagagggtgccgtcaaaattaaatgtagctgggaaagagagagtgcattaaatattagctgagcacgaaagatccgggggctatttgcaatgattaaggttgacatggagtaattaatgcaaaagaaacagaaacagaagaagggtagagaaattagggggaagagaagagaagaggagcagaacgctcacctactgtactagagaaaacctggatgaagcttcaagaagaagattttttacaaacaagatctgtaactaaggataaaacatgaaagtacaaaatacaataatttaaagaaattttgaaacataattgttccaaacgcactcttcattagttcctaatgcagctttgactgggttatgagctaagatattagtgcttctactagtgaaacagactaccactacaacaattgcagctattaccggcgaaaacaatacctgcgggccaaatccgcccctcttgtttgtggggtcaatcggctctttgaggtagagttgacaaggtcttcttcaaagtgattggtgagcttatccatatcccaaagaccatcctccctaataaagtaagaaactgtagccttaagaggaattgagtcatttttaaaagagataaagttgaagcctggaacccaattagggatagcgatctggaaagatttaccatctcccaccttccaaactaaaccttttataagaaggtctcttccccaaaggatacttctccaaataaacgaaggataatgccctattgtagcttggagaaagtcattatgtttaaaatatttacttttaagagggaaaccacaagggaatcagggttagtgtatattaactaagcttgtttagccaacatagcttggttgtgatgaacaatatctcaaaaacctagactcccaaaaaatttggatttacaaacacaagaccatttttctagtgaattttattctgactattacccgaggattcccaccaaaaatttgtcataagttttccaaaatgtttacagatagagagaggaatcctgtagcaagacatagcatacgaagaaatggcttcactaactcccttgagcaaattttctttatcagcttttaaaaaacgtttttggttccaaacagataacttactactagctttttggaggagtagaagaaaaaaagatttctaagaacgagaaaaaaattgagggacacctaagtatttgtctataaaaggtttatcatccatgtgtagtattgatgaaaggaagtcttatcctgagatgaagtattaggagaaaagagaacaaaagacttaaacaagttggcagattgacccgtagctttattatagatgctaaaaatatctttgattgcctcataattttgagggttaacatgagtgaagagcaagctatcatcaacaaacaaaagatgagagatagaaggggcagaatgacatatggaaataccctagaacagatgagcttgagtttaggaacggataatagcaaaaatgccttcttcaacaaggagaaatagtgtaacgccctaatctatagggacgccacgtgtgtgattttataaactagtttaatactagtagaaaaattaattattaaaa

SEQ ID NO: 220526 - DNA, 1327 bp, Cannabis indica
aaaaaaaaaaagttaattaaatagtttttaaaattatttatttattttaaattaattttaattgaaattataacttggaccaataaaaaattaacacatgaatcttgagttttgggatgttgtcgcaattttttgagattgaggacttatttatatcaaaatgaactttttaaagacttatgttgcaagttgatatcaacacgcgttattttaggaagaaattaacaaatttattaaaaagaggatcaacaaacttataagaatctcaagcttagagactattgtcgctattttttgagattaaaaaccaaatgaactttataaagacttttgctacaatttttcctacaaaggagagagaagcttttgtataccatcgaagtcagtaaatgaataaccaaattgcaaccaaaccaaactaccaaactacaattcatactcatttatgagattctttatttttgggctttcatgtttctactttttcaggcaatgaaaacaactccttcatagactttatttatttttggatcttttatttttaatagaaacaatagtaacagtaataatacagctaggtgattctctcagagtacttactggaaagattctgagttgggatactacaaaaattttgagataaaaaagataaaattgagacatttttcgatgtaccctcagaaaaaaagaaaatcattaggacacactttttatacacaaataatgtgtaattaatttcagttatataatacactcaaaaaaaaaaaaaatcagttatataattaaaagtgttatagttatacttaaacaaatataaatgattaatatttattacattatgtctagcattattttacactcgtaacttcgtaactgatatgacgatacacattataattatttaagatattttataatttttttaaaaaaatattagaataatttaacatactaaaaacaagcttgaaccctatactgtggattgtaaatgattatgaacttctaataaatttgtagttctcttaaataactacttattatataaaaaaaaattgagattaaaccatctctaatgtatttaaaagttgtgttaaattcaatataaaaaaatgaatttatattatatttaacctgttatttacaattatacttcaatacacaaaatgtaagataaataaaaaaaaatattaattatcattaatggtcattttttttagagaaataataatggtcatttaataacttatttatgtggcatttggtaatacttttttagtcagttttctgtttttaaaatttaaaaagtgtaaatatttttcaaaaacat

SEQ ID NO: 220527 - DNA, 1107 bp, Cannabis indica
gagccttacttctctgctctgaattcccttcttcttccaaacaacacccttctctttgttacagtttgctattgtatgtccaagtaagtcacaagctccacactttgaaggaagccactcgtattacactaacgcaaatcctgagttcattcttgcaatcctttcaatacccaagttcccccaaactctttttataaacccctcaaagaccctgaaaggtagatttgctccaagaacaatacagacaacagagtttttccagaatgaagcttcacattcaacctcatataagtccaatttagcaacagattggtcccctattttcatatgttcactgaattcaagacgtgtggatggagtacaaacctgattggtcttgaacctgctcctgacgtccttagcttgagcactgaaatcctccctctcgacatcatcaggccaacgcacttgtttgggggaagcaggtaacacagtcggccccttcatctcaatcgaaccctcttcgattggctctccttccaaattctcgcacgtgtctaggaacacctcagtcgcaggttggtcatcgccttcaggttggattgaagggaggtcaccggtctccgactcaactaccgccgtactcttaatcggcttcaaaatcgtccgcttcttcttcgccatgagaggaagccgagggtttcacacgccatatacaataataatttaatacctataataactaaacgaaaggcagctgtgttgactagtttagtataaaataaaacatgagagagatatgaatggtaaattgaaatttaaattataatattttgaaaatagaacaacactttctattatatagtcatatttaatataaaatataaaaataccaaaatgtttaagttacattaatgaacttgtagcatgtttagtttgttgtaatgggaatcgtaatagaatcaaattatccattacaatgtttgctttattttaaaaatgatgtaatgggattacattgtaatcataattatattatacaaggaaatccccatacattagaaaagctatataatgaggattacattataaaagaccaaataaagtaaagctaaaatgattctaata

SEQ ID NO: 220528 - DNA, 1907 bp, Cannabis indica
caattagagttcgactgctactcaattcgtataaatcattttttttttcttttttgcaagtgtataatgaacaaatcctcacacaaatgtgttgcattcttcttcatcacagtaagccaacaagataatgttgcgactcgactggacacaacacaaattattttaaattcatttatatgtaaacgaatttggtggcaaaaatgctctttgatcaattgtaattgttggatagcccagcttagtaaattgtagcaatttgtactcatatagtcatataactacgtatagttatttgagtacttgtgtcgtagccgagagtggaactggtagcaattcgtaatttgacttgtaaattatttggtgatcaatgataattcttcattaataataataataataataataataataataataataataatagcaatttgcaggttgcaggttgagccacttgaggtgttggtggcacttgaggagaaggtgcacgctgagctatcggtatgttaactaatagttccttgatgaactccttcaacctgcagaggaaaaaagtcagaattttttttcccagattgcgaaatagaaagtgtggtggtgatcgccaacccttatacatacttgtcagtgcagggtctccatatacgtacttttatacagttgagcattcgatttttgaatcagaatcgatttcaaatggttgtcgattgatccttttgagcttcagaatggtcgattgagtcgaacgattgggttgatacgattgagttgtatatgtttgatttagaattgatttattgtcgattggtccttttcagcatcggaatggtcgattcagtgtttagtgtttagcaaacaattcttgattctgaataggggaacgattgggtcgatacgattgagcactcaaacccttctaatcttcttcataccagtcagacatattaatatttttcttgcaggcagagatgactctaaagcaaatggaaaacctctaaagttactatataagtattttttgcttttaacatctgacttttatttaatatggcaatggtttggcacaaaacatgagagtattcagttctatggatatatgtatatccttagttcattttggttctaatcaagcttatgtgacatattgggggtttgtttagttagagagtattcaattctatggctatatatatatatatattaatatatatccttaattcagtttgttgtcaatcaagctttaaccaattaataaattctcaattcgttattctggaataattacttcttctcattgttaaatatgaaatttctttccttaactaaacatatatttgtttcacatgcaattcggaaaacatcgaaagccataaggggaggtataccagtttgttttccacatttaagttaggaagaacaaaaaaactaccaaatgcttgttttgttttttatcttgttgagattatgatgccttaactactgttaccttttgcagtttgggactatgagtagcaggaatatttacttacgaaacaagttagggtcattagatattaatgattcatcttctttggttgtagcttaacacttactcatcgatggatttgattttctataattaatattgattcggtcactattgacctttgaatttcatgtggattctacagtcgtggaaaactcaattgtcttgaaatggagaggccatcaaaagatctttattgtttgatcaaactactgcagtagccagcttgattcttgctttcactaatatttgaaatgaaggtctatagacaaaatttacagtgatatttatgtgttatttattttaattaattatatgcatacacttgcttattcatgtatggtatgatttgtggatgagcagtatgtatatcagtacattt

SEQ ID NO: 220529 - DNA, 1576 bp, Cannabis indica
ataaggtgtttatgatcaccttatcgaatgacgggggatatgttagaatatgtgagaggactcgtctatcgggctatgagatagctgtaacactggatgcagctacatggttaatcgaagtcttagaagtattgcaaaaaagggaggaggagcagagggtgaattttaagagatcatttcgaaacaactcgatcgtttgctttttggagagcttccaaaatagcaggggggtgttcatcaggatatctgtcctttaaaataataggattaccttggtgatcatccctgaggaaagacacgctagggggtggagtgagcttgcaagatgcctcaatggagtattaaaaagaaacattttgcagaagaataagaatcaaagattgctagtggaggaggagtttgttagaagaggtgggacaaagccctcttatgcgagtatagtgaaacagcctgcaaaacctttgagaagccaacctggtcacagatacaatggtccggttgatggcagaagatttaggccatacgggggtccaatacataacaagctgggatactgggagttcttaccaaaggggaacgagagtttcaggccaaggaacatgttcccgagagctaggatggaataaaaacactttcatgaatatttacaagcagaataatgtgacaaggactggaaccgggctttgataatgttcagagataatagtaaggtggggtggagtgtcattttctacaatttttctcgggaaattgatagaaaattggtggttagccaaatgtatgatgatcgaactataatttggtgtaagaatgaagaagagatggagagcttgttgaagcttcacaagactgtaataccgggtactggtggcacgattgtttctctcatcagatggtctatggaagagcaaaacagggacataaaaatagagtgtagaagctcctggatgggcgttgaagggttgccgttgaatttatggaacattaagtttatggggaagattggagaaatgtgtggaggtttgcttgatgtggagaaggacacagcagaaaaaaattttctgcatcacttgagactcaagttgggaggggatgaagacggttttgtacccaagtcaattcgactacactaccaaggatctgaattgttcttaaagattttcaaactcaacgactggggatatagatttaatggattcttcaacaccatttggcatcaggattctgaattttataaaaatgaagaagcaatccagaagagaagatcagatggagttgaaatagaagatggcttggtgcgaaatatcgacgataacaggaccagaaaagaacagaggaacaacgatgacccatcaacgtttttccatgaccggtcggtggaaccagtgccggcggttgcagacgatactgatgacacggtgaacgaggaatatccgaggaagatattatgttgcagcagcgtacgtgcaacgatcgagagcgatcctttttccacaattgatgtttcggcggcgattgagagttccaaggaaggattacaagaatctaggaggtcggttactattcacaacatatt

SEQ ID NO: 220530 - DNA, 4444 bp, Cannabis indica
atcccgggatgatttccttttccgaaactagactttcaagttctccaatggaattcattcgggtgcagctgggtttcgaaggttgtttttcagttagtgctaaaggaaaaagtggtggcttggcacttctttgggctgactctgttaaagtgcaagttaaattgtttacggtgtctcatatcgatgctttggtcgaaaaccacttgggttttacttggcgttttactgatttttatggaagtccagacccaagaggtcgcaaggaaagttggaaattgttgaagcgcctacaactgatgtttaaaggagcttgggtttgtggtggtgactttaacgaaatcacacagaattccgagaagaaagggggaaataagaaacctgcctatttaatgtataacttccaaaaaacattatctgagtgttctttgcgggaaatatcagttgagtgtggaatgttcacttggtgcaatggaagagctgataatcttatatttgagaagttggatagaatcctttgtaactcggactggactgataacttcaaagtgaattcggttagacttcttgattggagagattccaaccataggcctctgtttttcacggcacatctacataattcatttcaagaaaaccgaagtacaagaggctctcggttccactatgaacaagcttgggcagataatgaagagtgtcaagagatcattcaaaaggtgtggagcaacaaaacctcggccaatcctttatctaatcttaaagtactcttacaaggttgtggggagaagcttcatgggtggaagaaaagacaaaaatatgaccttaacaagagaattaaagagctacatgataagattggatggctatccaaatcatcttgtcaaaccgattggcttaccatcaagaagttggagaatgatctcaactgtgtggaagaaaaacgagagatgtattagaagcaaaggagtcgtgctttatggcttaaacacggggatcaaaacactaaattttttcactataaagcttcacaaagaagaaggaaaaacacaattgagggcctctatgatgaccggctaaattggcagactagcttcaggaaaatttcagagattgccatcagttattttaaaaatcttttctcaaaatcaaattatggagttgagattagagatatccttgttggttgtgttcccaatcgaattagtactgaggaaaatagactacttcttgaacccttttatgaaaaagatgttaaagacgccatgttccaaatacatcctttgaaagcccctggtaaggatggtcttccgggaccgttctttcagaaaaattgggacttagtgggaaaggaagtcacgacagcctgcttagatattcttaacaatcaagcagattgtagaagcctcaatgaaactttgatttgcctcattccaaagaccaaacaaccaacaaaaatttctgaattccggcccattagtttacgcaatgtggtgtacaaagtggtgtcgaaatgtcttgccaaccgaatgaagcctagtcttaataatgcaatctcaagtaatcaaagtgcttttattggtggccgaatcattcatgacaatgctattcttggtttcgaaagtcttcattgcatgaggaaagggagatttggcaatggaaaaaaaatggccctcaagcttgacatgtcaaaagtgtacgatagggtggaatgggacttcttggaaaccatgatgtcttgcctcggctatgatgagacttggatctctaaggtaatgaactgtgtacattctgtgtccttttcaatattaataaatggttctattcaaggtcatttcattccggaaagggggttacgacaaggtgaccctctttctccttttctttttttattatgttctgaaggcttaacttgtttattgcatgaatcagagagggctggaaaaattcatggattgcagtttggcaacttggagcataatctatctcaccttctttttgcggacgatagccttgtattcttgaatgccaacttagaagaatgtaaggccctaaaagaggtgttagattgctatgcctctctctcagattagaatattaatctagataaatctgatctgtgtgtggggaggaagataaatgaagcttcggctgaatccttggctgccttccttggagttcatcttgtgaaaactcatacaaagtatttaggcatgcctacttttgtcggaaaaataaaaaggaggtttttggcaagattcgcgatcgggtggaagctaagctccaaggttggaaaatggggcttttctctcaagcgggaaagaagatcttaatcaaagcagtggttcaagctttaccttgttatgtcatgagttgtttccggatttctaaaggcataatacatgaaattgaaagcatgattgctcggttttggtgggcggagaattcagagaagcataagatccattggggaagttgggagaaaatgtgtaagcttaaagagaatgggggcatgggatttagagccttagacgactttaaccaagcactcttggcaaaacaaggatggaaaataatgaccgatcccgattgtcttttggctagagtcatgaaagctctttacttcccaaacaacaacttttttgaagccaagttgggacatttcagctctaatatttggaggggtattctttggggccgtgattttttactgaaagggctataggtgggttattggaaatggacagacagttcgcataaatgaagacccttggatacctcgaggagctcattttaacattcgcaccaaggtccaagttccaacagatgtaacagttcagacacttaaaaatgcaaatgggggctggaaagttgaagaaataaactgctggttccacaaagaagacattccttgggtgttagggattactcctttgagagagagaaatgatacaatcggttggactctaactactaatggtcaatacactgtggctagtggttacaagctgcggtttagggatccaaacattgcagaatgttctgataattcaacgtctagaacatggtggaaggtggtttgggggtctcggctcactcctaaaatgaagatcttcatatggcgtgtgttccaccactggattccagtcaaaacagaattagtcaagcgaggtatgtccatgaatataacttgtaaccggtgtaagagccaagtagaagatgttttccatgctttatggaattaccccaagttacacaaagtttggaagcacttcgggttccttcacctcttcccttcttctttaaggcaagcccctgactttctaatggtgatgaaggggaagctttctaaagaagagtttctattctttattggtattacttggctaatttggtacagaaggaataagtgtatttttcagaataaggacattgaagatgacatttggattccttgggccacggagatgatggagatacacttagcttctgctcaaactaattcacaccagaatatttcaaaagacacgattagatggtctccccctcccccgggaacattcatgattaacacaggcgcttctctcattgaagggcaatcgggatgtggtttaagagtgataattagagaccatttgggtgcattagttgctgctgcaacagatttcattcctggctgcctttcggtgctactggcagaaactctagcaatccgtttagctctgaagctcgttgaaacaagattaatgcagaccatctacattgcttcggatagtcaatcggtgattaaagctttgaagggaagactcgcataaatacggattggggtattgtgattgatgattgtatcctagctagcaaaagattctataatctttctttaaatttttctcctaggaagtgtaatactgtagctcactgtttagctaattggagccgtttgtaccatgttactggagtgtggacttcggctatacctgattgtgcagctgcttatttgaaagcagatatgcccctgggtgctagtttgtaattcagcttttatttcaaaaaaaaaatgtgttatatgggacaccgaatgttttttttttcaaacgaacatgtgtttcagacgtggaaaaaaggatttaatcgtaaacaggaatttgaattaccaccacgcgccacctttgcaaggggaacaagtgttagaaaagttgaattaagttcaattccaccttggaaagcgaaaagtaactccaaagaaaagaaagggtcgctctgagaaaagtgatgttgttacaaatgaactacaagggccatggaagaagaagtcaatattctttgagctcgactattggaagtatttgttgttatgtcataaactggatgtgatgcacattgagaaaaatgtgtcagacagcttgcttaataccttgttcaatattcttgggcagagcaaagatggaat

SEQ ID NO: 220531 - DNA, 3309 bp, Cannabis indica
aaagatttcttccaaaggattcttcacatttaaagtgtggtgtgaactggaaaaacctatttgcctgggcttcctatttcctcatgaaggacgtaaaatatggctccctttcaggtatgatcgcttaccatatatgtgctttaactgtggttgtattggtcatgaattgaaggtttgcttagaacccattcgaagattggaggaggaggccaattctctcaaacaggggtatggaacatggctaaaggttgatgagaagaaggatactctggacatttttgggaaggggaagttaggtccctgttcgcaccctcactatggaaattctccccgtaaggataatgttatttcacctactgcaagtgtacaattgggaactgattctgggaatgtgaagaatccagatatattatctcatggtaaaaaggcagtggcttccaatatgcaattttcttgtgttgaggacatggaactgattgtgaatcatgatacatctcttatgagtaagtccatgggttgggaggaaggcaagactagttgtgatatgaatcgtatggagagagaaggagtggtaaatctgaagagaaatggcgattggcgtgaagagctgaaagagaaaacaccagcaccatacatcttgaaatccctagttcctttagatccccatgtagtgacttcaattcaaaagaatagtaacccagcacctttccaactctttgaagtgccgattgaatatgacaatactgttaataattctggtataggggacggtaagaccaaaagaaggaagataaccccgagacgcctcaaaaacggtggaatttcgaaaactgatactaagaattctgatgctataatggtgaaagaagggagcagtacatcagggactatttctgagctatctgatttgatcctggagactaaactggaagtggcgaacccaaatgttttgggtcgccgatcgtaatgaatgccctattttggaatgtccaagggcttgggaatccttggacattaaacactctcaagtcccatgtcaaggaacttcatcccgggatgattttcttgtccaaaactagactttcaagttctgcaatggaattcattagagtgcagctggatttcgaaggttgtttctcagttagtgccaaaggaaaaagtggcggcttggcacttctttgggctgactctgttaaagtgcaagttaaatcatttacggtgtctcatatcgatgctttggtggaaaacgacttgggttttacttggcgatttactggtttttatggaagttcggacccaggaggacgcaaggaaagttggaaattgttgaaacgccttcaacctatgtttaaaggagcttgggtttgtggaggcgattttaacgaaatcataaaaatactgagaagaaagagggaaacaacaaacctgcctatttaatgtataatttcagaaaggtaatatctgagtgttccttacgggaaatatcaactgagggtggaatgtttacttggtgcaatggaagagctgataatctaatatttgagaagttgggtagaattctttgtaactcggattggtctgataacttcaaagtgaactcagttagacttcttgactggagaaattcagaccataggcctttgtttctcacggctcatttttataacttagctcaagaaaatcgaaatacaagaggttctcggttccattttgaacaagcatgggcagagaatgaagagtgccaagagatcattcaaaaggtgtggagcaacaaaaactcaaacaatcatatatctaatcttaaaatactcttacaaggctgtggagagaagcttcatgggtggaataaaagacaaaaatctgaccttaataagagaattaaagagctcaaggataagatcggttggctatccaaatcttcttgttaagccgattggcttactatgaagaagttggagaatgatctcaactgtgtggaagaaaaacgagagatgtattggaagcaaagaagtcgtgctttatggcttaaacacagggatcgaaacactaaattttttcactataaagcttcacaaaggaaaaggaaaaacacaatagagggcctctatgatgaccggctaatttggcagacaagcttcaggaaaatttcagagatagccatcaattattttcaagctctcttctcaaaatcaaatcatggagttgagattagagatacccttgttgggtgtgttccaaaccgaataagtagtgaggaaaatagactacttctacaaccatttgatgaaaaagatgttaaagatgccatgttccaaatacatcctttaaaagccccgggaaaggatggtcttccgggactgtttttcagaaaaattgggaattagtgggaaaagaagtcacgacagcatgtttagatgtccttaacaatcaagccgattgtagcagcctcaatgaaactttgatttgcctcatcccaaagaccaaacatccaacaaaaatttctgaatttcgacccattagtttatgtaatgtggtgtacaaagtggtctcgaaatgtcttgccaaccgaatgaagcctagtcttaacaatgcaatctcaagtaatcaaagtgcttttattggtggccgaatcatccacgacaatgctattttgggcttcgaaagtcttcattgcatgaggaaagggagatttggaaatggaagaaaaatggccctcaagcttgacatgtcaaaagcatacgatagggtggaatgggacttcttggaaaccatgatgtcttgcctcggctatgatgagacttggatctcaaaggtaatgaactgtgtccgttctgtgtccttttcaatactaataaatggatctattcaaggtcattttattcttgaaagggggttacgacaaggtgaccctctttcaccctttcttttcttattatgttctgaaggcttaacttgtttattgcatgaatcggagagagctggaaaaattcatggattgtgatttggcaacttggagcataatctttcacaccttctttttgcggacgatagccttgtgttcttgaatgccaacttagaagaatgtaaggcactaaaagaggtgttagattgctatgcttctctctcaggtcagaatattaatttggacaaatctgatctatgtgtggggaggaaaataaatgatgaatcggctgagtccttggctgcctttcttggagttcgtcttgtgaaaactcatacaaagtatttaggcatgcctacttttgtggggaaaaataaaaaggaggtttttggcaagattcgcgatcg

SEQ ID NO: 220532 - DNA, 3517 bp, Cannabis indica
atttctaatctttattaataagtaaatctgattatgttgaaatgggttttatttagggcacaaaccaacaagtggcaacccgaattcattcctccgtcagtttctttcttatccttttatttcttttatgtttaattccattttagttttattatggatatgaacatgaactaaactccaaatttagggatatgatgagtgattattaattttctttccttgattgggtgatttgttcttatttgtattaattacatgttttagactgaccatctttaatgtggtttatgatctttatatgaattctgagaagtgaatattaagaatgctctaatagaataaacataggttttgatgtaaaataagagtatttacatagcctatctgacaattagattctgtgttcaatgcaagttatatgttaatttatttcagagatgcaagtagataacatatgatttaggaccttaatgatctgagaagagttaatgttacttttataatctgtcatcacttagagggaagaacatcaataatttacattaataattgggtaactgaaataacaagattcatattcctaagcattcatccatagttaagtatattgttattctgtttttattttactgcctttaatttaattcttattaaacattattctcgattttatcaaataaaaacataaatctagcttagtggtactcgatatcaattccctgtgggttgacctcacttgtgtgagtaaaactgcaatagattacgtacacttgcgtatacaataaaaatatagcaacattgggtgtgactgctagatagagaaaggaagagtggaaagggtctgattttgagaaacaattttagttttaggggttttgttagatttagggctgctaatgaaaataaaaataaagaatatatattttattattattttatacgagttccgagttatacccaaacctgaacttcagttttttgggacacatggacctgactcggtgtgtaattgggttacacccaaacccgaccaataattttttaaacccattttttttgggtttttgagttccgatctggtggatgggttttcgagttcaaatgttccgccctaggtcaagtcgataaatagacttgaccaatgccattttgacttattccttaatgtaacacaattgctaaaataaataaaatgctctaagagcttcaagaattcccaagtgttaaacatcattaaagtgcttatgtatattcaagttctgtgagtgtacttctatgtagtatgtctgtgtttgttcttgtgggtgtccctaatgcttaagatcactagcatcgtcaacaagtagtatcagagttgaactgttcgaaggtgaatcttaatctttgaaggtgaagcttgagcttaataaattcttgatccaaggttgaagatacaagagtttgatcaaataacaaagaggaatgaggaatgataagtatgatctggaaaagttattaggagacaataggtcctgcaaaataactgggcttggctcaatcatattaaaaatggatgatggaataattactcaactggatcacgtcaggcgtgtatttgagatcaaaaagaatttgatattagtattaatgctggatcaagatggttgtttggtcaaagtagatgatggagagttgagagtaattaagggagaaaatatcattatggaagggtcaatagttgatggaatttatgttctacaataaaatacactgcaagatcaagtcaatgtagtgtcaaaggatgcaaaacataaaaccataactcaaaggaattctagactacttgcattcaaacttatatgggtcctccataaatgtgtctcgaggtggagcaatgtacttcctaactattatagatgatgactctatacatctttgggtatttatcttaaagaataagaatgcttttcttagtaagttaaaaaaaattgagaaccatgctagaaaatcaaactgaaaggaaaataaagaaattaaggactgctaatagtttggtgttttgtgctgatgaattcaaccaattttgtaagttaattggtattgttagacataagtcagtaccaagaacaccccagcagaatggtttagcagaaaggatagatagaactatccttgaaattattaggtgtatgataattctgttaggaatgccaaagaatttttggagaaaggcaattgttacagcttgttacctcatagatagatgcccttcatcaacaattagattcaaaactccaatagaaatatggtctagacacaatttagggtatgagcacctaagagtatttagatgtgtgacctttgcacacataaagtagggcaagttggaacccagagctataaaatgtattttttctagggtatccaacatgtgtcaaaggctaaagattgtggggcattgagccaagagaatatcaaaaatactttgtgagcagggatatgacctttgaagaagacaagttctacaaagacacactgaagagtagctcagaggctgtaggaactcgtactaacacaaacttacagtttgaggtatagatgaaagatcaagacaactaaagaggtactaatgatccggaaacaactttgaatgaagatgaggtagaaattgaagaagaagatgtggagctggaagaagatgctcaggattatcagttagtaagagataggaagagaaggacaataaaaccccctgacaagtttgggtgtttagatttggcttattatgctctcagtataaaagttatgggggtggaagagccaatgtcctatgaagaagccatgaggtctgaaaatgcaacagagtggaatcaagcaatgtgtgataaagtcaagtccttaaaaaagaataagacttgggttttagtcagaaatgaagccaatgggaaggttatcggctgcaaatgggtctacatgtataaagagggaatccatgggattgaagagtcaaggttcaaagctagattggtggcaagaggattcacacagagagaatggattgattatgatgagattttgtctcctgttgtgaaacacactgtaacaccctactagtttaggcctgttatcgtgattttaacttaattgtgcagctcgttgctaatcaatgagtttattaaaaatcgtgaataactaaaattttatttaattacttataaataccaaaataacacatatatctaaccgggatcccgagtataaaatatttacaactgttacaaagtatgtactacaaaagatgtcgcctagcgactatacaaaatacaactagttgtctcaaagaccgtatgctccagacctaactcccttgacatgtacaatctccatccgcttgctctcatggctgctcaaccttagcattgcccttacctacacatgcaaataatatctgtgagtcgacagactcagtaagaaaagcataattaaaacatatctataaccgaattataatcagccgcacatacacccaaccataacc

SEQ ID NO: 220533 - DNA, 4853 bp, Cannabis indica
attctcagaattaatacatattaacaactttaataattatgattaatttattcataataaaaacgtcaagtacaaataatttttttgtcataattattaaatataaattattttttttaattcataatttaaaattattttcaattaataggttaattttaaattatcaagttaattctaaattaatcttagtcggtttacatgctttcggttttaaaaacagtaaacacataaacacatagaataatcttaatatatcatatttctactgtgagatgcataataatataattatgtgggatttctacgtatagtatgttattcactaatgcatgatcatgttattaatcaattattaatgaacatttatttaaaataaataaaaaaatattgatgatgaatcgggtaaaatttaggtatgtctaattttagaactctttggagaaattagaattaaattacagatccttctctatatcgccgcaagggtatttttataatttcgtaagattatcgtaagcctcaaaattatttaaaatatttttaattaattattcttaaataaactttttatttaaaacatctcttaaactatttaaattaagtaaaaataattaattaatttattcttaaataaatatttttatttgagataattttataatctataaattaattaaaatatttttaattaatttattcttaaataattcctttatttacgacaacttaatcatcactttatgttttgtctaaaaataataatatttattattttatgaggattaagataacatttgccttaatatggttattgattttgaatttgaattttaaattaaaataatatttatttaatattcaaataaatttttaaaattaaatattcaaaatttatgttttgtctaaaaataataacatttattattttatgaggattaagacaacatttcccttaatatggttattgattttgaatttaaatttcaaattaaaataatatttatttaatattcaaataaatttgagaaattaaatatcccataaaatattattattttgccttaattattttttacttaaataaaaaaatatttttattatttaataaacattaagacaataattgtcttagcacaattaaagtagttacaaatattgaatttgaattttaaatttgaaattgtaatatttattttgaattcaaattaatttgaaaataaatatctcaacaaaatagtaagtaatatttataaaataatatagataatttatagtgtatatatacactatatacatatataactttatatatacaaatatatatatttcgggtatgggttcgaaccaccattggctcactgtggctggcggctgctagagccaccatggccaccgtggccatggcagacaagcagaggggacacttaaaggccaacgagcatcgaacgggtcatcataaccacccctttgggcagggacagaggcataagttaagaataagaggggccaaaagataaaaacaaaaataattacgggggccaaatacataattttttgaaaaaataattttttaacattaaattactttataaattttttttctccaaaattttaggaggggccatggccctctttggagccaaagtagctctgtccctgccttcaagtctgttgctactacttgcaacgaaaacataccacatcccttgtatgcctttaatgcatgcacacgagtagaaccacgaaggtcctaaggtaagtcgagtggtggtcagaccactgtcgtcctacgcttgcggagaagagattgacgggtctcgaaattagattccaagtatgacccatcgttgatcattgacagtcatggtctcacggggcttggcatggtgttcgataccatagtgtgtggtggtggtcatcgtccatggccggggttcttccacgaacccaagctacatgcatggggcatctgtcgtgcatggctgtgtttcgattcaaaaacgagctcacatggtttgagcattacacagataaaaatattttgcataaaaaataatttcagaaaattaaatttacatgaaaaatcttatgctctataattggcttacattattttctaagaaaaataataataagacctacacacaattttaccataaaattaataattcattaccttacatgtaacgccaggtccaagaaggacgtcacgtgtgtgcttttataaaattctcatttattaatttatataaatatatcaaaaagtatggttaattaaaatttggcaatttaaaacacacacataaaatttctttttataaaagataagtactattaattacgagatttctctgttttcaaaatatttacaaaccagatcaacaatgcttttacaacataggtttttatttcaaaatataatcaaaatggaacaccctatccattgggccatgacaccgcagctgatatgtacaatgttgttacaacctcagactcatggcttctgaaccttagccttccctttacctggaccatttagcacctgtgagtcatagagactcaacaagtgaagtaaataaatcaataatcaatataacatttaacaattcaatctcatattaacacgcttaaacatttacacaatatcgtaatcacacaatcttggtacttcataaagtacccttaccacttgttaaccacgagctgtatctgtcactatcattgcttgagaaagctaacgataagtaacaaacctatccgcagttttaggagtaattactcatacggtaatgatcgtttctaaccctcgatcataatcaaggcttagcacacattattcaatctcgatcataatcgagactacaaccatacaattgttaatcacttaaccctaagtcatgtataacacttttcttacctcagtccagagctcaagtgtgcgggccggcctgagtggaaacaaagcaaggcgatctcggtcctatgtcacgacaaccaaaactcaataaatatcttaaaccaaaacttcggaataaaaccctaatccgaaactgaacaagaacctaacttccaacaactccaaaataggtcttacaacacttaaacaaccgaaaatagatactacgcatctctcgagccaaaatagaacttgaagaaaacctaggaattccccctgcagggcaaccggtcgaccggttctggtgcactagaaccaaccggtcgaccgattctggcagaccagaaaaccttgaggttttcttccacaattttgacctagacctcctccatacctaatcacactttccagaatagtgtactatcataaatataacatatttcaagaactaatttatagcaattcaaccattaaattgaaattacatattcaagtgaatgaaacctttttaatcttcatataattcaacccaatctaaacaactaccaatctaggttaatagaacctaattaaccttaatatcaacacctaaaacaaaccgtaaattcaatccaaagatacagctctaaatcctcaaagaaaaataaacctttcttacttaaaagctaagtaattcaagaataaagtttcaagatcttaccttaatgtcgtctaaacaagcttctaccccttccaatctgatccaagagctgaagaataagcaaaagaatcattggtttgcagctccttacggttgcgggtaagaagaagaagaagaagaaaggtgaaggttatgtgactttgtctatttttattttacgcctaatagtctaataaataaaaaaacaaataaacttattatcataaatccatttcatcctaattaacactaaagaaaaaacttttatcacccactcaaatgtccataatacccttcccaatacctttaacttaaaaatgaaagcctaggggcattttggtaatttaactaatctaccaaactgacatcttaaaattttaaactagtccggtataccttccctacaatccatcatttaatgtcgtgacatttctgaccactccgtctagtttccacggtcgcctggcctgaaaatattttattccaaaaatggtatccacgatacccacatattctaataaaatctctgtaattaataaattactctttatgtaaccatttactaaattcacactaattaaccctagtaagatcataatcttacttcattaccagaataattacatatttaataaaatatgtccaattaaatacaatattattttccaggatattacaactgcccattcattatagaaatttcgtcctcaaaatttacctaaaaagctcgggatactgctctcgcatctgcaactctaactcccaagtcgcttcttctacctcgctatttcgccacaacactttaactagcagaatagtcttcttccgcaataccttttccttcctgtccaggatctgaactggttgttcttcatatgacaggttagtaatatcttcataacttaatacatgagttgtatcagatacatattttcgaagcatggagacatgaaacacgttatgaaccccagatggagcaggaggtaatgcaaattgataagctacctgacctactctctcatgaatctcaaatgagccaataaatcttggactcaatttcgccctctttccaaacctccaaattcccttcattggggacactcgaaggaaaacaaaattccaaacttggaattcaatatctctacgctttggatctgcgtagcttttctgtctactctgtgaggcaagcatacaagctcaaatcttttcaatggccttactcgttctttggacaaatttaggtccaagatacctacgttcaccggcttcatccca

SEQ ID NO: 220534 - DNA, 1082 bp, Cannabis indica
tctctctcctgcccggggtcagctattaatcacgggcaagcaaagagcaaggataacctcacctcacctctctcctctttagtttcctttaatcttttactgcttatgtcacgcgtttcctcgggttcttttttatttttttttaaaagaaaaaaaaatatatcaaacaaaattaattagtacaataaataaacaagagaaagaataagcattaaactcgactcttcttcttctcatttaaaaccccgtatcttactccctctttttctttgttatttttctttctttcttttcttattctctcttcaaaaaaaaaaggccatctttatatacagctttctcctttttctttttcattcactgaaactttcatacaaaccaaccaaactcataccttatttcattccttttaaacccttctctttccttcaagtttctatttttattactttccctaaccccaaaaaatttaaaattaaaaaaacgatctttattcctttatttatatataatagcgatatcagagctttagagttgaattttcgatacttttttcaaaatgggtctttctgagaagaagcagcatcaagtaatggacgtgggtttagattcagacacggccaacaaaaaatgggtcatcgccggaattccctcacgaacaccattaaagcctatatacactaccaataatccacggccgccggcgccggaatcaataaggggttccgatcaaggccaggtcaaccatgatattgaggatgatgagtactgtatttcgacgacacccacaggagaagaatcaaagattccaaggattctgacgtgtccaccggcgccgaagaagaagaagcgttattcatcaaagtgtaaaatctatggttcttctgttattagagagttctttactacgcctccagattttgaaaccgtattcacacgccatcatcatgttgaaagggctaattaattatatataactcatcaattcattagagttagaaaaaaaaaaaaactttaattagcttgtactaattaattaagtccatattttgattttggtaccactttttttttttaatttg

SEQ ID NO: 220535 - DNA, 2258 bp, Cannabis indica
ctgtaatgacactcaaaagaaccgtttttgacctaagattttgactttctaatccacttaagaacatcataaaaatatcattttggactagaagaaccagtcaagtgccgcacttgttaaagcactatactgctataaatatattctaagaagaggtgagaatggatctacactccacttccacacaataaatacaaggaagagttggtataactaaactggcaaagtatgtcaaaaattggcaaacaattcttcaaagctaaccaacatatgaagttgtattttggagtaaaaaactatcccaaatgccatcataacctcatctaacaatatttccttgagacatcttaatcacaaattaactatggaaaactaataattttgaaaatcctcataggagaagagttgttttacctttgaccctattctattaaagttgaataatccaaccaaaacaaaatttttcgatcacatgttagaacaaatataacagggacaaattatataattttagtattatcttttaacaaatcaagacccacttagtgtagatagtgtttttaccatcctatccaacactcgtattgcctagtagctctttaataatgtttgtatttatagtagcgtagttgaaaaattagaactagtgatatattgtttaggtccctaatgtatacgtgtcctttagttaggctctagttcagtatgttaggtaagttagttatgatcaactaactcctagctatttctaagacataaaggccaagaaaagaattttttaagcatcaatattagggggtcttatgtatgctcttgtatgcactaggcttgatatctgttgttgagtgggagctgtgagtaagtatcaattaaaactagaaaaggaacattggaagataatcgaacatatcttgaaatacaataagtggaaatatatgttagtgttctatcaaaacttttaggctacaccaaatcaaattctagacttatgtcaatgctaaaaagtctacctaagagatggtgattactctagggatggagcagtggttttggagaagtgtaaaagcctgtataaaatcacaaactcttatagtaaggtggaataataaggctgccctaatggaaattagagaaatatttagactcgagaaagtttgacacagaccttggcataattccaaacatggaataattgcttagtgtgactccacgataacacaaatgcaatttccaaataataaataatcatataccctaagagaagtaaaacatatagatggggaattcacaaaatcatgaattttgtggctaaagaaaatgtgatggtggagtaggttgctgctgaatacaacctatcagatcctattacatattttatgccaaatactacatttgatcaagacatcgagtatatgagattaaattgaaatgtaattttagttttatattagtgcaagtaagagtttgtcggaatttcattccctaaataatatccaatttcattgtaatcttatttactttcaataaagatcagaaatcataatttgaccttgtcatatgctttgttcacatgttttatacataactatatatttagtatataacttttatcaaatctcgaacatatagttattcacaaatacagtgatgtcataacattggaaagtaattgtgattctatgcttcaaattatatagtctcgtgatttatcagtgtactagatttacattgaggtgatagtcagtgataaggtttatttacacttggataagtggaatgtcttttacagggtattagtaaagtagactagtatcggatgtatcggctatacatcagactggacagaatattgataacagaaaagatatcatagacttaccattatatcttttctaagtcaatatcaattagttgatcatagatcatttgacctaaatcatgagatggttaagctctaactttgcgcgagttctttgacttgtttattacaagcttaccatggaacaagctcaatacttacatcttgggaacttgatagtaaaattgaatgggagtgttaatatcatagatatggacatccataactactatgtttattcgaagtgaaacgatgatatctttatagcttggctcaacatgataaatgatagagtgctcatttcgacagttatattagcttttcaacataccatgtacaagtaactaagtgttttaaggataaaatacattaaagactaaaatagtaattttgtctctac

SEQ ID NO: 220536 - DNA, 2037 bp, Cannabis indica
tattggtttgattctgattcctaatgaactgcatttcagaattttggtgggtgattgagaatttgaggctttaattgtgtgtggaggatatgctgggaggtcaatgaatatttggaattcaatggatctttgttgattgaatctttgctgattgtggtttgattaattgcattgtggctatatttatgttttggtttaatattgttacagatttcactatctagtagagctgaacataagttttttttttttttcttttttgtctttatctcaattatttttaaattttcttcaggattcaaaattggaggtttattatcctttgaagattaaatttgattggagaatgtcattatgaaattcttatttttaattcttgtctgcaaccttttcatgcttcagcttccatgctcattcttctagcagtagttgtggtctcgaattatctaacattactagcagaataaagctcaaagagaagaagcaaatgtgtttttggcaattttgacaaagaacatgtataattttctctatttgatgaaattatggtgtaagtagattttagaatgataatataaaaactttgaagagcacttattttttgtaagttgtgatactttgctattataaaatgttatttggggtggtggtaaagcaattcttgatgtgtaaaacaattctcattcatgggtttggtttcttgtgattttatctacaggggtctttactattagtaggcgaggagctctgaaaaatgaaattgacttctaagtttataactgaagcttctagatgtatgagcaagattattgaaacacttaacactttactattagtatttattcatattaagctaatgctggttgaatgaattttatcctaaaatctaatcatttgcaggtaaaggtggaaaataatatagcataattaggctatattaagataaatgaccatagtctctataaaaaaaaatgaccatagtgactcggtgtatgagctggttgtttgtcacccctccaaacaatataatcttaaaatgaatcaataattaatatccaataaaggatttttttgtctgtaagggatgttgaacttatattttctttaagttttatggttaagaagtattattattttcattgtacgtggaaagtctgaattgatattctacatggtgtggctcaacttttctctatgtaatatatatttggtttgtgtgcttctcatgtttatgttgttattccctattttcctcttttctgctacaataggcttgtgctctagctgatccaactttcattcctccagctgttgttcctgggccccgtgaaccttggaagttccctgctaaagtagacctgaagcttaacattgatgcaactattaatattgctggtaatgtttcaggtgtcggagctattaattgttcagagtgaatttggccacatggttgttgctttttcataacctctcacagggtgttataaggctcatgagatggaagccttggttctttttcacagcctccaattgcttcagaattgcagttacctatcaatgaaatagaaacggatgcgcttaaagtttccatggcaatcaatcaaccctcgcctatgttatctacttttacagatattattgtagaagttattggtcttttatcatttttttttatgaaattgttgtttctcatgttcgtagagatgctaataaaattgttcgtggcttagcaaaacatgctttagagttagataaagtctttgtttggttgaaggatgtcccctcccctatattatttgttgttttaaatgaataagtttgatttataataacaagtttaattcttttaaaaaaataacaacatattactctcttattaccatagaagaataagaatgttcaattatactattgaccattgttgctcttttatttccttttcatatattatattaaacaattaataaaatgatattatttatttaattaaaaaatatatgatagtttaccataacaattaaaatttattatatactt

SEQ ID NO: 220537 - DNA, 1541 bp, Cannabis indica
accattcattggagatggtcttagtataattgagcattgctagcatgagtagtactcaactgtttcatgaattcgtgattggtttatcaattttttatcataattattatttatttagattttcagaaactaacttaattataaattaaactaaggaataatgtttaaagaataaaaaaataaatttttttacgtagttaaggtgttaataaattttagtccaaaagtcaatatttattaaactctttgattatagagtattttacacacgtgtgttcttgtcgaatttctgcagagtttctagtcaaagttcgtaagcctttgcatgaaggggtaaagatcttatttataggctaaaacttggtcatcggaagaacccgaacccgttagagttttgtacatgaaaataagattcgtagagtaaaatacaatataatattgacttagggccccataggtgagacccaattgaggtataaatatccttcatacaacgtagtacagatgatgttgacatgtgtccatacatcgttgatcgtgtacaataaatgtcagagtagtggacgttggacaaaaggtaaattactttttgtgttgtgtgtcttttacaagtcaaatgtgggggataaacccttacttttgtaagattttgtgttagaagtgtgccacgttagatcaatcgtggatgatcgacctccgtgacaccctcagactacctctccgagatgtccaatgagaatccatttatgccttctcaaacacttactagttttggttgaatcagtcctcaagatttgttgtctggctttgcctgcactcaagtcttaatcaaatctagaccaaccacccgacttccttcgtgggttgggccactgactatttgggccttgagaatgggctcgtaaattaatttgggcacaatggatgcataaatgccacctgtttggaaaagctggtaacattaactcccaagcctttggagctcgagagtcgtggaggcttgcagccaccacccagacttgtggtattacacggagccatgactatctcaggcattttaaaattttgaggtgaaaggttgtagaggcttgtagacctttcatatctcgtgagttaaagtgcatgtgtcatcgatttcttggtttgtgcgtgtcacacatcataaggatgcgcgcgtgagacctcaatttgcaaactgacggttggacatgtcagtagggtttctgaggcagatttcatcactaatgtgcttgtaatatctcgagattagtaaatggattagttataattgagtaattatattattatataattaattatatgaaattatttgagaattattgtatttaaggccccatttatgagttagtgatatttttgtaattttgaccaaagaaggataaaattattattttgatatttattgtgctaatggactatattattatagggcattttacataaatgtatacattttcttaaataattacaaaaaatgtgcaaaaaaaattaattgttacaatgtacacatttgaaaacat

SEQ ID NO: 220538 - DNA, 2195 bp, Cannabis indica
gagaacaaaatcagaagaaaaacaaacacggaaaattgtacaaaagagaatcgggtttacctggtcgttcttatgtgacaggaagctccaaaacttgtaaatcgacattttttgatagtggatatcaagctaatctctgagacgagcttgacagagacgtagccctaatttttgggtgagctcttaaatattttctggtgttttctctcctttacttttgtttttcatttactaaacttaaatctctgtgtgtgtggggtgaggatcctagggtttctactgggatcgagcaagttcttgtgaagaacttgctctgctagggtttcgtggttttagggtttgagtgactaagtgaggagagtgttagagtcttagagtttctagactcttcttagagagtctttaagccagggattaatacgacataagttttggtgtcgtagggttaaaacgctgccgtttgttgtctaaaattaattagacaaaggaaaagtcaaaattgaccttggatactgatattaagtgttttgttggtgtaggtcaatttggtcaaaaatcttacaggaaaatttttgaaaagtattattggtacttagtatcatttttagtgtcatactgctattagcataattaagtatcgtgtttcatataatttaacaaaataacttttagagaatataactaactaatcgtggaacaccacttataaaagttattgaataccactagtacccaataccaatattccacataaagtcgtgccaaatattttttcttttaaaattaaaatgtgagtctagcacgacatggcctttttaggcaccaaattttttttctttaatttttcaaaattgcactgttagatttgggcaagaattttcccgggctaaaaattaggcacgaccaaattaagtcgacctcattgctctgccatgtcgtgttaagtcggtcatgttgttctaacatgtcatgccatttgatgcaattggcacgaaattgcagagcaatggggccgacatgtgttgtgcccactttgcacaggtttcaaacaagaaattttcttcttctccattcattcagcctaattttttttatcttagcaacaatttttctcctcttttctcgagaccaagagaatccaaacttgcgattacgcacctagctaggaagttaaaaacaaaaacaaaaaaataatcatgtaaaaatattagagtatgttgtcccacattacaaatacttaagaattttaaagtatttggctcatttataaataacataatcactcgactataattgaattgtagacgttacctatattttataaccgaaaaaaaaacaaaattacaataaaaattgattagatttatatcactacataaaaattaataaactaaaatgaagcacaagacatatgcctaacaatatttaatatttagtctcttagtacaatattatttaataaaatttataatatatatttagtaaatggtaagtatgacaattacaattaattttaactataaatctatatagctaaaattattcttgctttaacagaagaaagtagaaaaattatgctgacaaatactcactatgctcagtatgttgtaagcgtcaaatcacttcgattcttttttttttttttttaatttaagtcgtttatatattacatcagcataacttgggactcgaacccatgatctccaatacacacgcacctcctatggccacttgagctagcctcaagtggtctaatcacttcgatcttgattagaaataatttcacctaaccaatatcagaaggtatcacttaaattatacataaaagaaagctttattaaaatataatttatagacataaacatatataatagccttaagaaacatatagcatatatgactctcacatcttgaaaggaactaagaacgcccgagcccctaggttaggtgggtcgtaagtacagacttagtctgcctatactaaagacgagggcctaatccgcctatgcccaaggcctaacctgacctgagcttgagaagaagccaccaagttggttgaaagattatttccattcaatttgaacaatcattaatagtagacaaaagtcattttattcttttttttgtgctcggtacaattttagtacataaatccttttatatatttaggagtttattttatttttacacttcaa

SEQ ID NO: 220539 - DNA, 1403 bp, Cannabis indica
atggggactgtgtccctaggctgactggcctatgcctggaactaggattcttagccgaccactaggctgggtcttggggtttgacccgccactaggacctggaaccctggctggctaaggccaaggctccaagtgggcaaccattttttttccctcttttgatctcggctagggtcttgtgatggccttgaaggcatatacaactcttgccttatgcgtggtttcccttggagactctgtatacgactaggtaatgagtccattatagtcaattgtacaacttaggacactgtttgttttagtgagtgagtctatggggatactgggtcattggtcgaccttgtacactttgctttacctagaacatacccttgggtattattgacttagatatatttgtagctttgtcaggttactcacctccccttatttcttccatgcaggtagtgtcgggtgttgaattggggaggtgacatttgtgtaagtctcttgtcttccttgtattcatggttgatacaaaacaaattaatggcaatgtgaccacgcacgaccctcatacgaccagattggctataaggtgtcggatcaagattacgagaggggttaccttgcctcatgtcgatgttatctccgaaattgaccataagaatgagagacctagggctacgtttaatcgtgagagagttgtaccgattaggaggaagaggtgcgagcattgtgtcatcctttccaattgtcccttaggtcattatgatagcgatggtaatctgttgagcaggctcagtgagcctttggtgctcagtttggaccacttcttggagcaatctcttgagcctaaaattctcgatgtaagttcacaagaagataggtggatttcccatgtttcgtctctctagaaggacaattttgagagaatataggctaatgggctagtgggcggtatacattgtaagatacctcctccagatcaactagcgcatagattggctctcaactagatggcgtggttagagtaccatattgatcaagaagccgtactacctcttcatttttactttcatgatattgcttcttacctcaagatgtgtccaacacagatcaccccgggaggtattacgtaccttttaacaatgttcgttctgtataaggagctaggctggccccaacccactccttatgaggttgaatactattttggcatggagtctgttttgcagcaacatcggcctagatacttctattttagccaagttagtcaccagtggctatatgattctaacaacttgtctatgccaaaggtcgatgagcatgttaacaagtacttcatttcttgggatgttaaaaagatctgccattgacattttcagagagtaccattcgtcaagcgttccatccccacatta

SEQ ID NO: 220540 - DNA, 3537 bp, Cannabis indica
taatatacataatttaaattatttacaataataaccttacataaataattaacacaaattcacgttccacatcaccaaaaataccgtacggtaaatgttgtctactccataatcacaacaagtacttaaaaatcaaactttggtaaaacacatgcattccttgcatgttttctctttgttttttttttaacattattttttaaacaaaatcaggactatttatttttatctctttaaagaaaaatattcatttttgtattttaataggatttttaaaaagaactctaactacaccagttattttaacttaaaaaaaaattacttttgcgatttattttttatacaagaaatatatattttcatatcattgataaaatgaaaacatccttttagtttcttttatttttagctaattctataatatatatatatatattagcttaatataaaatagagtaacatttttatttatgagatggaaaaagtaattaaatgattttaaacaaagtatattttaaacgttccctttcaaaaaaagaaaaaaaaaactagtttatcttagagtaattttaataaattactaaaagatatcttataaaaaacttactacatagttcaattaaaaaaaaaaaaaacatatcaataaaataattaattgtttataatgatggtaagatactaaaaaattattttttttaaaaaaaatctatttttacttttcacctataaaataaaccttttagttctttattagatcaatagtataccaataagttacatttttatgaaaagaatcactttaaaataacatatttttatatacatttgttcactttaaaatattacgtttttttttttttatttaagaattttttacattattttttgagcaatatttatgttaatttcaaacttattaagaaacatatgtatcacaataaaataaaataatttatataacttatagatttgtaaatatttaagttaccaattgttattttaaaattatattatgattttttaatattatttaagatatatttttagtaatgtagaaactaatttgttgtccacttcaccaaaattttaaataaagttgagttgttaatttaaatagaaaatatatacgagcactattggtattatgagcaatttaatagtttttttttattattattattttgaaaactgcttttacattttaaaatgatcacataataaaaagattataatgatatcttttttaaattcaatcaagtaacaaatgtgatcataaataattttcgaaatttgagataaagggagaagacaaagaagttgaacaattaaaaaaaaaaagtagcaaggataatagatttaagttcagcaattaaataaatcaaagaaaagaaaacaaaattttaaaaaaacgttattcagcgttatttatatggaattgagatggtgggcgttaattttgtaattgagatataaaaagtgtttgtgattgtaaattttccaaagttgaatgtggggtatgggtgggctttagtgtagtgctatgtggactgggctatagatggtatctttaggtgctctgtctggtccatcaggatttccttgccatatttattcaaaacaacattattaatacacatataaatgaacatgaaaactgttcgaattcgaaagcaacatagtgtaacattgttgaaaaaacaaatccatatttttattaaaaaaaattgtaaaatttgaaaaagctgtagaactgtaattttataaatattttgttatttttgaaaggattaagtacctagattcggtaaataaagtaattatatatataaatataaatatatttatatttgaaagggttaaatactttctttttttgggagaacaagggttgagtacttatattcggtatgtagataatatctttctcatcttgatttttctacatgaactaaaatcaatgctttggaaagtttatgataaaatggtccagttatgtacgttgttgtgaaatgttactagttgggaccgtgttgagaaaaaaagaaagcctaatcacaacagcaaaacaagatagttgtcccctgccatcctagaacgtttgcttagaaaagaaagtgaaataaaattctgaatttagaaaatattagaatattttatatagggtaagtcaaatatttgatttgatttgatttaaaaatatgcccttaattataaatattctagttatggttaaattttgattaacgaaatattttattactctatttgtcaaaatattttgaataacacaaataacacattcatttccatctaactctaaatttaagattctcataatttcttagaaaaaaaataaactggtaaaaacaactcattacaaatatattgtactaatttttttataaatgttatttaccaatgttaaagatatttaccaatttttaaatgctgtttataaaataaattagtatttttgtaatattcaataatttttttttttttttaaaatttcctaaatttaaatattattgttaatcatcaaatatccgtactaattaagatatacatatatgtagttgacttggctgcatgagctaaatactccatttgtgcttcattaatgttaattgcaaaagaaaaatatataattatttaaacccttcccccaccctatttatatttttattaaagaaaaagaaaagagagagaaaataaaagtcaaaatgagaaatatatcaattatcaatggagcaatcaccggctagacattgtgatgttgtttcacatcacatggttagctgcctgttttgccaatagtgaggcaatttccaatctatacccattacccaattgagattgagattgcatcgatttttttcatttaatgaaaaatcaaataaataccaaaacaattgcgtcaaaaaatggttgctcacaaatcacaaatatataatagtaataatcaatatggatttgaacaaagaaaaataattaaaaacaaaaggaaagattaaatcatatcccctcaattacaaatgcctagctagttgtaatattgtaacttaaggtgtgaaatactatctctttcaaaaaaaaaaaagtagtgaaatactataaaaatgtgtcttattgttattgatgtattttaatattaaattttataaattttaatttaatttaataaataatataaaatatcgctaattaattataaagtattatttcaacatgactttaaccaccaacatgtatttaataagagctgatttggtttattcgttgtgtctctatacgaacaacaacaacgaaaaagtctttgcttcacacgtaattaacaatcctaagttcaccagagtcacataggtgggaatgatcaagaaatgaacagcttgaaaatgagaaagccgcgtatcattttagtattttactggcatggtgccacacacagcacaaaaatgagactataaaatatatatatatatttagtttattagatttggatggttacatagatcacgaagttgacatatttggatg

SEQ ID NO: 220541 - DNA, 1950 bp, Cannabis indica
taaacaactgctaatttccaaattaactaagcgggctttacagatcacgcgactgaccaaggatgctaaggagtcaaaaaggggccaaaagactgaacttgaggcatgccaaaaagaagccaaggacaaacgcaaggcctaccaaaaactccaagaagagcttaatgcagccaatgcgaagcttgagggagccaaggctaattctaaggaaacgtgcaaacttgttgcaaagcgatccatttatagagcttgggtggcaaaccccgacatggacttgagcttcttaggcaaaggtgccgatgaggttttggcttattgtgagcagactacaaaagatgaagaggaagcagactccgaggaagaagaagatccatccaagtctcctacaatgtagacttgatttttaacttgttatttgtttttttgtatttagaaaaatgaccttgccgagacaatagtttgccccttctggctttatttgttgtaaaggcaattttacattgttggacgtccaactttacttttatatatctatctttacttttattatcttgtaccttatgtttgaacttaatacgattgtttatttgcgttcttaattcacaacatgaacaattataatttgatccaatttaagatactttaagaaagcatttccattgatctcacttttcctttgatattctttaagtagttattaatctactatgtatgtgtgcgagcagttacattctacctatgcttttcagttctcaagcaattatagcctgccttattgtacatgaatagtttactatttatccaatattattggagcagtttaaatctgccatatataacttaaaagaaaacttaaacatactttgaataattgactttatgaattattttatacattttttgattgcttatatgaaagttaagccttctatttatattttaggttatgtattatttttttaaggtattttcatgcctcgtttataatacatagctgaacgatgcgagccattaaatgttcaacttcacatttagcgttgtgttgttttatgacttgatctcatttgcaactgctactttgtttttcttatctgaagaaaaggttttttacttttttgactttatatggtccatagataattttaatcaattatcctttcttggatttttttataaaatggtgggtttgcaatataacatgtatttctagataaattcttgttgatatacacatatttattcccctcaagtaattttaaagaagactttgtaattacttgaacaaactttaactttattaacaataagagtttacatgttacagagataaagacaacatttcatttaaaatttactgataatagggtcgcaaatgttcactattccagtggttttttatttagcgagccattaagctgagccaatttataaaccccggttcctactactgcctcgataacataaggactttcccagtttgggttaaacactccagtagacacatctcgtgtgtttgtaaatactcgtcttaacaccaaatctctgatattgaagtgtcttttcttaactcttttattgaagtacctcgtgattcgatgttgataagctgcattagtaatttgcaacttagtatgtctttcttcaagtaaatcaaagaacaacttaacaacttcttagttttctttttgattgtagaattcacgtctgtgggtcgcaatattaacttctactcacaacatttcttctgggccaaatgccaacaagattggagtgtgccttgttgttgttttctctgtcgttctgtgagcccaaagtacttgtggtagttcatctacccatctccactttgcagtgtctaacttcttattaatagtatcctttaaggttttattaacagcttctacttgtccattttcttgggatcttgaaactgacgagaagctcttaata

SEQ ID NO: 220542 - DNA, 1697 bp, Cannabis indica
aaatccggtggtggtacataaagcacctaaacatcatttataattatcgcaaattcaatcagcagacatcctttacaagtataagatttacaattttactaagatacaaggcaatcccgaaacacagaatccaaactctcgtaccagatcaaagcgcccagggcgcattaatgcatcatcgattgcataaggacgatttgtagcagcaagcacaagaattccctgaagtgaaaaggagaaacaattgattgagttaacgatagattagatcatatgttactataaagcaaaatccatttcatgattgatgcttaccttagcctcttccaaaccatccatttcggtcagcaaagtagatagaagcctctcacttactgtactgttgctgcttgaactcgcacctctgccatttaagaaagagcggatacttagaatactttatattatgcacacaccccttcaaacatgaactgcataagccagttactattgtacatatatatatatatatatatatttatacgaattaagggtggaaatgggacagtgcaaagatagcaaatgcgaaagatctaaacaacatttgaaaaatttgagcaaacgtatgacattttctgtttggctacaacagcaaaatctaagacgataggttcttcgctttgcaaaacaaatcggaatttgaagaaggggaaggagaaggagtcctcgacccgtaatggatagaggaggttctatgtcaaattgtcaattcagtcacgtttaattttagtcttaaacaacagaaaaatttaaggcaacaaatatcttgttaagctttgaaaaagacggcaaagtactataaacagaatctcacttaagaaaaagaagaagatatactaaccgtttcccagcaacaacatcagcctcatcaaagaagattatacttggtgctgcaaggcgagccctccggaatgtattgcgaagtagagcttcaccatctccaacatacattgaaaataattctgcaccactgattcatagtttatgaattttcaagtcaagcaatcctggaaaaaactttagaagatggaattttcatgataatctgttgagtggtccatttttctagggaaaaggtatgaagattatagtagggaagattctttcttctttgatactagcttctgctattaagcattgtcagtagaaaaccagatgaaatggcagcatagctgtggggcattgcactaattatgactaaaaggccaaaacgaattggggtaaatctagcattataaaattgttctcatgatacatttttttttctttaaccagtttaatatggaaaacaaacactgaaagcctaaagcattcgtttttccgcctttgaaaagcttttaagaataggtgatcacacaacaaggacaacaaaatgaaaaagtgttcaaaaccacggaaaagaaatatggcttgtcaaccattgtattaagggttcaaacctcaaggaaaaaaaagacgcttgggcagcatgggctgcagctttagcgagtgttgttttcgaacatcctgggggaccatgcagaagaattccacgcataggtgatattccaaaccttgtaaatgcattagaatgtttgataggccattcaacagcttgttggagctttttctgtcaatgaaaaaggtgagtatgagttttaactttgaaaattcagaat

SEQ ID NO: 220543 - DNA, 3673 bp, Cannabis indica
gctttctgcaagtgtaagccataatccaaggaccctgcaaggtatcgtaatatccgtttgacagcaacaagatgagattggggattgtgcataaactgacatactttgttgactgagaaagcaatgtcgggccttgtaattgttgcatactgcaaagcgccaactatagatcggtatgcagaaggatcaaggacagggtcactcccataattggagagtcgaaggccactgttcataggagtgctttgtgtcttgactccctgcatttcagctttgcacaaaaggtcttgaatgtacttttgttgagaaagtaagataccagtagcagtaggaatgacctgaattccgagaaaaaggttgactgtcccaaggtctttcaaggcaaactggttgctaagagcagaaataaggtgagaaacttgggtgttgtcactcccagtgatcaagatatcatccacataaactaaaacatagatgcaagagtgagatgatagcttgataaacagagagtgatctgttttggccgagaggaatccaagactagtcaaggctgaagagagcttttgaaaccaggctctaggtgcttgtttaagaccatagagagccttatgaagtttgcatactttatcaggttcattgggatcgatgaagccaggaggttgaaccatgtaaatctcttcttgaagatcaccattgagaaaggcgttgttgacatctagctgtcgaattggccatccttttgtaacagcaagtgtgagaatgactcgaatggtgattggcttgacaaccgggctaaaggtttcattgaagtcaaaaccggcctgttgatgaaaacctttagctacaagtctggctttgagagtgataacattaccttcagcatcctcttttactcggtaaacccatttacacccgattggagttcgatcaggaggaagcttaacaagagaccaagtcttgtttttcttaagtgcaacattttcagtttgcatggcagcaaaccacttgggatcttgcaaagcaagtttgagagaggacggggtgagagcagccatgagaactttgggttttcttatcccagattttgccctggttttcatggggtgaatattaaccacatcgcttggaactgatggaacttcagttggctgagatgtacctgttgcagcatctgtttgttggcatcttatagatgtcataggaatagagcctgcattgaaagtattagtaacagtgggaatattagaagtaggagcatcattagtaattattggtccagagtccgattgggatgacacactaggagtgatgggttgggctgcaataagatcaggatagacttggtgattgggagaaggaggagttgaccgtgggacaacaggaggagtagcaggtgtgtgaggtgaaaacatagtatgaggagcagctgttgtggacagtgatgattgagcatagggaaaaatgttctcatcaaagagaacatccctagagatatataatctaccctctttggaaaggcacttatagcccttgtgagagagactatagcctaggaatgtgcaaggttgagacctgtactccattttagctttgttgtatggccgaaggttaggatagcataagcaaccaaacactcttaaggaggagtagtctggtttggcttggaagagtgtttctataggagagaggtaattgagagtgggggtaggcatcatattgatcaaaaacactgcagaccggtaagcttcatcccaaaatttcaacggaagagaggcttgggcaaggagagtaagaccactctcaactatgtgcctatgcttacgctctgcaaccccattttgctcatgtgtgtgggggcaagagactttgtgaatgatgccagattcagttaagaacttagtgaaggcttggtattcccctccccaatcactttgaatagccttaatacgtgtgtttaattgaagctcaacctgtgttttgaaagagatgaaagtggaaatagcttcatccttagttctcaatagataaagccaagtgtgcctagagtaggcatcaacaaagcttatgtaatatcgataaccattagatgaatttatgggagcaggcccccatagatccgagtgcagcaattgaagtggctcagtgtacacagtttgtgaaagaggaaagggcagtttgtgatgtttgccaaggcaacaagcatgacatagatcagaagtagaaacatttttattcatagtttgaatattacaagatgacaaaacagattggacaattagggcagagggatgcccgagtcgtttatgccacaaagaaaagacattattgctgtcatttacaagggaggaattgcaactgatcttgttggtgttattggtgactgatggagagtgctgcttggtggagagattgatttgagaggagtcaaacttgtatagcccatgatcaagtttcccaaccattagagtcttcaaagagacctggtctttcacaaaacagtggaacaggtgaaattcaaaaaagacattattgtcaagggcaaactgagatacactaagcaagtttttggttattaaaggcacatgcaataaattattgagaactagaggttgagattcaaatggagacataaaggaggattgaccaatattactaatgtgcaaacctgttccatttcccatgtgaacttgctgttcaccaatgaattcagtgctgttggagagattttgaacatttggagtgagatgatttgtagcacctgagtccggataccaacttggatcaacaacactctctggtgtagcatatagggcctgcatctcagctaaatgggcactgttggtgaagttctgaagagattcagggccagtaaaggttttatcaaacctgtaaaagcattgaaggacagtgtggccaagcttgtgacatagctggcattgaggtttttgtccccaaactgtgaataagcctctgcctcgtgaagagcctcctctgaaattaccaaattgacctctggctgtggaaggaccacctctgaagttggcagactgtgacattggagtgtactgggggtgtggtgggaaaccagggggaccactttgactaaaataaggaccattagtgctaaaggaattggaattaggatgaggagtacctgatccaggtttgtgctgataggttgaaaaggagccacgaccaataggagatttggcagcaacattggcttcaaccttcgaaatgtccagttcctttgcagctttgtcgagatatacttcttgagccatcaataatgcctcaatctctgcaacactataggcatccgatctagtgttaacagaggtgatgaagacattatattcacttgtgagactattaaaaatggcttctatatggtcttgagcagatgttggatggcctattgaagcaagagtgtcgatgaggctcttaatcttgagcgggtaatctccaagggagtttttcatctttgtatttcagaggagagttttgtactggcctatgttggctcgattcaaggcagtgtaatgatctcgaagtgtactccagatttgagttgctgtgtcacatcctaccatgcgagtaagaactcgttcagacatggaagaaagaagccaagatacaagcacgttgtcttgctgttcccattcttcaaact

SEQ ID NO: 220544 - DNA, 2681 bp, Cannabis indica
tgtgaacagtagcaggaaaaaggtgttcattgaagaccacatttttagctatgaataatcgtccttcttggctttcacataaataacctttatgggaggaagagtatcctatgaaaatacattgttttgtcttgtattccattttgtgatgattgtatggtctaagatgaggatagcaggcacacccaaatggtttgagaatagtatagtcaggtatttggccaagtaacacttctgtgggagacacatgatgtaaaactggtgttggtagtctgttaataagaaatactgccgtgtgaaatgcatgccaccaataagagaactcaagaccagattgagctagtagagtaagtcccatctcagttatatgtcggtgtttgcgttcagccctcccattttgttcactggtttttggacatggatgttgaaaatggatgccttgatcactgagaaatcgagaaaagggtctatattcgcctccccaatcagcttgcactttttttattggtaagttgaattgtttttccaccattgttttgaactttaagaacatgtcaagtgcttgtgatttttgagtgagagggtagatccatgtatatcggctataatcatcgatgaaatggatgtagtaaaggtatccatctttagacttgatatgagagggtccccataggtcggtatggataagctcaaggggctgtgtggctttgttatctgtgctaggaaagggctgtttgtggcttttaccaagttggcacgcatgacaaaactcaagttgagaaatggtgccattgtggggaacatgttgtagtattttagttaggacagtagtggacggatgtcctaatttgttgtgccatacattaatgtgattcttggtattagtttgcagaacagtggggtgggagacattgagatgaacaattttgtctttattgagatgagttgtattacaagaattgtcatttattacatttggtaatgaaacatgactactacaactcatagcaataggtgaagaaccccgaggcacatcttgctgcaattttgccacatttgaatgttgagagcattgttctaacacatacaagccatctttaagtgtccccttgagcagcaccttccctgtttgcttgtccttgacaaagcaacatgatttgtggaattcaagaaaaacacaattatcattagtgagttgtgaaacactaaccaaaattttttttgcatagcagggacatgaaggaactgaattaagtttgagacttgtagagttataagcaggtaaagaagctaggcctatattagtaattaataacttcttaccatctcccacaacaagaccttcaggtcctgggtatgttacagctgaatcaagattgtcaagaccgttggtgacatggtttgtggcacccgtatccacgaaccatccggaatcatcgccaaaatcaggaataaaggatgtggcatacgcttgagggtcatattcgagctcatgttcagctatgtacgcacgaggtgggttgcttgaggaggattaagatgagccatttgtgcctggtgtaggtggaacccatgtcttgtcgaatctgtagtgacagactggtgcggtgtgcccataccgaaggcatagttggcacaagggccggttttgatgatgctgagaacgataatttggtctgccaccattcttgttcatctgaggaggtcgataaggaatattgcgtgaaccagtaaatgcaacattggcttgtagcttcatggacaaatcagtaacagagttgtggtgctcaagccgactttcatgggaaagtaacaaggcttggacctcttcgaacgtgagaacatcacttcttgcagtgatgccagagacgacagggtcatattcgggtccaagtccatttagtaattgcaagatgaggtcttgatcaagaattggagaacctgctacagctagagaatcggctatggcttgagttttgtcaacatattcagagatggattgaccgcctttacgaatggtggagaactggttcttgagttgaagcaggcgggctttcgattggctggagaatttttgttcaagcgcacgccataccgcatgagatgatgagaaattggctacagacgcaagaacaccatccgtcatcgacgatcgcaaccatgacagcagcaactggtctttgcgtttccattgatggaattcaggattgggttctccagaaacgagagtttgcagaggagaaatgcctgaaagtaaaatctaatctaactcatggccgattacagtaggaatgacctgagatttccaagacaaaaaattagttctatcaagcttgactgttagaacagaggattaggagtgagaaaaagggttgtggttggagttcatctgggttgttgtcgcagttgagggagttctggcagcagaggcaggatcggagaaggtagactccatggtcgacgttagtctatggcgactgataccatgtagaacttcagaatatgaagttcaagaaaacagagtaaagaaagaaagtaaaaccagaacatatacctttattgaatgaaatggagtatttatatacatcattgatatacataaccgactctgtttataaggtaaaatgtgcctaacagtagttaaaaagttgttacaaaataacagaaaattacccacttaa

SEQ ID NO: 220545 - DNA, 5472 bp, Cannabis indica
atattttgacaattcccacttcatcaagtttttaaaagtcatgagatcataaaaatcttctcaattgtagttaggcctttagaaaacggtgaagaggaggctgtaaatcagatcttaaagactatgcttaagaagaaacttcaagattgcaagaaaaactggccaaaagaataacctcatgtgctttggacctacccaaccacaaccaagtccactataagacattcccctttctccatatggatgtgaagcaatggttctagttgagaataccatactatcccacctaagaacaacctatgatctagaaatcaatcattcactccttcaggattcccttgacctagtcgaggtgctctaagaggcaacaagagtgcagctagagtcttaacagaggaagttagagaagtacttcaattcaaaagtttgggagaggaatttcatggtaggagacttagtcctgagatgagttttccccgcatcataagtccccagagtgggggtactaggtccaaactagaaaggcccgtatgagattgaagatgaaattttctttagaatataccacctaaaatttaaaacgtaatcgaattctagagtgcttggaatattgaacatcaccgtaagtactaccagtaactagaagacaagtattcattatcatctttaaatatcatgcaaactttgggtcgcagggatcaaaaccttttatctctaatgaaataatgacatcatacaaaatttcttaagtgcgcaaagaaaacttgagagaaaaataagtgattcaaaccctaaactcttaagtcacttgggggtagagagaaaactagtaaacactaaagcatcgtagcaccaagtttcccacattataaaattgagtagaaaatactagggttagtgtatataaaaaatttacacaaatatcaaaactaaaaatatgaaaagaaaaacctataaaagatacgaaataaggtatgtgtaggatgcaaataaataaaggcctcttagccgtattgtcataggtaaaggcctctcggccacattatcttaaataaagaccttctagttgcattatcttaaataaagacctctcggtcacattgtctttaatgaactaaaatgctcggggcaaggctattagtattatccccctaaaaataaaaaaaataaaaataaccccttggttgcaaaaaactatatttgtaacaataaaaagttagagatattattcaagttcaacaacttggagaagttaggggaggaagcctgggaccacccatcttatgtgccaaaattgcttctaacttctagtccttcaaacagaagcactccaaaacctatttagaattcttcataaagtgaaaaaagtttcgtaatggttcgacttccaggtcatgaacaccccatcctcaaagtactttatagtgttggcatgtgatggaaatcatagtaggagatggtctctatgccgtgacatcctaggccaactggttggcatcccaaagagtcaaagttccttgagcttaacagacatattggccacagtattaagaatgaagcacttcaactttgagcagtttatgtgtcacgttggccaattcagtcttaatgccttccacctctagttggaccttggctaagtccacttccttctgaacaaaagcctccttagaatctaagagttggccttgagcttggttaagttggtcctgggtctgggtaagataatctcgatcttgttgaagttgatcctgagtaagatgccactcctcctccaacccagatgatttctttaattctcgctcccagagattcttctcctccaataggtaatcctagagctcctcaacctcctttccagcctgctttaattcagccatggccttgctaagacctccaaaagttgtgacctcataaccattgtcaataaggttcttggccaagcatcctaccacagttgaaacatgttcgaaacaaagtcaggaaatgtgggacaagagaaataaaaaagaaaggaagacaaagatttggacaagggtcttactgaagccagtcaatttcttaagtcttgagcctggtaaattgggttggacaaagcacaaaaacgaacctctgaatgtggactttaactatctctaccaccaaggaacttttcatttcagtgtccgaaggagctaaatccaaacaaacgtaatccttaaaccaattggtcatggtatctatgttgagatcatacaccttcccaaagtattgcctgcaaagtttactatcttgacgcctatctaaacatttggttagtaaggaagtctcaacttctctttttgacatttcctccaaggcaaagttatgccttaaatttctcaacttcctatgagcatcgttagggtggacatgcattagtggaatggcggggacctctggcatctgagtctcctaacaaggaatccctaagctggaaacccctccagactaagccttatacgcggagcccttagagcaagacctctttaatgagctaggtttatttggagaggagtgcttctttcgcttggaagttttctttcaaagggaacaattgcctcctccactaggatcacctcgtttttctcttacattgactgaatgggccccttgaggttacaataacgttcaggatttgcacaattagcccaagctctaaatctactgcatccattgcattttccatgtcaaacatcttaaacatctattgagccatgggatctgcaatacaagagaagtgttagagacgtaatttaaaaaaatagacatggaaaagtttaatagaagttgtaaaatgaaaaatggttagaaaaagagggtagtccttacctcgatgccctatttcatcttttacaaaggcataatcatacttctagaggcatcgtcctcgagagagctatcgaaggtaagaaaccaactgaaataatgtgagaagtgacatccagagggattaggattagaggctctgattgcatatgggacttgcctaataaattccctaagtaaatatttgtttacccccaaacgggatcgcgacatgtgtagcttatggagccactcatcaaatctagtagatataacttagcatattcccaaactgggggtgcataaattatagataaaagagacttactggtaccagtagcactggcttcgggaccctccatgttaggtaagggaacaatcgagaccaggcggggagcacctaatttcttggctactttctgggcatccttacaatttgcaacactttaaacatgagacacctgatcctcctcctcgtaaagcctctgttagactttgtacttcctctccaccttggcaatataggccttcatgtcatcatcttctttcgttttttccttaacattcggacagatgagttcggagaggtcaacatcctcgattgtttgaggagccactaagatactaattttcaaactatgggcagcagtgaccaaatcaccaacattaagctcttccttgttgagcgtctagaaaatggctttgtggtcctgacagagctgagttggagccgtccttcattgtatttatggttaggagtttggctccatgctccaaagtcattgtatttatggttaggagtctcgtattccctagctgggcagtggtaaagaccttcctcgtgagggataatcccactagtctccatgatcttggccaaaatcatgcaagaattttagggtagaatgcagcccatctgcctcttattcgattgccttataaacatagtcttcgggcctccaagaacatcagtaatgggaatgagaggggaatctgcgacctcctcaaattcttcatggactttcttactactaggacgacccatctcgtgtactcgtgatgaaatctctaagtcaaaggcataaaaaccctgtgcaaagagctcttaaagctcttcacacatctgagaaaaggaaaattccaagcagtagtccccacaccaaggaatgaaagagaaataataatgggagtgtcctaactgctcgaggagaaggcccctctagacgccccaattgatggattctcgtgtctatggcatcgggtgctaatcatttcaataactatggaaggaatctgggaatatccaatacatcagaattacctacgactacgatgaaagaaagcattaaaaataaaggaggagattccgtcaaaaaaatccaataactacaatatggcatcaccaccacaaaattagaaatatctaggagtcacaattgtcctatcgtcgcctatatgctactacataccctaaaatatttgaaaatgatattattctactaattttcgttaaatcaacaagcaatacaattctatgaaagtagagaaaacacttacatggtcgtaaaggtcgctattaaacgatggcaacatagatttttaataccaagctctaaaaagaaccctaattttttttggtaaattacggctcagtgaaggtagagaggcgattgagaatggtgaaggaagtgcagcaagtagtctggttcaccgagaaaacttctaagcataatgggctttgaagagttgagagtgaaaaggtatgaaggaaaataaccaagggatatatataagcccaaaggggtcaaaccgaccctttgatccaatggccccctttgtattccaagaagcacacctgatccgacggtcttaatgcctctagaagaaataatttatgaggagatgattggattactcgagtttcctctgtctgctctgcaataaatggtacatctcaggattatgagtcagaatgcaaatcatcctcatcttaaaacaaggtgaacatgcatgaatgaaagcacaattcagggatggacacatgttttgttgcaagagaagtcgtgtcttattaaatgcatcacaacggtacacttaccttttggatgggaactgaaaggacgcttttggcaattttcaacttctaagaatgcaagcagagatttgggggtaaatgttatcccaaaatttgaattaacacacgtggcaatcaaaaagctgagcaaatgccaaaagagcccccaaattattagacaatgataattagcctacaaagtaaaatggaagctagttctgggagcaaggtattgttccggaagcccatatcagtgccaaagacaaacttaaaagagacccctagaaaagaaggtttgagagggcctggcctatcaaatccattccatcacgcgtggtcccttgtagcgcataataagggaaagtattgtagcttgtccctttcataccgacgacaaaataagattcccataaagcaaataaacttgggatttcctccactaccttttctgacatgcacatacccatacaccctcaagtgagctcacgccttcagctgtcacaaccacaatggacatgtcttgtccacaagaatctactccctatcgtgggcctgagtcaccggcccatgaa

SEQ ID NO: 220546 - DNA, 2539 bp, Cannabis indica
ataataataataacaataacataaggaagatatatacaaatttcatagtcagcccgaggaggacgatgagggcccctgcgctcctccagcaccgcatccagcctcttatttttctcccggaagcgagccagaacctcttcaggtctagggtaaaaattaaggcaaagattcttgtcattagctatccaggccatgaaaaccccatcgtcaaagcgcttcttgcaatgctgacaagtgattggggccaagagagcatccctctttgctttagccgcttctttttgagcttgctccctaaactcgcgaagccccttcactttaacagtcaagttagttgttgtctgcaagtctgcctggtgtagctactcaaaagactttagcttggtggttagctcttgaactgcttcctttgaatcctgaaggtcctgcctcgtcgcagccacgacctcatcggtggccttcagcgcctcatccttagccttcagcgcctcccgatggctctattccatgagggactccttcttctgggcttcctcccagatggctttcttttactcctccgactcccgaagatcattgcctccttcatgcccccaaatttggacatggtatatccatgatcaatcagcgtcttcgagagacgaccagtctctactgcaatctggcaaccaacaaaaatatatgatattaggcatcaaaaaggtaagaggcttgaaaaatctaacagataagaactcactgcagtaagggtcgcgcttacatcctggatttgatacataggattggtagaggcacaggccacatatctcttaattggcagttaagtcaggccggcagtgaagtggctcattaactctgaagcaaagggagctagggtaggtccgatgaagcgattaaacaagttagtcaagggatcaaaattcaagtcctagacgttcccagcatattaactaccagtaaacatatcctgggcatctttcagaatcttcttcagggcctccacctttgcttccccttggtgtacttccccatggcataattgtgcttgaaaatctggtgctaagtcctttcctcatcagctggaatgggggttaggatgataccaggaggcatagtatacttgtccacctcggacaaaatctctaagtcagaactaggagcaggagtatccacgcgcctcaattttttaacaatctctgcctccaccattttacctttacgcttgcgatccaggggagggaggatctcgccttcttcttcttcttcttcttccttgtccattaagacgacttggtcctaggggattctagtagaagatctcctgggaatcaccaccgggttgcctgattgaggcatgccggactcaggactgtaggtttgcgcgagaaaatccaagaggtcatccattggcttcgctgcttaaagaaataaacaaataaagatgttagaacattatcaaaaatcatgcatgcaagagtaatgaaatgaaactaatcctaccctggtgatctaattctgccctagcaaaagtatgtactaaaaggctggtgtcgttgtcccctagaaagatgttcaaggggaggaaccaactggaggatataccggtggagtgatccaaggggatgggtatgggaggaccgaaacccatcagggaccgacctaagaaatgactaaggttggaaaaataaaaacccttggcgtgatcaccccatcaaagagggggcattctaaacttaagaagatggtaatgaaattgcacaggcctgcaagtagagtaatcctgaacagaaggaacgtgatgaataatcagtatggacttactagctctggaggtgctggcatcgggagccccaatgttaggaaatgggaacggaaacttgggtcgggaggttgcatgttcttttctagcttttatttgacgaaccctccctaaggcagcttgggccttgatatatgttgactcttgttccctcttgaagaggtacttcttgtacttgtcctctgcagaagcaatgatatcttcccggagcgccttctctgactcagggttgtgaatgttcgggcagagaactttggataaattgaagtcatctactgattggccctctgaaattaacttctcgctctggcaatttgtagtcgtgaccaagtcccttacgttcaacccgtctttctcgtaggtggagaagactttggcgtgttgaagaaaaagttgagtaggggcagtgcaatgcatgggagggactctaacctactcaatgagtagctctgggcgctcaagggctttgaagacggaggagaagaaaaatcgatgatgatactccttcatgttcgtttgaaaattataaggtatcgggccctcattggcaggatgggcctggagtttaaaaaaaccatctttgagtttgtcccctttcttggggacggataaaagtttgtaaaagataaagaatttcagccagactgggcggggcccaactcttggcaacgtaaaaaatgtacaagcgtaggagcaggcgataagcttgaggaatgagtt

SEQ ID NO: 220547 - DNA, 2509 bp, Cannabis indica
gggagtgaactactataaatctcttgtgtctctcttatttactttacttaacttctatcttctctcgccaatctagcgagcgagtgttggcgagtttttttgtcaatatattggtattttcattaagaggcacaactcaagatccccctttgaatattagaggtggcttcttgtagtgaataatgttgcaggttgcccaatagatgttttctctggtatctatcaagtttgtgtattcagtatactgggattcttatccatttctttccttcttggaggactacgtccgactttgaggcttgttattccttttacctctagcttggcttacctttgactcaaggacttctgtttattgttgtggttgagttgttctgggagcagcactaaatttaatttatgtcgccccatacccaaagaaagttgtctacggagaggcataccctgaggtagccagttcataggctgtaggtgcagcatacaaggtttcgagaggcacaatagctggagttggatatgaggcaacttgaagtatgcgtagctccattaccgtcacgacaatggaagccttgagcccttgccaagaagtcagaaggtgattctagtcttttcctctacatttcattccaaagtagggatctggctctgatttttgcctatagggccactagcttctgttcatcactgaatttcgtctttgatgttgcttccgtgaagagttgaatatatgttttgagggtctcagtctattgttgcttgatgttggctaaagaactgacctccatattaaagttcttacaacaacgaagtgcttcatgaacattaattgtagatttgccaactctgaacatttctgagtggtagcctcttccaccatttatctacgaatttagcaaaagtaagaggaaaatataaacatttctcgtcttcattcacgtgtgcgaccttcatgagtcgattgtaccggggaaagtgaactctggggtccatcttgcctttgtacaagttgatctacggcatccaaaagcactctggtaggactacgtccaagattcttctaacgcatgtctccggatcttcatcttcagaatctaattcggctccactttgtttcttgatcagttgacctattactttctttaaggctactagttagtcctccagccttcatgtattatcatttggcatctctcgtccctagatttggtcattgatattaatttgtaaatcctctctttgaggcctgattctttcgcaacgtgctttctaccttcatgcattcacgttgtccctggtcattcgctaaatcactttctccagcgtccaagtctttgatatcttccttttggttaacaaaggcacttggacaagcattccttttcgggcattaagtcccagtgcctgagcacaggtcttattgccttgcaggtccctccattacggattggtttcgcaatctagccttggggtttcatcattcctcccttttgagagatcaagatttattcgcgcatgccttggaatattggcttttcttgggggcatctactatggattttcctttgtcatttgttgatttggatggtccagctccagggtgatcaaactttttcgtggccactggcgagttggtgttgatctaaaccccaagactggggtgctagtttgtaggagggaccttcgggttaaatcccctagttccaattagggtttgcaatagcatgaggatttcttgtatttggcggtagcttcctcttgctctccttcttggcatcttggtctaggaccagctgctttaaacgagtaacttttgagtctttggaaggagtgatcttcttcctcctcttcatagtcatcttttttctcgtcttcatagtacctatcttgtaatgtctttgtcgggattttttcgtacggatcctctggttggttattgttttggaggggatcaccaaccaccaccgatgctttttcctctcgcacggtagctgcccgggcatccaccggaggaagaggattaaaaacatcaataatagggttttcaattgtgttccaacctatttaaccagttggtcgcacaaccgtgtttcttgtggccaccatttttttagatgacaacaatagtgaaaatctttcttcagctctcaatgaaagtactaaaatattatcgagttttttaaaaaatgaatgtaaagaaagattaagctaaataaataaaactaataagaaatgagacacaatttttacgtggttggggtgttaatgagtcttagtccacgaggcagtattataagctttttgcaatggagttcttacagctcaaataagtaatttactagttataaattttctaaaccatttgcatggagggcatagtgccatatttataagcgattaagttgaatgggttggatagattcgatctgtattagggttttttattaataaagcccactgatgggatatagtacattgtatttgtgttctcttaagctattgggtcaggtag

SEQ ID NO: 220548 - DNA, 1950 bp, Cannabis indica
tacaagaaaattaaccacttcctgtatttttatgacaaactggaactgtatatgctagaaggcccagttacagtctgtggttgccctttccaccatggaagcagaatttatggcttcaaagaattttgtttgaattgaaacagttcataggaggagtgactgtgtactcgaatagccagtcatccatccatctttgcaagaatctaatttgccatgaaaatagcaaacatatagacatatgactgtactagattagagagaagatagaggaatgattgattgaattagagaaggtcagaatagaagataataccgctgatgtaggactaaggtcttaatagtaaacaagttaaagcattgcttggacttgatcaatctcaaaagttagtaaactgagatttctagaacaccaaccatgatggcttcattatttcctcattaccattaatattctaatatgaagtaactaggtcgaatttatggtacagttcctccaaagaaaaagatctccataagattattcttataatggaaagttagttgtctcccaaaagtaagttcctcgatagctaactttccatctgaaagaagactcgtggaagatagtttccatccagaagggagttcccatataactatcatgtccattccaggtgtcgtctttaggaaagctagtcctcctctaaaagggagttctggatggctagttgttcctcctggaagggagattcggatagtcgactttggctagctcctttcctattcggaaagtcctttcagcatatgattcagtcctttgtcccataatcatatgtctcatctggaagaacttttcattgtgttgacgtggagattctgttacgaggagattgttaagtctgttatgtcgtaactaacttaacaacccatcagttgtagcaactgaccttaggatctttatcctaagcctataaataccaccaacacttatcatttcgaagaggctgggttcagacgatttttcaagaggagatctcgagattgagagaaagaaagatagaggtagagaaagagaggtacagagaaaagagagtgattgggtttggattttgtatgaagaatattctgtagatgaagaagattcttgggtaagagtgtgagaattgaaacactttagagaatccaataaagaatcatctcgactgtattgtaccccttgttcttgctcaatcaataaaggagatttcagcggtattcaagaactggagtagagccatatatcacatcgatctataggacttgaaccagtatatatcttagtgttaattttattattttactacttcaatcgtttctaaatttttattactctattcatccctatttttcttcaattcatatttgtgattggtttatcttgtcattactaactgtttgttgattgaaattttagttgatttgattctacacattagtcataatttctcacaggtctaattgtgtgtcgagacccacaatttttctaaccttaagccattaccagaatgaaagtacaattcaaacaaagctcaactatttgccacatttgatttagaagaatcggagttcatgtccaccatagttgagatagtcactgagacttatgtggttagcctttggggagcaatggtggttgttgctagcataggcggactcatatagaggcaagggggcagtcgctctctgaaaaaaaaaattgagaacaaaacaaatatgtattttagttatttacaacatatatataataaaaggtgatatttataaacatactgttaaatttgtatatgattaagttagcttacacatataatataagttaagggttcaactctcaataagagcatttttattttatttttaaatatattttttcaatctctaccaataagacttgtatgaagtactaatctttttatagttattttttttttt

SEQ ID NO: 220549 - DNA, 2164 bp, Cannabis indica
atctgagaagactataaattaccttagtaaacctgctattgcatagaaattaacattaggaaaataatcatattaggccataatcaatagaaacaattgaaatcgaagccctagtttttattaactgtcaattttcttaaataattgcttcttactagttttcttatttttaattctttcttaatttttatttaaccaaatagaagtaaaagtttaatttcaacgtacttaactacaatccctgtgggatcgacctcactcctggtgagtttactacttgtaacgatacgtacacttgcgtgtgcaaaatatcacaacaccaggtgccgagacacctactgttgttgtccctgattatgttgccacagaaacaccaactgttcttgatacttctgctactttcaagaacactattgctgcaccaccggattctattgttgtcacagtcaacaaacattcaatgaccaccagaagaaaatcaggtattcaaaaatccaaggtttttatggcttctataacccttgcatctatgaaaagtgcttcaaaagatccccaaatggtttgctgcaatgtctaatgagaataatgctttaaagaaaaacaaaacttatacattagttcctctaccccctaacagagaaccaataggttgcaaatgggtttttcgagttaaagagaacaaagatggatctgttgacaggttaaatgcaagattagtagcaaaagggtttcatcaacaagttggttttaattttcatgaaacttttagcacaatgattaaacctgtcacaattcgggttgttctcaccatagctctttccaaaggatggttagtaaggcaactggatgttaataatgcatgccttaatggcgatcttcatgaagatatttacatgatccagccaccatgatttgttgatactgagcatcccaacaaagttttcaagttacataaggctatttatggtctcaaacaagctcctagagcctggtttgagaagttatccacattcttattacaacttggtttcacttcaactaaaactgatcattccttattcactttaatcacaccaacaaatgtcatctacatactgatttatgttgatgatattctcataactgacagtgattctcaacaaatctcaaccctaatcaaaagcccccagttccaaatttgcattaaaagatcttggcatcatggatttcttccatggtattgatcagatcattcacacacaagaaggtattattctgtctcaatagatgtacatacaagatttgatttgcaaagctaaattgtagggagccaaaactcggagttctccaatgaatagtgggttgagattatccaactatggtagtgaacctgtcactaatatgttattgcttacaagtctctgtatggtgctcttcagtatgccactataaccagacctgacattgcctttagtgtgaataaggtctgccagtttatgcagaatcttttgcaatctcaccttgttacagtaaaaaggatcctaaggtatcttgcatgcacactagattatggtcttcaattgaagtatccctcatttctacatcttgaagctttctgtgatgcagattgggctgctaatcttgatgatcgtcgctcaaccacgagttactgcatcttctttggtggaaacttaatctcaatcaaaaaaaataggctaccatctcaagatcatctacagaggttgaataccgcagtttggctgttgtggtcactgagttaagttggattcaatcattgttgtttgaattacaacaactctcatcaaactcctcctttaatctagtgtgataatcttagtactatgcatctgtcagccaatcctatcttgcatgctcgcacaaaacatatagagattgattttcactatgttcgtgacaaaattctgtccaaacaaatcatggttcaacatgtcccaactgagcatcaaatagcagactccttaacaaaattaatctccaattctaggttctttattcttcgagacaaacttggtgtggtttgctcaactaccttaagtttgaagggggttgttaagagaacctaagctacagttagacagttagagttctgttttgcttggtttaagtctattgtaactaattttttgttagttttcattacctg

SEQ ID NO: 220550 - DNA, 3149 bp, Cannabis indica
gagcctattttcgtaataggtttggcacagaaattataagaacctttagaaaactaacagtaataaaataacacaaggtttttacgtggttttgtaattagctctgcatagtccacgagtctatcttatttagatatttctgatacagaactagggtttcttttttacaatgagtctaacctctcttccctcagatttcttcctctctatgtatattcttcccctatttattgtaatataggttggaaattaattacattcaagttcaaatccgataacaatattcccagaaattgtgggctttaattatgctccacgtaaataaatgcaattaatatttgaaaatcacacagttgtgatttaaaccatttttaaggaggtcaacgctgtcgtggatggaaacttcctcttagggtcatcttgttggaggcatctctctttgtacatggacgaatgactaattagcttacatgcattccagcaatggcatgagcacaagtgtactgagaaaactcaagaatttctctttgatcataaggtcttgtagattggacaatcatgtccttcaagctattttacttagtcattataatgtcaattatatgctaagtatttaagaatcgcgtcgcttcataaatactttctttgcatgctgcgaggtaacctagctatgcgttgtctatgtctcctttgggattatgccttctgacgtgagatggtttctggtaaatacagaatttgatagtttgtacgtccttgtctcgcttgaggctatgcaagccagcaagttacaaacaaactctatttattctatatttaatgtgttgtactattttgcatttaatgatataattatcatcatattcgttcattcatattccctgagactgacacatgtcactttgtgaagtagcagcaaaattttgggtataacaattgctccttaaaaagtctttttttcaaaaaaaaatgctttttaaatgattaccgtgggaattttggtcataatccaatttcaaaatatgcatgcgtttaatttggcagtttgtggtttcgagggacatcatcagcattaatgatccatcttttccacttttcttccacttttacccgttggatcttctacactttaatctgacagtaactaagtttagagtataaaacggtaaggaatcaatttttccactttttcttttcgacctcaagtgttcaaaaaattcatcacgccattctctccatctccggtcacagacttttcatcacacgctactcgacttcaaacagtaagtttctcattcttctctatttttctttatttttctggtttatgatcatttatttagcatcttttcacttcattcggttttagtaattttggtttaagttttctgggttaattttagggtttaggcgtactataattttaggtttaccgtctccttgggcctctggtttaataaatttcatccaaaaattgggattttttttttgtagaaatgtcccaatctggttcagaagtttattctctagagtttttataaacagaaagccctaaagaaatagccctcccattccaacctaaaagtttcaaacctcggtctaaattagagataaatgatgccaaaattagatcatttgattaagtcgaacaagaaattgccagtcggtgtaggcgatttattcaagagattttttagagtagacgtcattttttgcgagacgcagcctggcctaaaccctcaatattatcttctattccacgtgcgagaccaatatttttaccccaagtcactgttgcttttgaaccaggtgaccttgagtttgacattatgtctcctaaacctcataaatcaaatactccacaggatcccaatgtaacctttggggcaaaactcattgcatccaaggttagatcaattggggcttattttggtggcatactgaagtcatgcggtacaaagcagaggaaaggttgcactataaggtccgttgctctaggagaattcagctattttcctccagaaagggtaatacgcgaggagtgcagtggacccagcagaagagattcctcgagcattggtgcctggagccttgagcacatcaaggctagggtggttttatccttcagagattactttaaggagttctgtaactacattgaggttacccctttctacctaaacccaatctcgtataggatccttgcgagcttgaaggtcctataccatattttaggattggagtaccctagtcttggagatagtatatttttactcagttaaggcagtcttcacaaggaagcgagctgcaaggggattttactaccttggcacctatacgagtgatcgcaggatcatcgtgaggctgccaaacaagactgagtttaaagaagacttcttcttgacgaagggtccctttcttataaatacgactgcatttcgcattatacgtaagtacaatctgctccaaacttggttttaatttaccccatgtttttaattttggcctcgctgactaataactttcttcttttgacagtagtttctcaaagaccagtttcaattcccgagatggccgagcatcacaaaaccttgctaagtgttccattcgggttgagatcgataaatttcttgtgcagcaagacaaatgtgaagaatgttggccttcttgcctcggatgaatatacttgagattataaagtacctaagtatacttcgtggcaaaaggttctggttccaaccgatgaagagagcgaggattacatggctcacgtacattatcttcaaaaggtcactcctcgggaagctgaaggggaagcatcccgaggtaatcaatgtgggtggtctcccactgtgcttagggcagaacgtaacacccttgtatcttttcgagatagtcgatacaatttttatacttggaaccccttcctcatagatcgtataactcataggtttgataggttgtacctagagtttcacgttcaaattagatgcactagttccttctatgcgattgtccagcagtatgaaactatgttggatagatcgggtcacatggattaaagttgggacttagatccaagaaacccttatcacaagatctagggagcttagtgaatattacagtcctccctcgtcatcttctgaaga

SEQ ID NO: 220551 - DNA, 8647 bp, Cannabis indica
gactttggcagcttagaaatatttgaaagtttgggtatgcatgtagcttgaatttattagaattatagctaacattcctttccgttttttttttttggtattttccaactaagccgataatttatgtttgttgtagcttcacagagatcattgccaaaaatgtatcttgttagagacgaagtaagctatcatatgatatggttcactttatactctttattgtgtgaaaattctgctatagatagctcttttgttattattcttcatatttgtggaacttgagcaatatgctattgacgagcatgacaacacttttaggccattcatattgccgggaccaaaggaaaaggttctactgcagcctttatctccaatattttgagggcacaaggctattcagttggtagttatacaaggtagtgtttattggcttcattatcgtcttcacattttcatttatgttcaactctttccctaattgctattgtctttcctccataattatttgagacaggcttctttttccaatgcagcccacatatccacactattagagaacgaatatcgttaggaaagtttggtgagcctgtgtcaactaaagctttaaactctctttttcttcggatgaaggagattattaaccaggcgaggaaacttgaaaatgggcatataagtcattttgaggtatcacttgcacaacattgcctctgtttgatgtaatatagtgttattgctttgaaattcatattgtttgaactttgatgttcctgtgtcctgaaagttcaggctgaagcttgaagttgatcaagatttaaagttgttgcttttcctgttaacttgactttagcaactttgattcacaatttttaccataagtagaaggacaaaaggctcatggctgttccacttgatttattcaaaatgttgaattaagaaaattggcaaccactaaattcttttagctgagttttttaaaagcatgtgctctacaatgatctaataatggtttaaataatgtatgatgttttgctgcttttagttttgacggtttagttcattgtaggttctgacagctatggcattcaaactatttgcagaagagaacgttgatgttgcagttattgaggttatttgttctcccttagtcatttctatctatgcattgttttagttttggaatcaacttcacttttggttttgtgtcaccagaaagaaattcctaagaaacttgatgttgctaagtttgtttataatcgtatgtaataggctgggttggggggtgcacgagatgcgaccaatgttatctgtagcactggacttgctgtatcagttattactacaataggtgaggaacatttggctgcacttgggggctctttggaaagcattgcagttgcaaagtctggaatcattaagcacggttgcccagttagttgattctatctctgaaattgttacagattttaattgatatacttaaattttcttataagattttctaccattgaattttttgtataatttttggtagaaatgagaatatagaagtatcctttcgaggttagatttttacagtattattttgatatagtttagttttttgcaggcttcattcttttgttttattgtgcaattgttcactgatttttagttcttttttatgtgcatttgtattattgtttaagctggttatttattgtattgattatgtttaatggtttaaactttcaggtggttttgggtgggccgtttctcccgcatattgaaaaaattcttcgagacaaagcttctttgatgtcatcacctgtagcatctgcttctgatagtggtaattgcagtaaaattaacgacattagcttgattgatggtagaccctaccaatcctgtgatatagtgatacaagctgacagggatttaagcctggtacacccttgtatttatatatatgtttgacttgctcgtggtaactcatgcaatatttctgtattttgaatattgattatttacaaagagctccgatcatgcagcccttcgagttacttgatgtgaagttgtacatgcttggaagtcaccagcttcaaaatgcagtcactgccacttgcacagcactctgcctgcgcgaccaaggttgaaacacctaattctccttttcttatattgtttctgctgattcatacataattgcttgtatcaattctagtgtttctatgaaaactagactagtacattttcaaatgacttcccaagttcatgaaaacattctggtctctaacatgcttattacaccattgcacttgcagagactaaatctactgaataacataacaatgtttttgatattttaggatggaatatttctgatgaatctattagagctggtttagagaatacatgcttgctcggaaggagtcaatttctaacatctgaggaagctgaggcattgggactgtcgaatgcaatactaatgttggatggaggtacttctttctttagttcccgtattaatttttttgctttttttcttttcttatcgatgtcattgcattgctgtgtctcttatggtttcggtatgtaatgttttcagcccacactaaagactctgctaaatcattggtggatactatacaaaggacttttcctggtgcacatttggctcttgtagttgcaatggccagtgataaagatcatgtaggttttgcgcgagagctcctctcagtatcaggtaccgtactttttcttttttgctgaaataatcaggttttgtactcagtaattctatcctttccattttctggtgggatgttacaaagaccaacacatttttatgatccaatttggatatttatagataggctttatctcttaaacttttatggtggttaattatggtaaaatttgaactctactcttcccctcactagttagttttttcaacttatctgtagaaaaatgtataaaaccttgtgaatggcattgtggtcattgcaatgtgttactgtgttttggcccaaaatgttccatgcaaagatctaacatgctagataatcacatcttatcaggtggaaaaatagaggctgttcttttgactgaagctagcattgctgggggaaaatctcggacaacttcagcttctttcttaagagattgctggatccaagcttccaatgagttgggattagctactcttcaagttgaaatggaagaatcgagagaactactgaaagatcaattttatggcagtataagcgatcgggaaactaaaatcgttttggtatccgaaccttcatgtttgtcttcattgcaaattgcaaatcatattctgagaggtaggacgggtaatggatcaggcgttgttgtggttaccggatctttgcatattgtgtcgtctgtattagctactcttcatggctgatttagttacatcttgtctctatttctacaccaccatctttcaaatatacattggctacagaaaccacattttgttatttagttatcatttggctgcttcacttgaagatgttgggaactcttcttcttccacctcatcagttacatggtggaaatatttctggtctttaaagttgccacaaaaagtacaaaaaaaattcttggggagtagttcatgatgtccttccaattgccactaatttagttgttcaagttgtcatctctttcgagggatccaaccttattttgtgacttttgaccactactatattgatatggagcttgattgagttcacaagtaatgagttgcaacaaaactcaaattcttttttcttcattacctcattttgtgaaggtagttgtatatacataatgtccttatattcatgtttatattttagggaattattaatcaatacaagttgggcaataatggactagttcataaatgaatgaactttgggagatcatgagagtctctagaacattgtttttcatcctgtcgttggacaaatatagaaatcagtccataaacgattttgaattaattggaatcatagttaaacctgctactagctaataattctgcgcaaaatcacagacaactaaacagtgcgaaattggttcacctgccctataacaaatcaaattggatacaataaagagacatccacatcgtaagaagacacatgtttagcaaataataattcatgtaaaaatatttttcaattaaattagacttattcggggtgaaattgtcaaaaattttaatatatttataaatctattattttcaaatgttctaagtgatatttaatttaaaagttggatatatatttttatactagattattgttacttgcagcatgcacgtataattagttttatattagtttagtcaatttttgaaatgtaaaattaaatgttcctacatgtatgagttagtccttgaagatatattcattttaaggtaacatgatcactgtttcttaagtaccaccataaggaaataagagaaaatgtttgaaaatagtaaaaacaaaatgacataattatttatgttgaatcaaaatacttgagaaaaaattatatataaaagtgacatatatataattaatgcaagcaatatcatatctaaataaaataagctattattttagagaaagttttaagctttaaaaatgaaaaagtaacacttgtaataccggtagctttttcctaaacaagtatcatgtaactgccataatcaaacctagtaacaaataattaaaggcacaagattatttgctgtcacaaaagctgagcttaagaatattgcaggagctaatcttcctaataatgaaaaccaaaccagaaataatattttaaagacttatacattttttattttctacattttgctattttaacatttgggatgagaagtctttaaaagttgattagataagaagctcttatcgaataaaaaatgtataattagataagaagctcttatcgaattattagataggttcaaaagttgattcaaaatgataatgagtcaaaagaccactcattgactatgagttattccactctaattgttgccattttccacttattgccgaatgatttttaagttgaaagcccatgatctaaataagacatgtattgaactaattaaccgaaatggctttcaacaaataaaattgtagatagtaataattttaaactaattctcagtttcttagagaattaaaaagttggtataaaagaatataggggaagaaataattcttaatcctactcttcgccaatagccaattgcattgcccttatagatgcaataattcttcacaatttgatcatatacatggggcaaagaaataaagtaggaaaattgctcattcaaaattactcaaaataaaacatgctttaatttatagcaggttgaacactcaaaattactcatccaatcaatgagggatttagaaaaagagaataaagactagcatgtttaactatttttcaaaactattttaatggggttgtgatttttttttaattattaataatatatatgatggattttagaggtagatgaaagttaatggagacattaatcttccgttagtttttattaaaagaaaaaaaatgttaaaaaaaataatctttaaactaataattttgttacataaccacactttatataaatttataaaagaagattataaacttcattaaaaatgatacattagagaaaaataatttataattagagaaatgtttaaatgatttttttattttattttttattaaaaatgtttaagaaaaaaaagagagaaaatatataaatcctattggagaaattttagaatatggaataggtttttttttaatgatgtttttcttttcattaataagtagatatttgttttttttcttcattaatttaggtaaaatataagaaaaaaaaatgatcaagttaattaatgcttaattaataattatatcatcagttatcaaccaaaatttataaaaatatgatcggttaattaatgcttaattagttttttccgttgatttcccaacaaattttttcttttaaaaaataagatatttaatactagtaactgaaataaaactaataatgaagaatatctcaacctcagttatgatcatgatattttaatttttttttttttttaggcaaatttcatttatcatgccaaatgaaggttaaaaaattagtaagactgtataaatacaattatgagaaaagaaattatgagcaccaaatcagtatgcatgtaaagaaagaagggtcttccaatggcttctaagcagataaagaagaagtgaattgaatgaatctttgagcctcttcagtgcgaccaaaacgggtaagaagtccaatcattaaagagtaatgctcttcagaagccttgacttcatacttgtgagtcattaagttgaaaatccggcaagcatcatcaacaaatccaccatcttcacatatagaaagaaccacttggaaagtaaaatggtttggagtaaaacctttggctatcatcaaatcaaacagaccaatagcttctctatacaaaccattatatctataggcctctataactgcagtccaagtcattgaaccctttacctggattgtgtcgaaaatcaaatcagcataatgtattgatccacaaatcccatatgttctcacaatttctgcagaaacaaaatggactgactcgaaatttttcttcaaaacttgggcatgaatctcctttccaagcttcaagtttttcagttcaccacaaatacttagcatcctttgtattgctactgaatccggtctgtgcttggataacagcattgatctaatcacaccaagtgcctcatctagacaatggttttcaacatatgaatcgatcatagctgtccataagatcacatttctctgctccataccatcaaacaatcttgcagaatagtccaagacaccacaccgcgaatacatcatcatcaacgatgaaactatagatatattaggcatgaaacaatttttgacagcataagcatgaatctctttaccttggttcaaagctctcaactctgtgcaaaccggaactatagtggaaaccgttacaacatcaggcttgcttccttcctgttgcatccaaataactgatctcaatgcctgctcgagcctcccatttgcgacataacccgacatcaaagcagtccaacaaatagcattcctctcctttgagaggtagaaaactcgtctaccattttccatgtccccacacttgcagtacatatcaatcaaggcagactgaatgaatatctgctttgaataactctttgtcttcagaacataagcatgagcttccctgccgagtttcaaggctgaaatatcacctattgcaggaagaatgatggtcaatatgactgaatttggccttaaaccttcctccaccatccatctcaaataatccaacgcttgccattgcagcctattgtgtgtaaaaccagaaatcatggttccccaaacaacaatatctctttcaataatttcttcaaacactttggttgcaagcttaatcttgccacatttaaagtacatatcaatcaaactcgtccgcagcatttcactaccaataaaaccgttcttaatcaaaaggctgtgagttttcaaaccttgcaatagcgcctttgaacccgcaaagctcttgatggcattagagaaagtataaacattcaactcaacccccaattcccgcatttcaaaatatgtatgcagagcatctctatatctcctcccacccgagaccacagcgcctctgagtaacgcattccaagggtaaacgctccggctaggactttcgtcgaacagtttatgggcatcttcggccgaaccacaagccgtatacatattatttcgtacgcaagaactcgtttttatcgagcccattgatccgaataaacgtatggatttgtttaccgtggtccagagacttcgtacggacgcaagcggtgataagggcagcgaatgtggtggggttgacgggaatgccttcgtggttgaggtagtccaagatggtgatagcctgggtcagcttgttttgcctagcgaaattctgaatgtccttgtaaacgaaaactgggtttttgttgtgaagtggtaaggactctggaaaagcgtccttctctgtgaaaatcggcggcgttttgggtttccttcggcgcttttgcggcggcagcggcggttgttgctgctgttgccctgtggctttccgaaacgacgacgttataggagggtttggcgggaaaggttggaaatgaagtgatatgggtgaagaggttatagatttcatggtgtgaattgttgaaccaaaaaccttaattgggcagcaaaaattgaacccagaaaaatgatggtggcagtggcagtggcacagtcccagtatcagtatctagctctatgtgtgtgaggttgtgactttagaccatgtaccatctcagatgtaaacattgtgatatatttggcgcgaaaaaaaaaattatggtagatttacatcaaattttaatattgtgcttcaatgcacaattataaaattttaatgtaaaatttaatatctaattaatgtttttattaaaaagattaaaactaataactttagacgaattaccactattttttaacttttttttt

SEQ ID NO: 220552 - DNA, 1766 bp, Cannabis indica
ggcataaaacccaacaggatgtgctagggtctcgcaggccatactatgagagagtgtattttagaggttagccaaacatgtgttgtgttgaaggccttggcgaaccattcatatttaggatgttagattatagattataatcaaacaaacatgtcagtaaatttagatattggtaaaatatgtttcgatagtgtgctagtttccttcatcaccacatcaataaacaactcctaatctaatacttttatgaaggtctcttaccattatataggagtatgatagatgcagctagtggaggagcactagttgacaggactcctacagtagccaggagcttgatttctaatatggttcccaactcacaataatttggcattcaccaagatgttatgccaccaaagaaagttaataaagtgagcgctcctattgaccacaaattttggcaacaactcgctcacttagtgtctatagtacaacaacttactttaggccaacaaacgcgaccttgtaggatatgctaggttgtgggggcatactactcatacttgtcaaaatgtatatgaagggccaacagaagttgttaatgctattggaggtttcccaggtcaacttaggcagcagtataatccttattcaaagacatataatgagggatggcgtgattatcctaatttttgttatggaaacaaacaacaagctgcaccacctagaccacctggattaaactatgaacaaaagccacaagcacaacaagcaccactatcaaattccaagccctctattgaagacctgattacttccttggccaaaaattcattacggtttcaacggacaactgaagccccgttgaagagtttggcaaattctataggacaaatggcttcatctacggccaagataaaagccaaattttttgaaagatttccttctcaacctattgaaattccaagagctcgtgctaatgttataatgttgagaagtggcacaagttatgcaccatcaactccattttcctcatccatgtaatctatttttgcaccatcaccacaagaggatgagattcaacctcccaaggaagcaccaatgcttaaacttcctctgcttacttatgttcttattcctccattcccttgtagattaaggaaagcaatgaaagctgtaattgacaaagcaatccttgagacaatttgtaaagtggaggtaaatttaccattacttcatgttattagaaaagtacctcgctatgcaaaatttttaaaggaattatgtacgagcaagcaaaagctgaaaggggaagaaaaataagtgtgtaggagaatgtgtctacgattcgtaaaaagaaacttcctcctaaatgtgaagatctaagttttacgatcccttgtattatggggaatgtatgttggatttgagagcttctataaatgtcatgtcatattctatttatgtattgctgaatctcaggccagtaaaagaaactggaatagtcattcaattggtcaaccgatctaatgtctatccttgttgagtagtggaggatcttcttgttaaggtaaaaaacttggttttcacggctgaattttatattctagacaaggaagaagactctattccatgcactagatcgatgttattaggtagtacatttatgagaacgaagagtatgaaattagatgtcaagtcaagaatattaacgatcgaattcgatggtgatcaaatacatttcagtgtatttaaatatgattatcctgttgggttttgtgccc

SEQ ID NO: 220553 - DNA, 1534 bp, Cannabis indica
aaaagtgcggattggatcggatgaacacccctaatttgtggttctcaaataaaagaagaagaaattattgcttgaaatacaattgagaagttgtcaaattgtgttttacgtaattgtagattattttttttttttttttttgttattattatagggacaatacctttgtacctaaattacacaattccctaccatatcgttgtgccattagagaactttatgcataaagttgtcaccttatgtttctttttcaaatacatatagataattaaagccattaactttgtgcctaaattacacaattccctgccaattttttatgctatgagaacactatggatagatagcctaagacggcgttcactaaattttttgcggctaccattgttagtagctcattggatttggaccgttatgatttgtgcactgttttcattccttttcttccacattactcaaaatcaatccaaacaaacaacattttgaattgaacgtatcaaatttaacaatgaattatgttgttaatctacttcatttgagccttattgaaagatcaaaagactactggactaacccatttcaccatcattatcataatataaatatgaacatgaaaatgaaccacatttctgacattgttatctgaaaccaaaagctcaacaacatttttccatgactgcctgaccggaaacataacgtccgtacactaacatttattctaaagagtaaaaaaaaaacagaaaatacctttgaaaagagctgagattaaacttaaagggctttgagaatatcgtcggcgctgctaaaggtgaaggcaccaccttcctccaaattgaggaccttaacgacgccgtcttcggccaatagtgcgtatctcctagacctaactccgagcccgactggcttgtcactcaaatctagctccgcaccaattgccctagtgaaatccccatttccatcggataacagaagaacctcatcgtttaccttcagatcctccttccaagccttcatcacgaaggcgtcgttcaccgaaatgcaggcgatggtatccacgcctttcgatttcagctccgctgacttctccacgaatccggggaggtgtttctgcgagcaggtcggggtgaaagcgccgggaacggcgaagagtacggctttcttgcccttggtgaggtcagagacggtgacggtctggacttctccggcggcgtctaagtaagacaaggttgattccggaagcttgtcgccgacggcgattgtggcggagattgttgaggttgatttagcggtggagaaacggagtggctttgggaggtggcggttgttgagggcgaaggaagtgaaagagagacgagaggagagtagtgttttggatgggaagagagaagcagttgcggtggtggagaggcagagagtggctgatggagctgtgaggagccttgagattgagagagaggccgccattgttgataggtggagaatagagagagagagagagagagagagagagagagagagagaagtagtaggagta

SEQ ID NO: 220554 - DNA, 2271 bp, Cannabis indica
aactgagaaaccagcaatggatttttggagagcctggtctttctaaaattctcacaaaaatcccaaaaacccttctcatttgccttaccgaaaagcataactaactctttctctcacctatgagtcagcaccactgtcttgctcacctaagacacacacaagtcacccactcaccctatttatacctttcacgtaggtatattttgccaatgctcttatcactactgccctcctgaagagatggatggccctactgaaaataagtctcagaagtgaaagtggaagtaacactcaaacaaacaataaaagttaggataggtatggtaagaacatagagacttagctcatgtccgttaccagtaataatttatgtcataagaacctgaaataaacaatgatctgaaaagaatgagatgcaacaattaaggttacgagtgggttgactgatagaaagcaaattgaatgataaattaggtaaatgcaagacatatgacaaagtaagcaaaaatatcgccaaatccttctgactttctctttgtatctatctatctatatatgatgaagtttttgtcctataggataaggggaactacggacggtgcaaacaatcggatgaatttactctcacttgttacaagtggtgtgaacattgatgaggtcaatggacctggtgaggatattcttggagtagttgaaagttggttggatgatgaaacacacaacccagatgtgcctgctgtatcacaccagaggggtctcacaccttttgtttttgttcctttcgaagaggtaagcttgtccctccctcattagtttttagccccaagaatgagctagtttgaaaatattttggtgtttgctttgctgcgcatggtgtaggtggagacttcggttttgaatcttcccgtggacaagatggattattttgtacctggctgattactcgaacaatgaggctattatttgtaaagttgtaattacatgtgaaactattagtttctttgttccaaaaggttgaaatagttgcctgaaatattggctcgtgttgtaataattataagaaacgaaattggatagctgaattgtgtattctatgatgtaataatagatggattttaagttaaaaacgctactcattgatgggggaccaatgatttcaaactttgatattgttcttttgtttcttacaggaaactagggaggaatacttgtttttttccttttattttaaaataggagtttttacacgaaaatactatatttttttaaaaattttacatttatattgtggtaagagattttttttagaaaaaaatataagcatttattatatatatatatatatatttttttttcttctttaacattctcttactattcatacccaaattactttatattattgtttaaaaaaaaatattttatattatttttttaattaatcacattttataaaaaaaattaattaatttcttttaacttttattaaaataagatttacttacacactttttctcatattttttttactctctcctacaaaaattttggagcactcttatatctttatctctcttacaagatcataaaaatagtatattttttttatatattttataatttatttagagttaatttatgaaaaaattacatattgcaatgaggtcgatctcatatttgagaggaaatttagatttctcctctcctttaatcaagctgaccttcatgagtttaggaagaggcttggaaatatcgatgccaacatgaaaccgcaaaaactcaaaaactttttgaggcaattcttagaagaattctcaacttcggtcaccggcccaagaaggacaccaagttctctgcccattatcagcagtcatgcacgagatcagaacaagatgaatttgaacccaaaatttcactctattaaacgtcaacaaattgtaatcaccaacactcgtaggaactttgagtgccaacaattgatattctaaaagccatggaccaccaccaaagactttatgtttatccttaagattcaaaaaccgaaataaaaacgtattgttactcactgccttgacagtcacggtaccattaatctttcaaataaatcaatacttgtgtcatatgttccccgaaaactaccttagaggaaatcaatttccccactagagttctctcaacactatctttgctgacatccacaaaagccgcctcaagatcaccctcaataatatcctcatcactattatcgtagtcaaacgaattgttcaaagc

SEQ ID NO: 220555 - DNA, 1840 bp, Cannabis indica
gaacatgtgggaaagtggcaagggcaggaaattcaagttcattaaactggacattcctggtaatgtatatgcggccagaagaattctcacataggtaacctttgtgtgccatcgaataaccaatgaaaatgcatttttcagatttgaaggacattttatgatgctgatatggtctaagcagtgggaaacaggcacaaccaaagggtttaagaaacccataatctggttctttgtgaaatagacagtgatagggtgttgaattgtcaataactggagagggtaatctattgataacataggtagcatgctgaaaagcatgccaccagtaggcaaggggtaaacccgattgagcaagaagtgtcatgcctgtttctgttatgtgacgatgtttcctttcagccctcccattttgttcatggtcatgaggacatgaatgttggaaatggattccatgagtggctagaaaggaagcaaaggtccgatactccctccccaatcggattgaactttttttatgggacaatgaaactgtttctcaaccaatgttttaaactggagaaagataggaaaggcttgagacttgatagacattgggaaaatccatgtaaatcgactaaagtcatccacaaaaaccttccttagatggttcatgagatggtccctacacatctgtgtgaaccaattccaatggcatagaggccctggtagtagacagtaagtaaggtaatttgtgttctttgcctaatttgcaggcatcacaaaaccttaggttcttcagagaacagggaagttgtaatgtggttagcactttggcaagagtgtttggggcagggtgtcccaactttgagtgccaaacattgatgtcttggttaaaattagcagtaaaggcttcagaattaaaaggtgaaacaatgtaatctttattgctaacagaattggtacaagaggaggaggttgtaaaaacaacctcattattacattgagaagtacaatcagtagtactacaagaatctgaaactttagtagctaagtgacactggagttgaattggggacttggtcagcacgtacaggccattcttaagcctccctttgagcagaattttccctgttatcttgtcctttataaaacaacaagtggagtgaaattcgagaaaaacatggttatcttttgtaagctgtgagacactgaccaagtttttagttatttgaggcactttaagaatggattttaactgaatagcagtagatttagaaggcaaagaatggttacctatgtgagaaattggaagcttctttccatctcccacagcaagagagtcttgaccatagtagggaatttcgtattcgaggtgttccataccagtagcaacatgcttatttgccctagtatcagcataccattcttggtcataggcaaagtcaggaagcatgggggagctgtagttgagaccatcatcctcttcaatttctgtaagataagcatgagattcaccaggtttgggagggacaaaagacttgtcgaatctatagtgatagacagcagcagtatgtcctggtttgaagcagacttgacagaatagcctggatgatgcaattcctcgaccaggatatcgacctggggggcgattggggtgtcctgagccatagccacggccagtataaccagtcgatcgtgagtgagatatgccagatccaaatcttgatgaactggtggagagattggccatgggtttggaagaggaatcttggaccatgtaatgtcgctcaagacgactttcgtgagtcagtaagagagattgaattgactcaaaggagaggttatcgaccaagcttgttac

SEQ ID NO: 220556 - DNA, 2644 bp, Cannabis indica
tctctttgctgactgagaatctctttgctgtagtaaaattcaaattattcagacgaatggttcaccaaatctgaatgcaaaatagaccaagaaacaaaggcaaagcattcaaaatcatcatcatcgaacgcaacattattccatacctgaaagtttggtccgtccatggcatctaaagaatacttctcacttgctgccattgctcaaagttatctaaatttagagcttcttgatcttagtgcgtatgcttccaattccttgtgcattataaagatggttgtatttttttaactcatgcaatggttgcaaactcaaatgggtatgttattcgtaatgacatctttttcccattaatgttttctgtaggaatcttcttggtgaaattccaagaatgccctacaccactcaagcaatttgtcaaaaacgacagggacaaaatcgtcccagaaaaatcaattaaacaattgattcacacgacagggaaaccttggtcgtttctttcacacgacaatggaacttgtcgttccttacctgcacgacaaatcgtttgatcaaaacgatttgtcgttctccttcgaataaaaccaagagagatcagagctaaccctagctcatttcactcttcgaaccttcgagagtttctcaaactctctctctctctctctgccttctctctggttctcaaaccctagaaccagagattcttctcgatctcttgatcgatctcacccagaaatcaccccagaaacaccataaacacacacacacaaagaatagacaaaacacagtaggttagagtaagaaatcaaacaccagaagttatagaggttcgccctaaattaggggtacgtcctctgatgagctcgccttgaagatcgacctcagatcttgcactatatcgaagaaatattacatcaggtgagaaatccaagtcacagatcgactggtatttctgatatgttctctcttttgttttcttgtgtttatctctctatatttttctgttctcactcactgactctcttttctttctttgcatgaacttggaacaacatttggagctgagtatttccagatctggaaactagggctctggttttctggtatctctcaactgagagattggtaagtctctggatctgcttttatagatgtagtttagggttgatcaagatcagggagttagttacaatttcggttgtaactaactaccagatcttgatccactagaggcgaagccacataggatctggtctggtttttatttgtatttcttctcttcttgtaaaactgtaataataagtattacagagggatctaatttaacattttctaacacaacacttatctaaattcagatttggtattagtgataatgtgattgaaatgatctgtaatgtgttccggcccagacactcttacaaggctccttgttgctcttattactttaaatagttactttttttgttggctatgtttaagaacatattctttgttttgggctttgacttttaaagctttagttttaataatgtttcttaatatcggcagatggtattcaatttatcacaacacaattgccaatttttgaacttatggattgtggcatggacacatgtgatcccaattctccatagcctatctaagaagaaagtagtgattgtgaagtacaaaaaatatatggtaatgccacagtctcacatatttactagaatttgatcattaaacatagtgtttaaaaaaactaagcttatggggttgttgcttgaatgaaatcatatttagactttggtggaaaatctttgatcaaccctattattcattaattggacatgtaaaaataattttaaacgataactaattattttttcttcaattatttattatattacttttaaataaagtagaaagcactagcataaaagtaagtatacgtgcctcgcacgtaactttcttctagtatataaatatatatatatatatacaaacagatacaagtccaattattaggcaacttactttgatcattaaatgctcatcatctgaagccaagttcaagcaatttgatttttcatcccatatatatattgacagtcacatctcgattttcttaagtgcatataatacctgttaaatttcttatacaacttactgtgtgtctccaatcagattcttctggtggaaattgttggtgaatgattttaagtcctcagatgtaaatactacgtataaagaaaccttctggtcaagattataaatataatcaacaatattattgtataaaaaaattggagaaagaactattgatggatccatggtttggtttctccatgaattgattggataaaagagaggcatcaagctgaggctgtaacgtccccgcttcaagcctccattaggtccttacacccacggaatgaatgactcttatacacgagtacgtcactctagctgcttcatggactaatgactgaccctacagaccaacacaagtgtttccagcatactttgtcctcactcgcacgcttcttgagaaaacttcccaggaggtcacccatcctaaaattaccccaggtcaagcacgcttaactgtagagttctttcgtgatgggctactgaaaaacaagatgcaccttgttgatat

SEQ ID NO: 220557 - DNA, 5600 bp, Cannabis indica
atttgaatgctatcttctggctctccatgattgtaagcctcgctgacgctatcgggataaagttatatgaagtcttcctataacgagacggtcacctcgctctcttgttcttgagccgattcgacttttgcactcagtttgttcattgtacgctaaggactttcacgattgatacatgtcactttctttggtgcctcactatttgcatttagcgacatatggtttctcgctaatatactaagtgccagtttgtacattgattcctcgcctaagaccttacagtcagggggttacagatatactctgatacttacgtaattaatgagttattccataataagcaattgcattgattcacatttcctttatcttgaaacgtgtcctccagccaaatttcgggtataacaccaaataatctcaccatgcatggccttaacttcacatcctctaaccccatctttctcaatgtgtttttgtagaggatgttgaccgaactcccattgtccaccaatacccttttcaccattttattggcgagctggactgttatcacgaggggatcaacatgtgggtaccatacatgttttgtatcctacttagagacgataatcgagtgttcatccgtcttagctttcttcaatggttctggagggaacaccaattttgcattcttcacttcatttatatacctcttttgggtatcattactattttcagcgtggtgcgaccctcccaagatgaccaagatatcctcaccctcaacaggatgaggttgcattctctggttattcgggttattagggttgttaggttggttaggattgtttcgttaatgtcttacatactgcctaaaatatcccaaggagatcgaactatcaatctcatctttcagttgtcggcattcctcagtggtatgccctatatctttgtggttgtttaatctcgcttatgcctcacgtgcctcattggtttgggtttgcagaatgcaaccttgttttcattagtgagaaatatattctcacgagtttcattcaacttagtatataccgaatcaattgatacatacttgtcatgctttttctgtttctttttattcttggatgattctttctagtcatcctttcttttcgtgtttgaaccactaggattgtccactttagttgaggttgtgcttgttgtttccatacttgtgctgagattgcttcccgagtctgttttcaatagcttcatttcatttcttgcttcctgtttacgtacaaagacttggctctttcattaaattcattaatgttcctcacagggcgaccctggagatcattccataattcacctcctgttgtggataaatcaattgtgattcctgcctaaagtgtcgttagttgaatactatcattcaggtttttaacttttgcagcggctgtgctgaagtgacttaaatattcctgaagagactcaccaaattgttgttttatgtcggttaaagatgaagccaggtcggcgatctcttgaagcttgaaactgctttttgaaatccctagacaatcgttcccaggatgttatggaatgatggataaatttattgaaccagctgcttgcagcacctgttaaggaggtttggaaaaaaatgcaacacaagttattcgatacattgttggctcacattatagttttaatgttgtttaaatgagcgacaagatctgtggtcccatcatactacgaaacatgtgggttcttaaatccctgaggaaactctgaatttaggatatctagatggaatggctcagtttcttcatcagagtcgtagcctggaaatttaccatgttctccatcttgatattttctgaattgatccctaattcaattattcatagttgaatgggatccatttgttgctgatttgcattttgttaagttgatggcataaattaggtgcattttggttcagacacttgtgaaggtcagactgtctttgatttaggttctcacgaaggtcagacacaattcgctcatagttactcacggatctgtctccgagtaactctcagattgataactttgagaattgctcatgctttcttattttgcataataatgtcgagatctgcttccttctcgcattttcttgctcgaccgactatgccctcgagaccttaaatgtcccaagcttaaacttgcttcatcttgtaccagccttctgctatggaagagattagatacacgtcctctattcaagtacgtgtatacattttctctatctgctcgagaaggacattgaggatgtcttagaggaagcccacatggcattggttgatttctagggtctctcttattagtgcgtgggattctctggttccctagacgaggctatcttacttcttcattcctgtgagatgcttctggcgcatcagcttgctcattcccttggttagcaaatccatgggaagtttaaggaacatttcgccgatgttcttgattcctggtattattaggatttgtttaattatctatagggacatcccttgcatccctaggttgttcttcctgggcattttagggattcctctggtttgtttcctgtctcctggttctggagcctcgaggtctccctcgtggtctttttaccgcgggatcaggttgattctgagaaattgttctctgtgccgccctggcttacaacaacctctctttctagctcaatgttttgtcacttagatttagccagtcattgtcaaagttgtctattctctcactctactaatggcacatacctggttggatcataagcatcctcactgctaggcacctatctgatagagtcattggcatcctcattcctactttctgagttctgaccattattaccatcgttccttcttgaacatggcatttaagaggtgttgggtctttgagatctcatgggctctttgccaggacgatgggttatttcctcaggttgattattatggcgttgatcatcacaagccattgaatttgggtagataatgttcgtaaggtagggactttttcctgagtttttatcactaagactctcaatgaaagcaccaaactattaatgcagattttcgttaaccaaaataaatagcctttttggcaataaatatactacagaaataaatatataattaataaataccagatatttttacgtgattttgtagttaaaatctacatactccacgagtccttattattaggaatatttttgagtacatattacaataataatctttgaataactaatattttctctcaaatttatcgtcttttttttttatgaattctacccctatttataggaatataagtaggtagttattcattttaggattgattcaagtataactgttcatgaaatgtggacaattctcacctttcacttaatcacacatgggataatatctaataactatcgaaccactttttatttttatcatttagacggttattgctgacttggaaggttgtatctcgcttgatatgagttatcctcattttccatcttaataagaaaaaatgctaagtgttggaaggtatttcacctcgtcgcatcccttcattcgaattagtattgcgaggtgatcatctcgctatgtgtaacgcgagactgatgtatgttattacatttgttcagtttgagtagatgcatatccccttcttgtctcgcttaagacttcatagtgaacgagtttgaatattatctatcaaacttttatataattgtaatgaattattttttttatttacatttattgatataatattattatatcattagagtttattcatattccttctgtaagacatgtgtagacttttgaagtatagtcaaatttcaggtataacagtatctattaattttaaccattttaattattttattatatttttttataaatattcttccaagcttatttatttctctacttaaggtttatttatttaagttgtatatgttagagtaattcatcacgccaaagctcttaattagaaattcgtaagtaatgaatttataacaaaatcattattgagcagttaatttaagtacgatttgttttatttatagagaaaacttattttaaagaatagtaaaaagatatgatgatgtcagtagctttaaatgtaatggcgactacacattacaagaatgtccacttttgccggcgcaattgctcaattgcgccggcaaatgtccactaatgccggcgcaagtcaataaatgcgccgacaaaagaagtcaacaaaatttatttacccccatcttttaccagcgcatagtatctccagcaatagtaaatattgccggcaaagtactataagtttgtcggcaaaagttggtaacccaattgccaaaaggtgagaatttttggcggttcgagctatcttttgtcggtgaacatacatgcgtcggcaaaaattattaaatgttttatttaacattatttacttttgctcgggataaaatgcggtggcaaaagtgtgaaaaaaaaggcagttaattttccctgcagtgaaaaaacgtgtgcgtaaaagtaggtgaggacttttgccagtgcatttaattgcgtcggcaaaagtggtgaccatttaaccagaagacacgttgcatcaggggttggcttttgtcggcgcatttgtgcgccggcaaaggtcctgaaattttttggcgatcaacttcccgcccagatgaaaacgagtgtgaaaattttgtggaaaatttttgttggcgcacttaatttcgccggcaaaagtccccactaaaatgaaacgcagcgtttcatgtgtttttattcagcctggacttttgtcggtgcacctaattacgccggaaaaaatccaggctgaataaaacttggcacgaaccccccttccccatttttctcatttttttctctttcatcttcccttgcttttctctgcaactccttcgaccaccgccaccggcagcccccttttcttcttcccaaccaccattttttcatcccaactcccgattttgtccactaaattctcagtactctttttttttcttttttcttcatttttattgtaaataattataaaaaaaaatttccaccgaattctgaggtgattgtgccgccgcacctccagcaaccgctgctcgagcctctgattgttcttcgtatttcatctttttcccctcaaggtaaccctatatttttatttattttagtttttgtttgggtatatagtaatttttaggttatttgtgtgtaaaattttgtgtataaaaaaatgtgtttttttttttttagagttttatatatggtatttttttttataaaatatgtgtatatatgtatatatatatgtgtatatgtgtatatgtaaaatgtatatatatgtatattaattttatatgtgtatgtatatgtatatatatgtaaaatgtatacatatttatatgtatatgtatatttaaaaacccctaattttatatatatatatatatatgtaaaatatatatgtatatgtatataaaataatatatgttatatatatatcatataatatatttttatatatatgttatatatataatataatatataatatacaca

SEQ ID NO: 220558 - DNA, 4081 bp, Cannabis indica
gccgccatactatgcaaactcttgatcgtactcttgggcaactagaagcaactcatagtatatgtcggcattgcttgaagaatggctttaataagcacctctttaccagccactgaaaaaatgaatcccttccaaccacgaaccttttgccacaccctattcttaataacttcaaatagctcctttttgctcctcccaacaaaagacggaagtcctaagtaattaccatagttattaaccactttcacatctaacaaagcgactaaccgactccgaagactcctatccaccaacttaccaaaacacatcttagactagttaaaattcactgcctgacctaacgccgccgtatacttgtctaataagtccttaaaccgaccacattccaccaaggaagcatcaaaaaacactaagctgtcatccgcaaagaacaaatgagtaacttgcaatccttgacgaccaaacgacagcccatgtaaccttcccgccacttcctccctatgaatcaaactagagaaagcttcagcacaaaagagaaacataaaaggcgaaagaggatccccttgccttagtcctctcgtaggaataacttgaccacgcacttccccattaataataaaggagaactttaccgaagtcaaacaacttaaaatctttcgaacccacacatcagcatacccaagcttcctcatgacttccgccacaaagcaccactcaactctatcatacgctttggccatatccagcttcaatgccactttcgttccattcccaaatctattcttcctcatacaatgcagcccctcaaaccccacatagcgttatcatgaataactcttcccttcacaaatgcactctgagaatccgaaataactaaccccaatgatcgccaaagacgattagctaaacattttgacacaatcttatatataacattacataagctaatcggtctatactcctcaatatgttgcggcttgtccactttcggaatcaaagcaattaaagtctcattcaaactctcaacctcagccgcctcattcaatatgtttagacacgctgaaatgacatctcccttcaacttatcccagaaccgttggtaaaacaaagcaggcagcccatcaatacccggtgccttagatggggccatttccttcaccgcacaaaccacctcctcctccttaaatggctccaacaattcatcattcataggtcccgtaactctcctaggaatagcctcaatcacctcttcaaacacctcctgttgaatagcactagcagtgaacaaatttgaaaaataatcactcacaatactctcaacagccccttgtccctctttccaaatccccatatgatccaccaaaccaacaagctcattcttcttcttccgccccaaagctttacgatgaaagtacttagtgttttggtcaccacattttagccaaagtgcccgactacgttgacgccaatatacctcatccttctccaacaacacatttaaccttttttcctacttctttatttcaagccatgtacccggctgttgaatcatggacaactcattcaacactttttttgccttactcatctcttcattcagttgcttcttcctgttaatgttccatcttttcaactcaaccccacacttagccgatttccttttaaaaccacttgccaaacacacaccaccctccctttcccaaactatatgaacaagtgctttgcattcatcctcctcacaccaagcttcttcaaaatgaaatcgacttcggcgactatttcttatactaccacccgtgacggctccaattggcatattcaccaccaaagcacggtggtccgattcccaccaatcaagaaccttcacatcggccccatcaaacatagataaccattcctcattacatagcgccctatccaatctctccataacccccgtgtctctatgaccattacaccatgtgagctccgatttacaagaacaaaaatccattagttggcaattatcaattactgcccaaaaatcttccatagccttgggacatttgatccgaccccccaccttctccgataaacttacaatctcattgaagtcaccaatacacagccaaggtcccgcactcaaccccacaatattttgtaataactcccacgagaatttcctctgttgtttatccggatgcccataaaaacaagtgagaaaccacggttgaaacccctccctagttaccaccgaagcaatatgcccaggtgaactagagtccaccctattaatgtcatccttccacatgtgaattaagccaccacttaaacccactctatccaccacccaaaaattagaaaactgtaacacactacaaactctttcagcttgacttctacccaacttactctccatcaaaaaaataatactcgagttaaattcccgaacatgggattgcaacgcacgcaacgtccaaggattcccaattccctggacgttccagctcaatagatacattaggttcggcggccctgctcgccgcttcagcgttgaaaataagagaaggtaaatcaatagaagaagaaataccaacctcaaccagagaaccgttatccaaaatcccttcacctgtagttgaaacaacaaaatcaccacccaccactgtctgagagattgcttcacctgcaccatttttcccccgatgcaccccacgggctttatttttaatggaaagccgtcggcgttgactaccaccactccccaaagagctcagaaccgtatcaattttacctcgagcaaagccacctcccgcgccaccatcatcaatctcttgcaccacttccttacccttgaaagatgaacgcaaaccctcaaaaccagcagactcgcgagactgtacagaactcccaaagccaccacacttcctctttttttggtcaaagactccatcgataggctcgcaatatgcctcccctacaatcgacccccctttcctggttctttcactggtatccactgaagaagaagaccctgggcatgattcacttaagtgaatattattaaaaagcccactatcaaccaattgcggcccaacaccttttacaactcccactccctctctttcaatattttggcccaactaaccttctctccaattgggcctgtccagcccattccttgccacctcatcatccccttcaattccattaccccgatgaacactccccacgactccttcaacatcgctcaatggaaaactgcccatcccctgctccaccatcatcggagctccgccattagcgccaccctccactggcctgagaacatcgcctggacattgcgtttcacctctgtacgccgtttccacatcatccctccgattaacatcaacatcgaccgcaccaacaccatcctccacattatttctaagatcaaaagctcgaaaaccattggccacagaatcctcttctttaagccaagagccatacttaggaactaaccttccatccacatctgattccatggccatctcctgagcacaatcaacttgttcatggccccaaacgccacacttaaaatagagcaacggtaacttttcaaatttaatttggacccaaactttgctaccattagaaggaatgaacctccccacaaagatgctatgtactagcggaaacccgattctaactcgcacataattattgagaaagacttgctgagtactgctccatttgatatccaccacttcacccgccatagaactgaatcttttaacattattaagggtaaataccttcaacggaaaccctcggatccgaacccaagagaacactttgtccaatttcgcatcctgccaattactagaccttggccattcttcaaggatcaaaaaccctccattaaaaatccaaggttgtttatccaacacccactaagcatcctgtttggattgaaaagaaattccaaccaaattcgtatctgttgagccttctagcaccttcactttccagttcgaaacattccgccaaattctgttaaacatactttggaaaagattggcagatatccctctcttagccacaattcttcccataagtg

SEQ ID NO: 220559 - DNA, 2268 bp, Cannabis indica
aaaaataatatatgtgactattatcattttgtcaataatattggttattatttaaaaagaaaatcttagaatccaaaatgtataaaatttgggaaaattcgataacaaaaaaaaaaagaaaaaaattgacatagatgtgtatcccgcaagcattacagacggttaattctgttaattttcaactccatgcagcgaaaacgacatatcgtttaaccatgtaagacaataccgaaagtgtccaatcgagaatagtcaaagtaaaaaaatagtaatttaattataaaaataaatgccagctgtctacattgctttcaaattacataatcgtcggtaataataataacaaaaataaataggggcattttagggaaaaaagtacaatgaaagagtaagatgtgaagggtaaaatggtaaatagaagaaaggtattttgtggagatctgagaaatgtaaattgcattaaggcgcacgcaacgtacaactcaactgcgccaaattgccgttgagaccggacttgggaccctctctcctatctccgtctccaaacaacccccttaccctctctctctctctcctctttctctctctagaatcaaagaattcggaagatccatgtcgtcggcggtgtccatggaggtctcaagctcatcatgggacgcccttcgtaaacaggtcaattcttcttcttcttcttcaatttctttattgatacaaattttgaggattttatgagaaagagacggaaattctggattctgaagattttactgtccgtttgtttgttggttgaccgagagaatttgggggattgaattgatttcattgattcgtttcttttttaggaattcgatctttgaatttttttttaggaacgttttgttacttagtttttggacaaaaactatagagtaatgaacatgatatacggttaaacttgtaaatagcgaaaaattgaaacttgaattgggtttattggtctaagatttttcaggtagatctctgcaacattgaattgtattttggttctggtttatgtgttgatagttaccttgtacgtgagagttgaagttaggaattttggatggtgttggaacgaaagaaatggttgataggtttgctcaaacgagttaaaaataaagttatgcattccaatttgatgagttactaacttgatgttatgctgatcaatctctaataatgacttggagagttatatgctcatttgatatgtaaatggacttgagttggttgttgatatcatgggacttgagctgtggttgatccttttatttgtgtatcatatcaggcaaggaaattggaagctcagttagatgagcagatgaattcctatcgaaaattggtttcttcaaaggattctactaaaattgaggctaaagataatgatcttgaatctgggattgaccggctactaaagcagcttcagcaagtgaactcccagatgcaagcttgggtttcttcggctggctcagaaatggtttctcataccttgactaggcatcaagaaattcttcaagatctcactcaggtacggttattttttaaattgttttttttggaacatagatggaatgcattatactctcgtatgtaatttattgttgaaaggacttgtaggtgcttgaggttactttacatgcatcccgggcatatatatgtctaattaatcaatgagctttaatatctatttcattaaattcattaacattaccttggttgttgttgtaaaatgttgtgtttaaaaggaaacactaattttggctccggtatatgttagtgatctttgtgtctttcaaaatctgttttttggcttatgattaagaaatgaacctctagacattaaattctttttaattgtgattgaagtgcaggagttttatcgtctccgctctagcctcagggctaagaaagaacatgcctcgcttcttgatggttttagagagtttgatagaacaagattagacttggaagagggtggtgtttctgccgagcaaggtcttctaaaagagcatgcatctattagtcgaagtacagggcaggtgagtatagatgatattcattacattatcttattttttttcccctgattgataactatcagctcttttggtggaatttgtttcattaaaaatggaatttaagaaaaaaaatctgtgataataatcgttgttgtgggtttttgtaagtatgaggatttttatggaggcaatacagaatatctttactttttgacatggaggaaaatctgtt

SEQ ID NO: 220560 - DNA, 3698 bp, Cannabis indica
accattttaaaaaatacaacattcaatttatcatttaataaaactaataatttaatcgaaatccaaaatagtacttaccccaacttctccataaatgttagcaagaatggtccatttttcaggggatcatttggtactaccctaaactataattggcttaactttcaacatcgcttatatattccaatttggaattgattcactaaaagacactatctacaattatcattggacgatcttagatggcccactcacgacaaatgactctatgatagttatttttctaagtaaatgctatagagttatctatcactatatataaagcagtcaataatttttggagttttacatgttatattatttctttaattttattttatttttccattaaaattttttgtagtttaatataaattacattattttgatgtgatatttttagatttttaatcacttcctattgataattatatattagctaataatcatataacaaattaatcatcaataattataataaatatatcaataattttaatcttttcatattagtttacacaaatatcctttgacaaatagtaattattaacttgttaatgttaaattttgtatatatataaatttaattttactttaacactgtgtaataattattttatgaaattaattttgtattttatgcattaattatttttatagtacttctatattttaaaaaaaaaaaaatacatttttaaaaaaaaataaacaaaattacagaattttagtaataacagtataataatgtagggtttatattttacttctatttctacttctattagtttgttgtcttaatatatactagctagttgttggtattttatattgatggagagtattgttgtctactcatattcactctttcaagtaaaacatgctaatgtgtaatgtttcttttgtttagaataaataaaaatacaacaaaagaactcttcttaaagaaaacttagctaataatggtccgtggttgaatctaaaataaaaactttacttgtattcattgtttgttacattaaaaaaaaaaagtattgttattaggcactaatattgtctaacactactagataccttaaaaatgagtagcggtattctataacatttattacattaaattgtatggaactcgatacttaattttatcaatagtaatataacacttttgagtgatgctaggcattagtatttacttataaatttctaatagattttgaatttagtattgattaaactattatttagctctaaagaaaaaaaaaattgaagaccaaaacacaaaatcaacatatatactataaatttttaaaaatatatttaaattatgagctagcacgtagctcaactagtttcttctaaaaataaatatagagttgtccgtaatatagagatggaatgtaaaataaacatactttaaaaattaaaagaagaaaaacaaaaaccattaaatagaacacatgctttatcaaaaaaaatctctaatttaatttctttttcaatataatgctatgatatatatcatctctatgtttgggaatctatccagagaattcgagagagaaagaaaatttttattatctcaattgaattaaaatgcttttacaaggtatatgcctatatataggtagtgaaaagagaacgtagttagttaaaatttaactaatctgagtcagctgatcaaataacaaaaaaacaacaaattgacattaacataaaaaagaaaactaaagctaaagctaataactaattgatcctaatagccccctctaaaggtagagggtaaatattaattacacttaacttggatacaatattaaaagaaaaagttagtaatgctttagtgaagatgtttgctagattttgttgagaggaaacatggaggagagttgaacttaaagaatgaaaagaaaacagagaaaacagagagagaaaggaacaagaagaagctgaagctttattctctgatgtgtttttacaaggagaggtatatctaatatatataccagatgaaccaaggctactgacagataacaaccaatactaactaaccaagcaacaaactaactgtaataacagaatgcacaactaactattagtcgttagtgtcatgtgtttcctcaacatgccccctcaagctacacgaaaagaaatccagtgaaagcttgttacagagaaaattgaatgtaggaaaagttaaagctttggtaaaaatgtctgctggttgttcttctgtaggaatgtaggagacatccactttgttgtgcagaactaaatcacgaacataatgaacatcgacttcgatatgtttagtgcgagagtgaaaaactggattagaagccagcatttgagcgccttggttgtcacaccagatcataggtttggactgaagatgtatgccaagttcgtttaagacagaggcaatccaaaccacttcagttgctgtagtagagagagatctgtattcactctctgtgctagagcgagagacagctctttgtttgcgagacccccaagaaatcaagttgccaccaagtttgacacaaaaaccagtggtcgactttcgatcaataatatcacatgcccaatcagcatcagaaaacccttcaagagttaaccgagaggcaggtttgaagactaaacctttgttcatagtacctttaatataccttaaaactctcttgcatgcacaccaatgagcaagagttggggattgcataaactgacttgttcacagcaaaagacaagtcgggtcgagttagagttaggtactgaagagccccaatggtacttctgtagagtgtagggtcagaaaacacctcactttcagtattgtacaacttgtaaccaggacaaatgggagtgttgcaggacttagcattcagcatatcgattttgtggagaatttccattgcatatttggattgacagaggtatatggcagaatctgttctgtgtgcctgaaagccaagaaagtaactcacttgtccaagagcttttaaaagcaaacttgctgttgagatgagatataagttgttgaatatctttagattgagccccagtaatcaatatgtcatccacataaacaagaactagaagtggatgaccattgatgttgctgaaaaagagagaactatctgacactgaattctgaaatccccatgatagtaaggcttgtttgagtttgtcataccaagctctaggagcttgttttaagccatatagagccttgttgagtttacacacatgatgtggatagttggggtcttcaaacccttttggttgcatcatgtagacagtttgcttaagctctccattaaggaaagcattgttaacatcaacttgttgtatttcccaaccaaaagtaacagcaagagtaaacataattcgaattgtagaggccttgacaaccggactaaaggtgtcaaaataatcgattccaggtgttgttgaaaccctttagcaactagacgggctttcaatctgtcaacactaccatccatgttcaatttgactttgtagacccacttgttatcaactagctgcatgccatcaaaatatggaactaaaatccatgttttattcttgattaaggctgtattctcttcatccatagctgctctccactttgggtgtttcaaagcctgctgccaattaagaggctc

SEQ ID NO: 220561 - DNA, 2454 bp, Cannabis indica
ccattccattccatttcattacctccaaccaaacaccaccaagtttctggtccaagtcaagaatttactgttatcctctaatagtttcaagacattaatccaacccatcattcttcacaatgatcaagtttcaaaatttgacatttgttagattataaggttgcaaaaaaccaactgccaaactagagaagatatgagtctcttggtatatatgagatgaaattccataggtagtgactaaaatattacatttggaaatccaagaaacactttctgattaaaacaggtaaagaaaattcatgcccaaacatcatttttcccatccccatctatcaaaagtcaaccaagttgaatttacatacaaagtgaagctgtcctgtgttttgttttagactggaagagagtgatcatcagattcacaggaagtgaactctatacaagggagattggttcttgagttaagagactgaagtgatttagcaacttcaaacatggatggtctcttctctggcatcacagatgtgcagcgtagagcaatgtcaagaactcctaacatctcttgtttcgatgatgaattcgatatctcctgatcaagaacttgagaggctccattagtgatgtttacttttctcctcacccactttacaacatccagcaaatcatccgacgtttcagcttgctcggccggtcttcctgtgactagctcaaggagcactacaccaaagctgtatacatccatttgttcacttggtttcttactgtatccatattctgtaatcagtaaacaaaatgaggaatttagataccaaaaccaacactttaaagataagaaatgatagcacaatttgacaacatcaaaaacacaagcttgttacctggtgcattgtaacatgagacaggagattcagatgttattgttgattgaaaagcagcttctcccacaattcgatcaagagcgaaatctgtaagctttggttcgaaatcttcatccagaagtatgtttctggatttgacatttctgtggagtaaatgaggaacataatctttgtgaaggtaggctagtccttgagcaacaccaatagcaattttcatccttacacaccattccaactgaaattctgttttaccaatcaagtcacctaaacttcctctgtgttggaactcatagatcaaaaagattgaatcctcagaatggcaaaaccccaaaagtttaacaatgttcttatgtctgatcttggccagagtcttgatttcaactttcaaagctttcgaagactgagtttcgaacttaacaagcttcttcacagcaacttgttcaccacttggcaagcttaaaatgtaaactctaccaaaaactccaccatttcctgcagcactcttatcattcattcccatcaccaaatcatgctcagtgactctgagaggataaaagaaaaccgaacgccacgagccaacttgagatctcttcttcatagatctttgatacacaataaaaccagcaacaacaaccatagttccaacagcaaaagctaaagagatcaaggcacaagtcaatgttgtaagaccaatatcctggtgtcttggtaactcatcatcagaacatgaattgggcaatccaggaccacagagttcaggattcccttgaagaaatgaagctggaagacctgaaatcaaagagtagggaaccttaccagatagctggttgaaggaaacattgaagagggcaagcttcaaattctgaaggccttgagggattggaccagtgagattgttatcagaaagatcaaggtaagttagtactggtaagtctgaaagagaaggaggcatattcccagttagactgttttctgccaaagacaatgatacaagtttcctgcaattcttcagctctggaatgtcaccagaaagagaattttgggagagatttattatgctcataacaggagagtcacagaagtttggaggaagttctccataaaaaccattactagatgcagagaatctatacaagctcttgacatgtccaagaccctcaggaatcctgccactgaagctgttgttatcaatctgaacttgctccagttgagcagccattgctatggattcaggaatagctccagaaaataaattgttttcagctctaataagcttaagtttgggcaatgaccaaaccccagttgggaaatcaccagaaaacatgttgttctgaacttgaaacctctcaagactcaaacattggttgatggagctaggaattttaccactaaatagattagtgtgtagactgagatttataacacccttttggctacaaatgccatctgggaataaaccttgaagcttgttctctgaaacatcaaaagacaccaagttcttgagagaagaccccagtgtctgaggaacctttccagttagattgttctgagaaaggtccaaagtggtcaaacttctcaa

SEQ ID NO: 220562 - DNA, 3864 bp, Cannabis indica
ttgacaagcatgtcgtccacgtaaacttccatattatgcatgatctgatctttgaatatcctattgaataaccattggtaggtagccccaacattctttaatccgaatgacataactttataacaatacaagccaatgtcaatttggaagcttgtgttctcttggtcggccaaatgtattctaatctgattgtgccccgaataggtatccataaaacttaggatctcatgacctactgtagcatctacgagttagttgagccttggaagtggaaaacaatcccttggacatgtcttatttagatttgtgaaatcaatgcatacactctattttttgttcggcttgggcactaagatagggttggccacccatgcggggtaaaaagcttccatggtgaacttgtttgttgggagcttttctaattccaccttaagtgcatgtgcacgttctttatccaacaatattcattttcgttgtaaaaaaattgggatcaatgttgagggtgtgggcaactatagatggatttattctgaccatgttttcatgcgactaggcaaaaatatcaaggtttgctcttagaaatttggtcaaaatggattttattttgagcaacaaatcttgaccaatgttgagcttcctaatcggcatggtgggatcaatctctatttcttttaattcctccaccagtccaatgtttatgttaggatccccaaagcgaggatccatgtcttcatccccgcttttagtggattcctatttattcaaactttgctcgacttttgacccttggtaggctggttcttcctttttttgcctttgtcaaagaagggttgtaacattggcgggcagtcctctaatcttcctttagacatctgatcccattcctagtcaaaaacttaacacacaggtggtaaattgaagttattgctttcaagtcatatagggttggtcgccctatcatgacattaaaagcaaaaggaacatcaattactaagaattgggacatcacaatgtttgttgttggatattttccaatagtgagtgggagacggatatgtccaagaggtgttatgctctgtccagataaatcgtacactagttgcgcgtaaggaatcaaatttttaagatgaagccccatctttttgtatgttgtcttgaaaaagatattggaggaagctccattatcaatcattgaccgagccactatcatgttggcaatttgcacttcaacaaccagggggtcgttgtgaggataaatcacatggcttgcatcatcttcactgcatgagatgatgtcttcttctcagcacggctgttttggcttcctttcttccatggccaaaacttcttcatctttttgttcatattgaaatgtccaggcatatctctctccggctttgttcgaatcaccagcaatatgtgccccccaatgatcacttataaatgtccatccactattggaggcattagttggttctgattgttatcaggttgggcggcttgttggtgtttgttggtcttcacatacaaacgtatgtacgaattattctttctggtgagaaattcaatcttctcctttagatttttgcactcattagtatcgtggccaaaatatttgtgaaatcatcaatatttggtggtatccctcttgctcatatctttcttgatcggagggggtcacttgtacggcacaaccgattaggtctccataaaaaatggtctctcactccttggtgagtacaatgaaggcggtgaactttgatgccttctctcggggatgttgttgatcagaatttttattgaacttctcctttttcccattgttgtggttatttctgttgttcgaacttttaccaccatggttggaactgttccctggctggacggatagctatggtggttgggagtgtaggactttgatcggtctttttctggccaattgtgtccactcatcgaactgcttcctcgagctttataaatttgtctgcttggtctaaaaattctcccatcgagcctacggtgagccttttgatatctttccacaattctccttttagctcgatacctcctagcacagctgctagtcttccttccttggtaagtcccttcactttcatggcctcggtcataaactgactgatgtaatccttcaaaggtttgcctggaacttgttttacctctactatgtcttctaagtgagcggggagctatctcaaagaagagaattgcgcatagaactctgaggtaaaggagtcccattaattgaactttcttggtgttaacttgaagtaccactgttgggcagccttcatcaaggtagcttggaaaatcctacaccgtacatcaccctttactgtctgcaggtccatctgtatctcaaagtatttaatatgagacaacaaatcttttttactcgtatacatcttccaggtaagcattttgaacttggtcagaagatcaagggaattgaacctagcagaaaatgactagactcttgtctgatcaagctcctggtcggtgagttttgggccagtcaggccttgaatgaggctcttaagttgatccaattgcgcttgtatccctggatctacttgacctgcctgttgatcggcttgtgtcacttgttgaccccttggagcatcaaaaaggtacgaagttacatgtattttgtggaatgtagttctccacattaaatgtagttctccacattaattggtggattgttaagcggagggacataatgttcgtcccaaatttctcttctacaattcaaatcgtctcgaagatcagctttgggccccatcctctggaagacagagtcacacgaggttttctgcgtgtttggctcgtggaccaaatcggcctaggaggattagtatcgttcggatgatttacttgattttcatcgtgggcatgacgagtatcatgacgataattgttgcgctgtccactatcagctccatcatcatattgttcgagtatgactgtccagtgtaagaatttgttcgaccttgggaggttgttggtcggcatactaaggttgcgtatagacttaaacttgtccatcttggttgtacaatgccacacgtccttgagtccctccagctggtcggcctttgtatttctttaacggtaagtaactagctagtattttattcaattccgaaaccctttccaaaagggaacatatagaactcaactaaatcatataatcaattgttatattttgacttctatggtggattgtataattctgaaatatttagtaaatttccaaataaatgtgcttcctccaaagttatatagtagctgattctgatatcaatcttgtttgaactctagattcaattttatttatttttttgaaaaatagtaaaacttctgctatctataatttacattgttttacaaaaacttttgaggtataatttttccaaatattgaaaatagagatatttatccttaatgaacaaaaacgatgtgctaatatagaatttttcaatatatttatgaagtgatcatgaaatatgaggagaatatgtaataagtatggcctatagaagaagcaaggaatctagttaaggtggaagaaagatttagagttagagagattgagtgtgtctgttaacccaactccatcaaactccttcagtccccacctccattaatgatcattgcagaaacagctgttgtgttgtgatatatcatattatatgattattatatacatatattagctgcttctagcttaactgtaccatataatatgtatatagtaataatagtgtgtgtactaatattattattattatttcatcagcatgtgtttgtgagggtgatgatgaaatatgtatatatatatat
